United States Patent Application Publication US 2007/0054278 A1 - sequence listing, part 55

SEQ ID NO: 95162 - DNA, 241428 bp, Homo sapiens
  misc_feature (1)...(241428): n = A,T,C or G
agcaactctttaagaggtagacattgttatccccatttcacagatgaggtaggtaacatgagactttaagtaacctccaaggtcatgtagctacaaatggtaactagatcagaatgacgctaaagtttccttccttcacatcgtgctacctggcctttcaaatgaagttcccagagctgctgtgctgctgtgcgcagcttagtaacacacacgaagtcacattatttactcctatttgcaatgataatatgtaggtgtttcacttagcagttaatagtaatataactgcaatttatttctaattccatgcttaataaaaattttttaagaaaagaatagtcttacactttttgatgatgctaatgaactagatgaatccttttgagctcctcttgcaaaactgcatgaatacattttaagttggcttagtggagaaacacacctctctctctctctctctctctctctctctctctctctctatatatatatatatatatatatatatatatatatatatatttttttttttttttttttttttttttttgtggtgcgctctgcttgttggctccatttggaatccagaaatgactgctttctgggggaaaaggcagtttgcttttgctgcctcctgtagattgcttggcctggcagtttgtcactttcctgggcaagtatccagtttgtggtagtgaggtggttttgtggcagaactccacaattaaccacaagttcagtgtcaacggtaggctgccaccgtcgtggctgtgatccttcagatctgctgggatagccagagctgaagaaactcctgcttgtctagggagggaacaagaaaacttggaaagagtctgcattgctgtttattgttcaagtttcaggttttagatttataataaaaaatccaggaaatttctgggtaagcgttatagatttaatacttttaccaattgttatattttaaaagtataatagtaaatttgtgtcagagatacaattgttgctctgaaaacttgaaacggaaagaggaaaattcttaaaagtactagaatatatgctttcacagccaaagaattcaggtactgtcacttgagttaaaataaaaaatgacccacacatctctgaaacatttattttatgttgaaagtgaaatacgacataaacatatgtgtaattttgtttttgtaaatctaggaaaaagggttcttttagtgatttggtgcaaatgaatgttaagaaaaatattttaaaatcacaatatgaaaagttttttctattatattctattttaagagttttctattaaaattcattgactaataaagccaaaaatcaaaggaaatacagttaaagtctgatttattaaaatagttttgagaaatatcaacacacttgaaaaattctgaggacttgctgtaggctaagtacttgctataggcatgaagattgagctaagattgaataagagagaattcttgtttgaagaatatattgcagagctagccatgtaaataagcaaatatgataacagaacataaacctttatgtaacaaataataacaaactccagttccattagtagggccacaccatctctgtagtcccatcataccttacacttaagccataggatacttgagttatccaaatgcactatagctgaattcctccagatttttgcactgcttgcttcctttgcccagattatcttttctacttactttacttaggtaacttatattcaccttttaatatcaagcctagaaatcactttctctgagtcctccagagcattactccttacctgctactcctactgtagtctgggctcctgagatcccagagtacactgaggattattacctctgtatcacagctcctgttacaacgggctgtaatagtcttcttactgtcttgctttcattagactaaggaaccacatcttcaccattatatctttgtcatctagcacagtgtccagcacaccgggcacataataaatactgaatgaatgaatgcattcattaatggagatagattaaatgctggtagaggggggatggtacgtaggagaagtaaaagaagttagggaatataatacagagttgaaagagagaggtcgggggaaagaggagagagatcagaagacagccatctggacagatgctggggagagaaagaaggaagactgtaagagagagaaatggaactagaagaatgagaaactgagaacaagctgaaacaattacacagtgggggcaccctagaagaaaatgattttcttctgttttaatagtcctaacacattgttctcaacagttcttaatcacatatttattcttttgtgctatttaatagtctatgtgcagacattctatctcccagataaagctgcagctctgagaaaactctgaaggacctgttatagttttaaaaaatgttctaaatagcatttagtacaaatctcggcatatagtgggcactaaatagctacttgttgaaaagaactaaaagaatgagtcaaaatgaggctcagattctgagatgagtattagctggaaggaacataggtattgttaacatacttgggcaacagagtcgctactgcacacagaaaacaatgatcctttctatgctagagaaaagcttgtccatttttgtttttaaatataaggtcgtaaatgttaattatttaattctttgaaaaaccttataaggttttgcatgtatcttcagggatgactctagttttataaatttggaatctcaatgatactggttaatttactgcctatttctgagtttctttgatatttaaaatgtgtcagaccactttatcctgagaaattagaaaaaaagaaatacccaggggcttgcattgtcctaaaatgacttgggagcagggtggtaacagccaggatcccatgtcatggtaaaccaggagagtggagagatccactaaggagtggagagatgatgggtcaaaacgtgagggaaggcacctaatgtagatgacgccttgatgggtgcagcaaaccaccacggcacgtgtatacctatgtaacaaacctgtacgttctgcacatgtatcccagaacttaaagtatagtaataattaaaaaaaaaaaagacgtgagggaaggcaaagtcaggtaaaataaggatggggtaaagtgctgggaaaagtcaaaggtatactgtgacttcagtttttttcatgacagataatggtcataaattcttgaacctaaagaactaagtaattttattggttgtttaagtttggcaagggaataattaaataatctgacctctaagaaatgtggcctagtaataatctttgacaaagactgtaaacagagaagggagttactataaacatagctagctcattctttttgtgcatatttttagttaagtaaacttctgatggtctttggtcacgtccttacactttattttagaattctctcaggtgctaggttggccttcagagggatgcactccgactatgggttattgaaagagttgggcttgtagccttataaaaacctgaatgacagctaaaaggcggctagagaatcttgaagacgattttgtgaagagggctttggattttatttttcagaaaacagtcatttgacacaatccctttatttttacttgtcaacactgagactttggtttagtttggtagtataaataatataaaaggttgctcttggctcttgctcttattatattattggcaacctgaaaggtgagtcttaaggatgcctatgtatttttggcatacagaaatcagagctttttaagactagaaaggatttcaaaggttatctaaattaattgcttcatttcacatttgagaagaacaaggccagtaaaagttataggattgcttaatggcagagtatgaatggctaggcccagacaaaaactcacaaaactggatttctactccctaccgtttccatgatcacgtgccaatcctactttagatgataacttcagattaaatgcccacacacatacacgcacatgcacacacacacacctgttaatctgaatttgttctaattttcaaatcaatttattatttcctatggaatttataacgggaatttcaataatgctggtgctagttttgtcacgcccttctgtacaaactcaaaatgtatccattttttactttaatcttcaactggtggtaatgagttctatgcacatcatataaaaaatacatttgctgagttttgctgaaatgagcattttttttcttgtcatggggataaaatgaccttttgaatttttatcttttaggacaagcatttgggtaatacattagaaaaggaaaagcaaaggaaagggaattctggaactttttcattttggttaaattcttgtgctaatttcttagtgccttttgctatgcatgtgaactatgaccatatacgaaaatggtctgttttaggtcatgactgtgggcagagattaattggtgaaaaatgggcctgtttgtgggatttaccacacagtaaggtttctcatctgcctggaaaaatgtggaattagctctttgagaaatgcagtccggtcatgaggttgaagcgagagcttagggagggaaacacagttcactctctaaggcagttatgattggttagattccagagcagtccctttggtgtagtaaagttcttttcttctcgctttcaggtctgtgtttcctaatgttgctagtttcaccagtacttcacagatagcatcttattcggcttccttcaaggcctgctgatccaaactggggagtggtcttggagaggattcctagttctctccgctcccccatctagaaagtgctgttacagtgaaaaagccttcaatttgcaaagaccaattgcgacagcaaatctgtgctgtgtggaaggggatacaagttgtgaaccggcggatatgtatgacaagggtacaaaatggaaggcgagacgttagttcttcgcctgtgaagatggttcttgagcaacactcaagaacgtgcacgtggagtgctactagagtgcactccacgtgcacgttcctccctaagagccactgcaaggatcctgggcctgctgcgtggcccaagaatccacgttgcttctgaggctagatctagccacagcgattagggtttcttcgccatggccttggtggtggctggccctaaactggtcacagtctgaagacccaccctgaaagggactaaggttagagacagcgcccctcccctcccacccttagctcagcatccccactaagcacaccccttggggaccacaaacgccctctttcccgaagaccccagtagtgacctgtgggattctggctgggtgtccgtgacttaccctcaaagagaacctgcacgcctggggtcccaggatggctggcttgcccctcccgtccgaagatgacctcgtccttctctttcagtcccggtgggtcttcggactgccgccgccgcgctttcctcggcctgggcacgctgggtcggcgtggtcccggctcgcgtccctgttgggcggccggcgcgggtggcggcgggacaagtcgtgagcgctggcgcgcgccggccggggcagtcgcgggggaggagcgcccgcccgcgtcgcgcgcccaacggaccaggctggggccgtgaggtaactgttgcagccagcggaggtgggaggcgacactgagtctccagtcccgagaggtgcccgagggaaaaggaggcggcagctaaactggtcctggagagaagccccttccgcccctctcctcagccagcatgtcccggactccgccgctcctcagtccgcgcggtggggaccccgggccgtggcggccggcgcagccctgacgggttgcgaaccagggggcgccccgaacgcgggggttggggtctgggagcgcgagcggccgctacggtacgagcggggtgtgctgagtcccgtggccacccccggccccagccatgaggagggacgagcgagacgccaaagccatgcggtccctgcagccgccggatggggccggctcgccccccgagagtctgaggaacggctacgtgaagagctgcgtgagccccttgcggcaggaccctccgcgcggcttcttcttccacctctgccgcttctgcaacgtggagctgcggccgccgccggcctctccccagcagccgcggcgctgctcccccttctgccgggcgcgcctctcgctgggcgccctggctgyctttgtcctcgccctgctgctgggcgcggaacccgagagctgggctgccggggccgcctggctgcggacgctgctgagcgtgtgttcgcacagcttgagccccctcttcagcatcgcctgtgccttcttcttcctcacctgcttcctcacccggaccaagcggggacccggcccgggccggagctgcggctcctggtggctgctggcgctgcccgcctgctgttacctgggggacttcttggtgtggcagtggtggtcttggccttggggggatggcgacgcagggtccgcggccccgcacacgcccccggaggcggcagcgggcaggttgctgctggtgctgagctgcgtagggctgctgctgacgctcgcgcacccgctgcggctccggcactgcgttctggtgctgctcctggccagcttcgtctggtgggtctccttcaccagcctcgggtcgctgccctccgccctcaggccgctgctctccggcctggtggggggcgctggctgcctgctggccctggggttggatcacttctttcaaatcagggaagcgcctcttcatcctcgactgtccagtgccgccgaagaaaaagtgcctgtgatccgaccccggaggaggtccagctgcgtgtcgttaggagaaactgcagccagttactatggcagttgcaaaatattcaggagaccgtcgttgccttgtatttccagagaacaggtatgttagctggaaggcgaggtctgggacgcgagcgggttcgggtttaccgctgcagtttccgagttgaattcgcttatttcaaagcatgttaactttcagaatggawaaagggtgtgttgcgggggggggggggaggaaataatgttttattctggaaaggattcttaaaatacaggaagccttttaaaaatgcagaagcaagtagcttttgtcattgaatagaaatcaaatagcccgctaatcacatggcactttttaaggactgtatatgcaatagatgagttcgcagaagaatgaggtgaatcatttgtggttgaatagattgactactcccgcttttggcatcctctgatatgtgtctttttggtgccatttatctgtttgctgttataatgatgcctacccaaaaataacatacagcctttagaatgagaggatacatctatgagttttaatcagtgtggtttcgttattgaaaatcgagaggaaaaatctgagattttatcgttacaagacatgagctttgcaaatgagagtaatttagatgaaaagacagcagtataggtgaatataatattttacagattaattcaatgttctttgtatttgttgcataattaggagactgttttaacagtttaaactttaaacttggtaattcctggaaagatgccaaaagcatttccattttttcaccataggtttacatatttttgttttttttttaaaagggattgaaatcattagcaaatgagtttacatctttatatagtattggaaaagctacctgttgtacatcaccaagaaacttaataagtatagttactattattgagcatttatgaagtgcaaaacattttacacatactgtctcagatcctcacaagaacggtgtttggctggtgccattaacctctagagatgagaaatctaggcatatagaggtaacacagcttcacatgtctagttaagtggtagttctgggatttgattagatttttgagttttcagtgctgtgttctgcacgactaactggtaagtatagtggttttaagtaggagagtaagagcgtacaccctaggttttctgaatttttggattagtgatatgctttacactgggagccaatatgttggagacaaaagtttcttgtccttaatgcatttgatgcattcttctctcttcttttctgttctcttccttcacttcttgtctgtcttctcttcgaaataatctccaagctactacattggttttatgacgtgttgaacactgatctgtaatgttccaatgacacaatactttgcttcttgatttggcttcagaggccacttctgtggtcaaccacttgaaaaagttctgttatgccttttgttttctcagtttactaccagtgataatagatagtactttaggaaaatgtgtgtcgggagaaaaattgttttgagaggatttattatggaacaaagtggtatcaactattttcatagaatggaattaattgaattttgaccaaatgtgaacaaattgcattttttaacactggaaaattgttttagcagtttcatcacttttgtgggcaattttcctgaacttaacagttacagtttaacatattttaattgtaatttgttggtgcggtaattctgtctgtcctcttgtaagtggaaaatttctaggcttcttaatcctagtgtggtgctctttccatcacagcatagctatatatgtatatagctataccaggtagcttcaattattgtttatattagaggaaaatacaatttgtgcttctaaagagggtgtaatttcttagtgcagaaaaccyttattcacattctacttctaataggaacatttttgcacacttaaagtatatgtgaatagttcagggtttatacatgcctacytaatattctgtctacaaaataattctattttgacattactagaaaagggtatttttaacttagcagatactatcataacaagaatgtttatttatgcttgttccagaagtctaacagtggatttgtgctttttgtttgcatgtatattatgttaaatatattgagaggaaatcagtacttttatggaagtaaaagatcaggagattttctgattttcaaagtgttgtatatgacaatggtaaaaacacttgcttgtttcagaaggtgaaggaagatgaaaagattttagatgggacctgacataggagaaaatgtcctggattcatagacagaggattgaggagtcttggcttaactgtttaattttggaaaagtctgtgaacctttctgaatcttagtatcctgtcaaattaagggatcctagtagatgaattctgtaatatcttctaattctaaaattaaattatataataccttctaattctaaaattaaattcttttagtttacacttttggtaaggtagaaattaaaataaaataagatgtcacaaactagtagttcttgaagttttacttaaatgttgaatgttgaccttgctaacctatactttccaaggtataataattgaaaaagatgagcaaatatcctgtatattttggataggactttaaaaaagtatatgggggttcatttgtaggatggtaacaaaattattacatgttcatttccttaagaatttaaacatttttattaacctctttgaaagccacttaaacttctatcaatagaaatgtttttaattgtagaataatagatttaaagtagtttttaacttttgggatgttatattactgtgttgaaaaataatggcatgtttgtaaaacatttgattttataattagatttataatatttgatttaaatgctatatatgtatcagttcagttcttaactaaggtttttttttttttttggcaaagcwtttagagatttgaagcccaaatctaggtgctgttaatggtgttctgctttggtgggttaatggaaagaagcactgagtttgtagtcttatctgccaagaatcagcagaaactaataggaagtttaaaaaaatcagtcgtctgcatagaagctttaatcagaattaaacaagctacatttctatgccattttaattgcatattctacagtgcaattttcagcttttcaatgagatcactttgtgtttgactaggtaaatacaaggttttgaaaggcataagttagtgtgtgagatatttttctataactttagtgctaagtgctttctaaatggttaggtaaatatttaaaaattccgtggccctaatgcccataaatattacttaaagttttaattttatttgaaaaaggtatacatatgtagtgtgagagcctaaaaaagagagttttttttaaagtgtggttatttactcacctaaggaatttgcaaggcataattccctgttaatttctttaagaatactgtagtatttgtgaaatttattttatggcttcagtgagtgagtgttttattccaatttcatgttactattttgtggtaaaatatcagcctacataataattttatactttattttgtaaatatagtatgtactctgccatgagtattatttttcaaaaacacagatttgatagagtcactctgttttaaaaatctcttatggcttttcattgtccacaggatactgttcatgcccttgacccttgcttgcaaagtccttcataatctgcactctgccattttttgttttatttttttaaaaagcattttattactaatgggacactccctctccacatgcattctagctatttgagggctgcttcttgttattgacattgttgtgggtttttctcttttgattttaacatctccacttgttgaaatctcctttaaggaacaaataagattaggaagactttaggcagtgcactgatactcaaatttatgtataagctgagaacaaattatagcagaatgggccatatttaaaaataaaagttgacaaaccatatgaaacagtgctgatgagtatttccattatagtgcattagatagtcacatctccataatttgtttttatacacttagtagaaggtaaccataagtaaaagcataaagtttgtttttcattgtcatcagactctgtcctcctcagtggcaggcccttctctcattctttctcttttccctttcaattaccaagtcagcttatttccctagcacactcttctaagccttctgtaccccattcaaagcaaaaatttattcttgccgaaaaagcctatttcagtataaatgttggtatagatatataaaatataggacaggttcagagtttatctaatctaattgaaatctgctcattatatattgtacaaggaaaataaattgaactccagagagataaaaatactggctgagggttattctgtgagatatttggaaaacggggactagaacctaggtctttactcctagtccacttttactttccacaaggagcatatatacttcccatcatagccttccaaggctgtacttaattttgccaggtatctccaattatgtgaaaaaaggcagtgtctctggttaaaggaggtaggcaagaagtgagagasagtcagttaagagggactcttgaaaatcctatagtttgtaatgaccttgatgacaaacttctgatacagttatttcagagtaatttgtaaggatgcagctggtcgcaaactcatgtacctacataacatttattttatatgttgaagacagaggggagggtcaaaaggagagtaggaagaatggaagtgaactgactattgcctgcttcgcttaaaggcattcagtttaaacaaaagaaactgaaaaactgttagctaaacaacattttggaagaactgggttctgtctgtgggtggttcctgacagtttataacattgacttgttgttcatcttgttatttacaagctgatctgcacttatttaggttgttgttataagcctgttcttagaacttggggcagaagagtgtatctcccacttttttttttttcttttacaaccaacaactttccttctggcattgatttacctagcagataactttacagatttctcctcctccatctgctacagcacgttctttggccacctcttccttacatttcatacaacttgcattcagcaatgttttttttttttttttttgagacagggtctcactctgttgcccaggctagggtgcagtgatgtgcaatcttgcctcactgcaaactctgccttgcaggctcaagtaatcctcccacctcagcctcctgactaggtgggactgcagtgcgtgccatcatgcccagctaatttttgtatcttttttttgtagagaaggggtttcgytgtgttgcccaggcatgtctcaaactcctgggctctagccatctgcccaccttggccaaagatgtccacatttgagaatatgttaccttatgtggcaaaatggactttggagatgggtttaaggattttgagatgaagatattatccaggattatctgagtgggtgcagtgtaatcatgagggtccttaaaaagtagaagagagaggcagaagagattagagaagatttgacagtggaagcagggttggagtaatacagtgtgatacacatccacccttgggaggctgaggccggagaatggcttgaacccgggaggcggagcttgcagtgagccgagattactcaacccatctttgctagctttggtgatgaaagaaggggaccctgagccaaggaaagcaggcagcctctaagaagatgaaaaaggtaaggaagtagattttttccctagagctcccagaaagtattgaagccccaccagcaccttggtttagcttagtgagacctatatcagacttctgacttgcagacctacgagatacatttgtgttattttatgcctttgaatttgcgataatttgttacaggagcatactagtttgctagggctgccatgacaaagtagcacaaactaggtggcttgaacagcagaaatgaattgtctcaagttctggaggccagaagtccaagatcaagttatctccagggttggttccttttgaaggctgtgagggagaatctgttccatgtctttctcctagcttctggtggtttactggcaatctttggcttgcagatgcatcacgctgatctcattcttcatcttcgcatggcattctccctgtatgttcacatagtctttccctgtacctgtctttgtttccaaattttctaatcttctaaggatccaggtcatattggattggggtccaccctgattatccccgtagagaccttatttcctaataagattacattctgaggtactgaggattaggactcaacatatttttttggggcgatacaattcarcccatgtaggtagaaacagaaaactaaagctacgtaaaattgaattgtttttcaaaatggatgctgaatataaattgatacatttatatttttgctatcagtgagtaagaatgcccctggatccacattcttatcaaccagtgcttcctatttactgacttttaagtttggctagtctagtgggtatgaaatggcatttctttgtgattgtaatctgcatttttctaatttctagatttatatgtatgttgtgatgtagagattcaatctcattttttatccaaatggatatccagtcatgccaacacactatattgaaaagtttatttattctccattcatcagtgctgcctctgtcctatatcaaatttcaatatatgtatgactgtatctgggctctattatgtttgatttgttagtttatgcatcttgtgttaataccacactatcttagttataatagctttctaataagacttaatatcctgtattgatagtgtccattgatgtgcaaaagttttcaattttgatgaagtttatctactttttcttttgttgcctatgattttggtgtcatatcaaataaatcactgcaaattcaatgtaatgaagctctcattctgtgttttctttgaggagttttataaaagttttagttctaatatttaggtctttgattcattttgagttaatttttgtatacaaaattttgtataattacagtgtaaggtaatggtccaactttattcttttgcctgtggatgttacatttttctaagaccatttgttgaaaaaaactgttaataacctttcaacaaagtgttggcttctttgttgaaaattatttgacagtacatgtgaggatttattgctaggctctctgttctatgtcataggtctatacgtctgtgtttctgtcagtaccacactgttttgattattgtatcttttagtaagtttygaaatcatgaagtttgagacctcaaactttgttctttttcaagattattttggctatttgagtgtcctttgagattccaatatgaattttaggatgaatttttctgtttctgcaaaaaatgtcattggggtttattttttattgtggtaaaaaccataaaatttactctgttctttatttttaagtgtacagttcagtggtgttaagtatattcacattgttgtgaaacagatctccctatcttttccatcttgcagaactgacactctatactcattaaataacaactacccttccgctgtcccctgataatcaccgtttgactttatgtttcaatgaatttgaggactttagatacctcatataagtggaatcatacagtatttttttgtgacttgcttatttcacttagtataatcatctttgggattttgatagagattgccttgaatctgtagattgcttttagtagcactggcatcttaacaataataggttttctaatccatgaaaatgggatatcttttgatttatttgtatattaatttatttcagcaatatttcatagttttcagtgtatgagtctttcacctccatggttaagtttattcctgagcattttattcttttcaatgctgttgcagatagaactgttttcttaatttcctttttgaattatttatagtatataactctatgcaactgatttgtatgtgttgatttttatatactgcagctttgctgaatttgtttgttctaatggttttttttggtggaatcttcagggtcttaacttagtttttgatccctaaaattagtgctgcatatgtagactcagaaacctcacgtaaaaatttaaattggcctcaggttggcaatgttccaaggcaatggttagaagcaaattcagattctccaaggcctcaaataattcctacagataaaatcccaaggaaattcagcagtgcctagtcaaaaatccacaaatcaggcaaggtaataaggcactatgaataagaacctaagaaaaagtacacaacaaaaacacatccgccctcgggaggctgaggcaggagaatggcttgaacccgggaggcaaagcttgcagtgagccgacatcatgccactacactccagcctgggcgacagagcaagactccgtctcaaaaaaaaaccaaaaaaaccaacaaaaaaaccacacccaccaaagcttcggattatataagaaatataaaaacacgtttattatgatgaaagaaataaaatagaaacctgaaaaaaatgattgggggacaggtgattaaaaaaactgtcgctggccgagtgtggtggttcatgcttgtaatctcagcactttgggaggccgaggtgggtggatggcttgaatccagaagttcgagaccagcctgggcaacatggcaaaaccctgtctctacaagatacaaaatattagctaggcatggtggcgaatgcctatagtcgcagctacctgggaggctaatgtgggagcatcacctgagctggggaggtcgaggctgcagtgagctctgattgtaccactgcactgctgcctgagtgacagagtgagactctgtctcaagaaaaatcccccaaaaccccaaaacacacacacacaaagttatataggtcagaagagttggagaataagaagtaaagtataacttggacttaattgaagttcgaaaaggggataataaaatggagaggaagaaatattagaaaaaaatgtctgtaaaatagcattttaaagaactgatgaaaaatgccaagtttttgtccagaaagctcactgaatctcaagcagaataaattaaaagaaacccatacattattgcaaaattacagaaccttaaataaaaagataactactaaaagaactcagaaaagagaaatggccttcaaaagaatgaatggcagttttactgaaaggtgacttattagtagccacagtggaatccataaagcagtggaatatcatccgacaggtgctgagagaaaataagtgtcaaactagaaatcagtgccccgcaaaactatctccctaggaaaagtgcaagctaaaacaattttagaaaaggaaaaattgagggagtttttaccactgaaagtacatactcaggcagaagaaatgaatgagatcaagaaggtatactaatgataaatataggtaaaactaaacaaacactgttattataagacattattaacaatgtcttctaagagaacagactagaactaaagtgctagaaaacaatagcatttacattggaaagaagaaattagaagagtatgttaaaaagttatatttcaaggggagggctaagagtttgactttaaatcttgtttatatatacacagcagctgtctacacacacacacacacacacacacacacacacacacacacmgagctagtgcaactgctgaaagagtagatattgtgtgaatggcttccaaacaaatagaggtgacaaaagaattgagggaaaaaaggagaccaaataattaatatcagagaaaaaaggaggtcaaaaaaggaaacctagcgaacaggacaaatacttaaagcatgtaaaaagatgatagaaataaatctagatactaccacgaatcacaataaatatagaagcaaaaactttgttaaaagaatataaagattgtccacttggattttctgactgtatactctttgcaaacataagaatttatcaaggttggaaataaaagaatggaaaaaggacacaagacactataataaaactggtaatattaatatcagaaaaactgggaaaacactttgctagagaaaaagatgatcattatgtaattataaaagactgaattcaccaagaagataaaatttaaaattgtagatacctaataacataaatgtctatgtctatatatatacatacacatatatacacacacatataattatttccaaattcacctacagtagaaagcattccttttgtatattttatttatacctttaattcattcctatcacattaatatactcttcttatactgtcttaattacctttcagttattagcccccttttttgagcatctcagtgtgctaggtgctgtgggggaaatataaagatcaataagatatggttctatccctaaggagtttatatctagtagactcagatgtgcagactagctcaccatgagacacaattgtgtaactgctgtgttccagtcgagcacctcattgtggaaggcaaatagtgatcagtttttcgggggagtgtattggaagtctttatagaggaggcatttgaaggacatattatataagacttgattaagtagagacaggcgttgagactggtaaaccatgtgatggtaaaattcatgacattgttgtggaaatcagaatggaaagctagtaaagtgaggagtgtagagttagtgtgggaatgttactggaaaagactggaagattggttgagagtaatgtatggaagatattgaatgccatcctaaactttttgatttattcagtggaagatgttggaagattttcagaagagaagagacattttctttatttagtttagagagattattgacaatgggaaaagtagatcagagaatgaaaatattgggagcagggagcccgttataatcatttatatgagagactgagaacagtgggagtggaaaagccctggtgattggaaaaaaggaggtatgaagatgcttaaagtcttagtgactgaaagtttactggtgtcattagctaatgtagggaacattggaagatgagctggtttgggagaaatgctaaagagsttgactattgattaatgcatgttccagttttcacatgtgaatggttgatacctcttttacatctctaaatgggatgtaaactccctgagtgtaagaactaagcatttctgttttgtatttatcatttacattttggagttcrcaatggatatctgttattatatttatacttattgtcatttcttataatgtttccatgttaacctttagtgaagaaaagaactgtgggtggagatggatcccaatttcctactgtctttggtattttccttaatagacagttattgcacagtggtgaagctagactgcttgagtttaaatgtcatctctaccacttacagaatgttggacaagttgtttaacttctctgtaccccagtttctctgtgtataaattaggggtaatcacagtacctatcttattgatgtgaaatagatgtgatatgaaatgttgtgaggattaataacctgtaagttcttggaacagtgtctggcacctggcaagttttcaacagattagttgttatggctgttactattaatagttgaaattctcatccttgaattatttaatagtttatgccaagtttctctaaatcaatggtaaaacgaattgaaatttagatctatgagacaatccgtttttattgtctcgatacttctcttgggactggtattaagcaaaaaagcaaatcctttccataagggattatataggggaaattctttcaacagtggtcagtatttaggacaacaaagaaaagatacaaggagtaatttaaaaagtgattaaaaggggggtaatttggatttattttcttttaaagtttcagagttaaagattaagaacctttggtcttccagaagaaaaatgtgtcagctgctacagtcataatttactgtcccataagctttttgttccagtttgtcactttggagttgggagtacactgggaagtcaaacaaatgtctttacccataattcttccttcacagttcactgtctgttaagcatgttgataactatgcagcacctccccaggaatggtaagagggagataagagatacggaaacagaaagaagagaaactgtatgtaaaaaagtgactcttycaaccctctttttcactccagtcagtattagtcactttactttactgcttcaatgtaacactttgttccacttttcagaaaaagtctcctgaagagcttctaccagttagatagtaatcgttmaaagcagacaaaaataaatatggataggaatttttaccaatatatgggaaaatatttttctttacgggaaaatacttacatacacattactaaataccagtgtttatcattatgtaagtcattttttgtttgtttttgttgtaaaaatatgcaccatctacaaataactttaatacctgaaaactcatttcttcagcagcattactgggcattctgctaggagctataarggctatgaaaaagaatcacataatgtcattattcttaggagtttaatgtaagataaaaagtgaagattatattttaaataataaaacaggcagtgcaattaatattgtagtgtttgagaggtctcaaaaaataacacccaaattccctgcccaaattttgagaagagagtgacagatgagatatcagaatactacctgtattcctgataaagctgttattcgaaggcatggcttgtatcagtagatagttttgctttctaataccaaaccccagagttaaacagacttccctggtcattagcagaataggaccaggaacattttccctgtttgcctggagagcctatccatggagaagcattggagaacttctgcttccatctagtgggtaggcttccaagagcaaaaaaaggggtagaattatgcttacatgattctttagtctaaacttaccagtcaggtaagtcactatcctccttctaggggataaataagtgaaagggtagagagagtccaaaaatatttagcaacagttcttcctcatagaagccataggattgagaaaaaggcattgcctctctcaacacgataatagaaaaagctatttgaaattctgacatcttttagacaacatatattttaatttttgcttgtcgcctttcttttttttttgagatggagtcctgctcttgtcgcccaggctgaagtgcaatggcactatctcggctcactgcaacctccgtctcctgggttcaaggattctcctgcctcaccctcccaagtagctgggattacaggcatgcgccaacactcccagctaatttttgtatttttagtagagacgggggttttgccatgttggccaggctggtcttgaactcttgacctcgtgatccgcccgcctcggcctcccaaagtgctgagattacaggcatgagccaccgcgccagatgtcacctttcttgtaactatagtgtctatatagttgcatggaatgtacataatttaaaaactgagcctagattctgcctttgttcatttgtttctttcttgacaaaatcaagtcacttatttctgtgcatttattgttgcacttaatattctctatcatatttgggttgataggcctttcctgtctctacattttatgtcctttaaattcagggacagtatcttatttatttatgtgaccctggtgcttggcatatatcaaatagtttattgagttggattattggattaaatactgtttttttaaatcacttcgcaggacatttttttcctagttgatacataatactcataatttcatcactgaaagtaacttgaagaacaggatgcctaaggaataagttcttgatgtcacaaaacccagcaaaaatcttcttcagcaggggaagcttacttaggtgaatgcctcagtttataggtgaagcttggaagaatgttgcaagttgggagaatggaaactaatgcaggacattgtgtgcaggagttgcctctaaaataaaggaggagcatggaatgataatttgaggtgaggtcatagtgaggcagtagggttataaacagttttgacattactttttcagatatggcttgcagagttaaaaattcctagatgtttcaatggttctcagttaacaagtgttgatagaacattttcagtgcttagactgcacttttgatttctagggagaacttcatttttaacataaatttactaattttagtagttcaccaaggaagaagatggtagtaaaatactggtcataattatttagcaaactctggaaatgtgattttttaaaaaaacttttctttaagttcaggggtacatgtgcaggtttgtaaaggtaaacttgtgtcatgggagtttgttgtacagattatttcaccacccaggtattaagcctagtacccattagttatttttcctcatcctgtccctcctcccactccggtaggccccagtgtgtgctgttcctccctacgtggtcatgtgttctcatcaagtacatttttgtcaggtaactgaagtttatctttttacaagtaatatctttttaattcaaacacatttttgctgtgactatttctattatgtttacccctatttctgcttaccctgaatagatcttgatgaaaataatatatttctctgaaaagtaaggattgtcattttaaaaattagtaaacatgtatttgacaaaattattagcaggcacagcagaagcagttcatacaatctgtttggtaaactgagtgatctcccagttctgtgttcccccaaatagttcacccacacattccataaaaggttctctttaggcagatgcaacaataccctgaaggcataattgttagctttatagtcagcattaggcaattaaaatcctccgaaattaattccagacttggctgtaaccctaagagccattctggaagacagaggatgtagagtttacgagatcttatgccctgtttataagggaggggaatatccccaaaatatttaggagagttcacacatactgaatgccactaatttcaacgacaagagcttatttctaatattccttatattattgcttctaatattctttttttttttttttgaggtggggtctcgccctgttgcccaggctggagtgcaatggcatgatctcggctcactgcaacctctgcctcccaggctcaagcgatcctcccacttcagcctctggagtagctggggctacaggcacgtgccaccattcctggctattttttttttgtattttgtagagatgaggttttgctgtgttgcccacgctggtcttgaactcctgagctctagtcatctgcccaccttggcctcccagagtgctgggattgcaggcatgagccactattcctggccccttctaatattctaatactagaatattccttatattattctttctaatatttcttatatttctaatatgccttacattagtctttagggctaataggaatagcttctgaagtgcttataatagctgcttcgggagtgtggcctttctgattaaatgctagctgatcacccttagaatataaattcttgttaaataacatatttacatttaaatagcaagaaaggagaatgtaagcatcctgaagataagaatttttgcctgttttgacacttctcaaaagaagacatttatgcagccaaaaaacacatgaaaaaatgctcatcatcactggccatcagagaaatgcaaatcaaaaccacaatgagataccatctcacaccagttagaatggcagtcattaaaaagtcaggaaacaacaggtgctggagaggatgtggagaaataggaacacttttacactgttggtgggactataagtagttcaaccattgtagaagacagtgtgacgattcctcagggatctagaactagaaataccatttgacccagccatcccattactgggtatgtacccaaaggattataaatcatgctgctataaagacacatgcacacatatgtttattgtggcagtattcacaatagcaaagacttggaaccaagccaaatgtccaacaatgatagactggattaagaaaatgtggcggttaagaggaggatagtcgagatggccgaataggaacagctccggtctacagcttccagcgtgagcgacgcaaaagacggttgatttctgcatttccatctgaggtactgggttcatctcactagggagtgccagacagtgggcrtaggacagtgggtgcagcgcaccgtgcacgagccgaagcagggcgaggcattgcctcactcgggaagcgcaaggggtcagggagttccctttcctagtcaaagaaaggggtgacagacggcacctggaaaatcgggtcactcccaccctaatactgcgcttttccgacgggcttaaaaaacggcgcaccacaagattatatcccgcacctggctcggagggtcctagcccacggagtctcactgattgctagcacagcagtctgagatcaaactgcaaggcggcagttaggctggggaaggggcgcctgccatttccgaggcttgcttaggtaaacaaagcagcaggtaagctcgaactgggtggaacccaccacggttcaaggaggcctgcctgcttctgtaggctccacctctgggggcagggcacagacaaacaaaaagacgcagtaacctctgcagacttaaatgtccctgtctgacagctttgaagagagcagtggttctcccagcacgcagctggagatctgagaacgggcagactgcctcctcaagtgggtccctgacccctgacccccgagcagcctaactgggaggcacccccaagtaggggcagactgayacttcacacggccgggtactcctctgagacaaaacttccagaggaacgatcagacagcaacattcacggttcacaaaaatccgctgttctgcagccaccgctgctgttacccaggcaaacagggtctggagtgcacctctagcaaactccaacagacctgcagctgagggtcctgtctgttagaaggaaaactaacaaacagaaaggacatccacaccaaaaacccatctgtacatcaccatcatcaaagaccagaagtagataaaaccacaaagatggggaaaaaacagagcagaaaaactggaaactctaaaaagcagaacgcctctcctcctccaaaggaactcagctcctcactagcaatggaacaaagctggacggagaatgactttgacgagttgagagaagaaggcttcagacaatgaaactactctgagctacaggaagaaattcaaaccaaaggcaaagaagttgaaaactttgaaaaaaatttagacgaatgtataactagaataaccaatacagagaagtgcttaaaggagctgatggagctgaaagccaaggctcgagaactacgtgaagaatgcagaagccttaggagctgatgcgatcaactggaagaaagggtatcagtgatggaagatgaaatgaatgaactgaagcgagaagggaagtttagagaaaagagaataacaagaaacgaacaaagcctccaagaaatatgggactatgtgaaaagaccaaatctgcgtctgattggtgtacctgaaagtgacggggagaatggaaccaagttggaaaacactctgcaggatattatctaggagaacttccccaatctagcaaggtaggccaacattcagattcaggaaatacagagaacgccacaaagatactcctcgagaagagcaactccaagacacataattgtcagattcaccaaagttgaaatgaaggaaaaaatgttaagggcagccagagagaaaggtcgggttacccacaaagggaagcccatcagactaacagcggatctctcagcagaaactctacaagccagaagagagtgggggccaatattcaacattcttaaagaaaagaattttcaacccagaatttcatatccatccaaactaagcttcataagtgaaggagaaataaaatactttacagacaagcaaatgctgagagattttgtcaccaccaggcctgccctaaaagagctcctgaaggaagcactaaacatggaaaggaacaaccggtaccagcccctgcaaaatcatgccaaattgtaaagaccatcaaggctaggaagaaactgcatcaactaatgagcaaaataaccagctaacatcataatgacaggatcaaattcacacataacaatattaactttaaatgtaaatgggctaaatgctccaattaaaagacactcctcacttcaaaaaacctgtctcacgtgcagagacacacataggctcaaaataaaaggaaggaggaagatctaccaagccaatggaaaacaaaaaaaggcaggggttgcaatcctagtctctgataaaacagactttaaaccaacaaagatcaaaagagacaaagaaggccattacataagggtaaagggatcaattcaacaagaagagctaactatcctaaatatatatgcacccaatacaggagcacccagattcagaaagcaagtcctgagtaacctacaaagagacttagactcccacacaataataatgggagactttaacaccccactgtcaacattagatcaacaagacagaaagttaacaaggatacccaggaattgaactcatctctgcaccaagcggacctaatagacatctacagaactctccaccccaaatcaacagaatatacatttttttcagcaccacaccacacctattccaaaattgaccacatagttggaagtaaagctctcctcagcaaatgtaaacaagcagaaattataacaagctgtctctcagaccacagtgcaatcaaactagagctcaggattaagaatctcactcaaaaccgctcaactatatggaaactgaacaacctgctcctgaacgactactgggtaaataatgaaatgaaggcagaaataaagatgttctttgaaaccaacgagaacaaagacacaacatatcagaatctctgggacacattcaaagcagtgtgtagagggaaatttatagcagtaaatgcccacaagagaaagtaggaaagatccaaaattgacaccctaatatcacaattaaaagaactagaaaagcaagagcaaacacattcaaaagctagcagaaggcaagaaataactaaaatcagagcagaactgaaggaaatagagtcacaaaaaacacttcaaaaaatcaatgaatccaggagctggttttttgaaaggatcaagaaaattgatagaccgctaacaagactaataaagaagaaaagagagaagaatcaaatagacacaataaaaaatgataaaggggatatcaccaccaatcccacagaaatacaaactaccgtcagaggatactacaaacagctctaagcaaataaactagaaaatctagaagaaagggataaattcctcgacacatacaccctcccaagactaaaccaggaagaagttgactctctgaatagaccaataacaggctctgaaattgtggcaataatcaatagcttaccaaccaaaaagagtccaggaccagatggattcacagccgaattataccagaggtacaaggaggagctggtaccattcctcctgaaactattccaatcaatagaaaaagagggaatcctccctaactcattttatgagaccagcatcatcctgataccaaagccgggcagagacacaacaaaaaaagagaattttagaccaatatccttgatgaacattgatgcaaaaatcctcaataaaatactggcaatccgaatccagcagcacatcaaaaagcttatccaacatgatcaagtgggcttcatccctgggatgcaaggctggttcaatatccgcaaatcaataaatgtaatccagcatataaacagaaccaaagacaaaaaccacatgattatctcaatagatgcagaaaagtcctttgacaaaattcaacaacccttcatgctaaaagctctcaataaattaagtattgatgggacatatctcaaaataataagagctatctatgacagacccacagccaatatcatactgaatgggcaaaaactggaagcattccctttgaaaactggcacaagacagggatgctgtctctcaccactcctattccacatactgttggaagttctagccagggcaattaggcaggagaaggaaataaagggtattcaattaggaaaagaggaagtcaaattgtccctgtttgcagatgacatgattgtatacctagaaaaccccattgtctcagcccaaaatctccttaagctgataagcaacttcagcaaagtctcaggatacaaagtcaatgtacaaaaatcacaagcattcttatacaccaataacagacaaacagagagccaaatcatgagtgaactcccattcacaattgcttcattcacaatttgattcctggaataaaatacctaggaatccaacttacaaaggacatgaaggatctcttcaaggagaactacaaaccactgctcaatgaaataaaagaggatacaaataaatggaagaacattccatgctcatgggtaggaagaatcaatatcgtgaaaatggccatactgcccaaggtaatttatagattcaatgccatccccatcaagctaccaatgactttcttcacagaattggaaaaagctactttaaagttcatatggaatgaaaaaagagcccgcatcgccaagtcaatccaacaccaaaagaacaaagctggaggcatcacactacctgacttcaaactatactacaaggctacactaaccaaaacagcatggtactggtaccaaaacagagatatagatcaatggaacagaacagagccctcagaaataacgccgcatatctacaactatctgatctttgacaaacctgagaaaaacaagcaatggggaaaggattccctatttaataaatggtgctgggaaaactggctagccatatgtagaaagctgaaactggatcccttccttacaccttatacaaaaattaattcaagatggattaaagacttaaacgttagacctaaaaccataaaaaccctagaagaaaacctaggcattaccgttcaggacataggcatgggcaaggacttcatgtctaaaacaccaaaagcaatggcaacaraagccaaaattgacaaatgggatctaattaaactcaagagcttctgcacagcaaaagaaactaccatcagagtgaacaggcaacctacaaaatgggagaaaattttcgcaacctactcatctgacaaagggctaatatccagaatctacaatgaactcaaacaaatttacaagaaaaaaacacacaaccccatcaacaagtgggcgaaggacatgaacagacacttctcaaaagaagacatttatgcagccaaaaaacacatgaaaaaatgctcatcatcactggccatcagagaaatgcaaatcaaaaccacaatgagataccatctcacaccagttagaatgacaatcattaaaaagtcaggaaaccacaggtgctggagaggatgtggagaaataggaacacttttacactgttggtgggactgtaaactagttcgaccattgtggaagacagtgtggcaattcctcagggatctagaactagaaataccatttgacccagccatcccattactgggtatatacccaaaggactataaatcatgctgctataaagacacatgcacacgtatgtttattgcggcattattcacaatagcaaagacttggaaccaacccaaatgtccaacaatgatagactggatgaagaaaatatggcacatatacaccatggaatactatgcagccgtaaaaaatgaggagttcatgtcctttgtagggacatggatgaaattggaaatcatcattcccagtaaactatcgcaaggacaaaaaaccaaacaccgcatattctcactcataggtgggaattgaacaatgagaacacatggacacaggaaggggaacatcacactctggggactgttgtggggtggggggagtggggagggatagcattaggagatacacctaatgctaaatgacgagttaatgagtgcagcacaccagcatggcacatgtatacacatgtaactaacctgcacattgtgcacatgtaccctaaaacttaaagtataataataataataaaattaaattaaattaaaaaaaagaaaatgtggcacacatacaccatggaatactatgcagccataaaaaaggatgagttcatggccttcgtagggacatggatgaagctggaaaccatcattctcagcaaactgtcgcaaggacaaaaaaccaaacactgcatgttctcactgataggtgggaattgaacaatgagaacacatggacacaggaaggggaacatgacacaacggggactgttgtggggttgggggagggtggagggatagcattaggagatatacctaatgctaaatgacaagttaatgggtgcagcacagcaacatggcacatatatacatatgtaacaaacttgcacgttgtgcacatgtaccctaaaacttaaagtataataataataataataataawaaaagaatttttgtctgttttgttcactgccatgtccaaaataatgcctggtaagagctcaaatagctattgaatgggtaaatatcacactgactttgctgaagtatttaaataattttcagacattataaaaagaaatacattttggccaaaagcttaattaatgcaagagtaaaaaaaaaaaaggtttgaagcatacaatcctatttcagggggctcaagagtttaaaaggaagaaagggggagacatccaggtaagaggacacgtatgctgtctttccaatattggacattatctactttttctgagacagtatcgacgctttgagcatgacacatctttttgtaacagagtcctacttaagctcaatatttaattggtacttagagccaagaaatacatgtgggcctacatttttttgcatgtattttgtgttatagcctctatacaatctaaggacacttggttctttctctcaaaatcctttcctcacttttgagtaatttacttttgaatttataaatacctcaccttattattcatcatattatttgcattatgttaaaccctggtcaacccttaaaatgttaaaggaaagacattactatattttttaatgaatacactaaacttttaagtacaaatatatttgtcatcagcctctgcaaagccatcagatgtttgaaaaaaaattttaagcatgaagcaaagagtctagttttaagaacttagctgtgaatggatgatatcctacccatttaatagagttctccaaatgaacagaargtatacaatgaaaggaaggtcccttagacatttgaagtttttctgcagcacaatcctgtctgtctgctttattcaagaatttgtagtcattttcagaattcattccagaaaccagcttattcgtttagatatcagcacactggtcttggcaaaagataacacaaaagtaaacactactatgtcaaaaaggatgaaaagccagcgatccaaccagtagaattgttttggaagcctgtttgtctcggactgagatcacacattaagccttggctgttgccttccattcttgcacaagcctccctgctcctggggaccctctrtaagagtgagcgtcctaatgaaaatagatggcacactcaaatggctaaagtagggagagtttatgaaggaatgatttataaaagagtgggaagtgttaagagaacatggtatgagtatctgatgagcaacagcagatagccgttatcacctttagacatacaagggcagaatagggagctgttaagactcagagagtagctgtatagagattcatttgaaagaagccgtggctctggtagtagaggagcatcactaaccagaggtgattttacatgagagcaggggtggaggtgggtgggagagtgggggagaataactaccccaggctcacttcctgtctttctgtcttctgctcttgtattccattggttgactccaccccaaagacagagggcaaggggggctttggatataaacaagagtctcctggggcactgaacagggtggagaagaatgaagaatggatctggaggggcaaatgaaatattcgtaacactacctttttttaaattatacttttaagttctagggtacaagtgcacaacgtgcaggtttgttacatatgtatacatgtgccatgttggtgtgctgcacgcattaactcgtcatttacattaagtattcctcatgctatccctcccccctcccctcaccccacgacaggccccattgtgtgatgttccccaccctgtgtccaagtgttctcactatccaattcccacctatgagtgagaatatgcggtgtttggttttctgtccttgcgatagcactaccatttttttaaggacacagtatctgcagtatcggaggaaggtccttttaggaagaatcatgtaaacaaagggtagaggagtattgaaataaagagtatgttgagaaaatggaaaatatttcagatagtttggagtgtgtgcttaagaagaataggcataaaaatgaaagcataggttagtatttgtagacaaatgttaatctttatattgcatatcctcttatttattactaagtcttgtattataaatgtttttataaatacctgagaatcaatagtgccttcatcattaggtgggagatagttggtcgagttttgtgccttagcatagttatctgggtgatttacacatagcggcttagtgcaaayagtacaaagatcagaagtcatttagagagtggggctttcagttaagaatataggctctggatttgcaccatctgtgtttaatttctgactccagcactttccagcttgatgaccttaggcaagttatctaataccggctcagttttctcattttcaaaataggtacagtcataatagttttattttagagtagttgtgaggattgagtaattcacatatttagcccagagcctagcagatactgttaataaatgttacctattttttgttttttagtttaggagggtattataggtatctttgaatatttgaaaggctgccccatgaaatagggattaaacttgtcttcatgagaacctccagtatcagaatcaggagtaatgtgtataagtaacaggcaaacagatttgggattaatacgagaaaatcttttaatagttatagagttgcttgaattagaataggttagctcatgagataatgatttacataccaagggaagttttcaggaaaacatcaaggggatgttttaaagtattaatgtctcaaaatgagaaaattagataaaagctttaggatatcttccaaccataatagtctattactttatcctaaaaaatttgtgaaaatcaaattttacgtaagaggaaatgtgtttgatttccttttccacatctctgtctgttcctgttgacaatttctgttcctaactaccttccaacaatccagcttacatgtcatctatctttgtttaatgatacgtataatttttttttttttcaagagacagagtctcaccatgttccccagactgggcgcaaactcctgggtaggtaatactcttgcatcagtctcctgagcagttggtactacaagtgcacaccaccatgcccagcatatttaacaatatttattgagcacatacaaatgtgccaggtattgcgctggatactgtgattagtacagtgaacaagacacatcagtctcctgccctaatggagctttaagaaattttagcagagggaaatagaaagtaaaaacacagtgaaataaatttcaggtagttttaagtactgtgatgcatgaagaaaataaaacagaataatagtataaagggatactagggctttggatggtggaggtgaagatggtgctttaggtatggtaggaagggaaagcctctctgaagaggtgacattttaaccagcatataaatgttgagaaggagctggttgtgctgagggaagcacactctaggcagaagaaccagcaaaggccctgtggtgggaaagatcttgacatgcttgttagaaagcaaactgggtggctagagagtggtgggagtggtaagaacagtgtggatcacataaggccttatacaccttgttaacatttacatttcactccaattgcattctaatggcaagtcatgagacaattttatggtataatttatgtttaaaaaagattattcttgcttgtttatgggctattgacggaatagctagagtggaagcaggaagataggaggctgttggagttatccaagtgagacataatagtgacttggactatctcagatgactttctcccccatttatccctggatagaatgtcctttaaaaaatattttataggccaggcatggtggctcatccctgtaatcctagctctttgggaggccgagatgggaggattgcatgaggccaggagtttgagaccagtttgggcaacatagcaagactctgtttttacaaataattaaaaaattagccaggcatggtagtgtgtgcctgtgttcctagctacttagggggctgaggtgggaggctaggaatttgaggctgcagtgagctgtgattgtggtactgtactccagcctgggtgacagagtgagaccttgtcttgaaaaaaaaaaaatatatatatatatatacatatatatatgtatatatatattttatagtgtttaccagatactagtgttaaagtatctttatattatattttaattaggtatacaattggctttctcattagattctgagtttcttaagcacaaggacaatgtcttatcccttttcttattattttaggtagcattatagcactgttattaattttgcacttaatgcattgctattaagtgaattcatgaaacttctatctgaacacagggctttttatagctattacaaatggcacagttaaatacgtaagtgcaataaggtaagctagatttgagatggaattaaaaaaatactttcccatactttacasacagaatgtagtttgtatacagtttaggaaaacctactaagaagggaaaatcacaatgttttattaggggtgaaacacaaatcagaaaggcttagggaaataaaaccaagaactagttttgttggtctatttgttatgataaaggctaaactaatgttaacaagagacaaatatagtggctcaagtaagaaagaagtttatttatcatataacaacaggtcacacattcaggctgctgggtctttcacgggctccttcctttatgttgctctgccacctcttagggtcttgtcttaatctgcacggtcaagctaggacattgtcacacttatcttccagtcagtggggaaggggaaagagagagtccacagagtccagataaataattttattttaaacaagtgaggtgaaagttgcatgtatcatcttgctcatattccactggtacttagtcatatggtcttactcagctactagagagatggagaaatgtagtttttagctggggagtcatagcaaaaactttacttttttttttttttgaaatttaaagaaaaaatctattgaagatctgaaaaacaattcctaaaagatagacttttccagaaaacactagctacacaatgtattgtgtctatcatgttaaaacatgcattagacacaaatacaaaaaccatgaaacaagccaccattcttcaacaatttgagcaaagataaaatgcctaagtaacaacatggatgacttgcaaaggatgggctctttactttaagcaccataaaaaaaaaaagcacaaatggatgagtgtgttcagttatatacactgaattgaacctttggcactaggaatcagagtattttgtcatatagcattaacatgtattataaaagtgcgtagtgtcaaaggaatagaaccaccaacattcaaaagcagctttgtcaactaggcagtaaaacactctacagcatatcctctgttgtccatcattgaatacactggtagtgactttgaaattaaaaaaaaaaagaaaaaggatctattaccccttttattttctttgtttaaaacaaaacagaaaaaaacatcagttgttacacactaacatcttcaragcacatcgtttgtacaagagatagactaagaacaaaaatgtgtttacagagatccaaacataagtgagtgagagcgcctctcacatggctctcaggacggttctcaggaggagccacttcataatctctggcactaaacaaagttgtagaattctttgccaggtacttcaggaaatcatgaagataattcagtaattaagcaaggctcttctcatccagaggtgtataggccaacattgctccaattcgtacaagtaatctcaggagatgtggcactccatacacctgggacatgggtgccttggggtgatctgcaagaatttcggcatactgtggtctctcaaatttgtagagtagttgggtgcccaacattacgttgaagtattcttttatccctgccacaacttcattaaccgcatactccttattatctgtgtttccaccagatttcttgtaatttgcgtaatcctcaagaatggaatccacatttcttcttggcaggaagttaaaagagctgttttcgtctggtaattaagtcccagtcatcaacaagccacagttttagctcttcaggaagctttactttaacttcaactctgttcatgaatgtttcctcattttcaacagtaggatctacccgggtccttttcttccgaggaggccaaggagtctcactggtactgccaccatctccatttccaggggttttctgtttgttcttttttgttttcacttcaacatttttctgttggagaccagatgtcttctttcctggggcagcccctatcgtcttcccctctgcatactgctcctgattggctttttgaagttcttattctttctgcaaattagtgtccttgtatttgagtactctgctctctggaacccactcatcccaatttttattccaaccactgtaatgtataaagtatttcacttgtttgtccttaatggcaacctttacacactttgtttcatgaagaagaggcccatgaaagcacagcactcactcaacctcctggaatttaggctttgggtcctgttttgaagccatttataagtgatttgctgtctcctccttctcctaccacccccaactaaaactttactaactttgattttcagctaacaatcttctaaagttgctgttatttgaactacttaaagtgaatatgagggtaacaactaattaatttctgcttcttaccctcataggaaaaatattgaacttctatgtagcacttacacttagggagagacatcttgatcctgattgcractgggatggaaaactgattttattactattctaagaaaagtttttatttgtatttttattaaaaatgaagttatgttcaaatgaaagagagtatgtatgagtcttgaaaattgttactttaggtaaggcaggactactaatttttttattatttttataaagaaacaactcttgctcaccaaagggcttgtagaaatggtgggctggttgccctcatggcaggtataaaggatacggatgtataatatttctattaaggcagtttgggataagggattacttattgcttttaatgtatatcttccttgttatcacatattaggttgatataattcttcatcaggtagaactgaagttctcagagttggagttgaggatgaaaagctgctttagaaccttttaggccttaagtcagtgtttctgttttcaggactgtctcctaaagagaggtaacttttttttctgttggatggtaaattatcacctatttctctatttcttaagagcagacataatctttggggtcgttcctttataatcttgattcagtattttttctttcttatcaatattgttattcattttattttttgcttatttaaaaaaaattcagataatttacatataataaaatgcatgggcctaaatgttgagttgaagttttgatggttatatacacttatgtaatcatgaaccaaaacaagatacagaatctttccttgaacttctttccggtctgttccatccagctcctcagagacagccacttactgatttctattgccatgtatttgttttaactgttttttaacctctttaaataaaattatacagtatgcattcttttgtgttgagcatctttcacttcatatactgtcctgtaatgcattcatattgttttgtatatcagtcgtgaatatattcaatgaatatgttccctgaatgaatatattttatgaatacatcacaatttatttattattctgtcacaatttgtttatacattcttatgttgatgaatatttaggtttccagtttttgccttatgaattaggctgctctgagcattcttgtgcaagtcttttttgtggagacatgtattcatttctgttgggtaaatacctaagagtgaaattaagtcagagtagatgtgtatttaacattaaaagaaactgacatacactttttcaaagtggttgtaccatttacactcctaccagcaatatatgagagttccagttgccctacatcctcactaacatttgatgttgccattcttttattttagccatatagtacctgtgatgttgaatgcctttttatgttcttattgaccatttatgtatcttcttttgtgaaatgttcaagtcttttgctaattttaaaattggattgttcattttcaaaaaattactggtttgtagttgttttagacagtcatgcgttgcttaacagtgaggatatgttctgagaaatgtgttaggtgatttcgtcattgtgcaaacatcacagagtacttacacaaacctagatgttacagcctactccacacctaggctatatgttatagcctattgcttctaagatacaaacctgtacagcatgttactgtactgaatgctgtaggcagttgtaacacaatgctaagtatttgtatatctaagcatatttaaacatagaaaaagtacggtaaaaatatgtacacctgtatagggcacttaccatgaatggagcttgcaggactggaaattgcatttggtaagtcagtgagtgagaggtgagtgaatggaaggtctaggacattactgtacactattatggactttataaacactgaacacttaggctttttagttttccaattactttataaaaaagtaaccgcgtcacaatgtcatgacagctgcaactgaaagttcattatgtggcatgtcactatattatggatgtgagtcctttgccatatgtatgtgttatgaatattttctctcaatctgttgcttacctcttcattttccaaatgtctttggataagcagacattttaattttgtttaagtctaatgcactaatttttttcctttacatttagtgctttttttataccttaagaaatttttgcttaagcatctytaaggtactctgttttcttctagaagttttatggtgtatgatctaacttgaagtaattttttgggtatgaggtaaggtagggggtcaaagtttgctttttccatgtagataaccagttgttccagcactgttttgttgaaaagacttgacacccttgtctaaaataaattggtagtatatttgttggcttacatataggaagctagccttagtttttaattttttttctgatttaaattctaaaaaaaatgaaaaccagggatagaacctataatgggtaagatggcacttatcttgttgtattttagagttttctggtggtgtcattttcagaatacattttgtgttcctcagaataaaggaaatgaagcttatttcttttattctcaagccaaatcactctctgaggattgaggaagtaatccagggtttgatatggggctcatggcataaggttaggtagcctgttatctttaactttctagattacttcataaaaataacttgcgtatatgtaatgatatctttctatgttttagatgttgttcaaagcactgaattgtaaacatattctcaatatttccctcgaatcttaagtatttaccttttattttttttaatttaaaataaaaaattaacagagtaaaatagatgttttttggtgtatggttctatgaattttaccatgagtatagattttgtatatccactacaacattcaggacatagagttgtcccattacttccagaagttcccttgtgctttctatccctttgtagttatatcttccttctatccctaatccctggtaactactagtctcttttccttcactgtagttttatcttcttgatgtcataagtgaaatcacacagcatgtaaccttttgagactggctacttttatttagcataatgcctttgagattcatccgagttgttgcatgaaccagtttatattttattgttaagtagtagtccattgattggatgtacctgtttatccattcattcatcctttttatttggggggacagagttttggtctgttgcccaggcttgagtgagtgcggtgacacgatctcggctcactgcaacctccgcctcccaggttcaagtgattctcatgccacagcctccggagtagctgggattacaggcatgcaccaccacgcctggctgatttttgtatttttagtagagatggggctttgccatgttggctaggctggttttgaactggcctcaagttattcacttgtcttagcctcccggactgctgggattataggcatgagccactgcacctggcctatccattcattctttgaagaatatttaggttttttttttctagttgtgttgattaggaatagaactgctgtaaacattcacgtacaagtttttgtgtgaacattagtttttattcctctagtgtaatacctgagagtgggattgctgggtcatttgttaagtgtatgtttaactttataagaaattgccactgttttccagagtgtttatgccattttgcagttttactggcagtgtatgaaaattctagtagttccacatcctgaccagcacttggtattgttagtatttttaatttttgtcattctaggtgtgtagtggtattgcatcatgatttaaatttgcatttcgttaatgggtaatgattttgagcatctgttttttatgggtttatttacattatatatcatctttggttaagtggatataagtcttttgttggatttgtgatttgcaaatattttcttccagtttgtagcttgtttcttcattctatgaacaatgtctttcagagaaccgaagattttaattgtaatgaagttcagtttttcaattttttgttttataagttcttttgatgtaatatttaagaactttttaaccacaggacatgtatattttttcttatgttttcttataaatcttataaaaatttagtagctttatgttttaccttaagacctgtgatgcattttgagttgatttttgtataaagtgttaagtttaggtttattttctcctacatacagaatttccaattctaacatcatttgttgtgtactctcctttgtttatcgaatggctttggcacctttgtcaagaattaatttgctatatttatgcagatttatttccgggttattgattctgtcacattgatcaatgtgtcattccctctgccaataccacactgtcttgattactagaaaattgtgtagtgtgaatcttcttatcttttttttttcaatattgtttgacctttgcagaaacattttagaatcagcttgtttatatctatgaaaaatttggctgggatttccattataatcacattaaattagtagaatcaatttgggtagaattgacattttttaggctcttgagcccctatgtgtgggcccactcccactctgtggagtgtactttcattttcaataaatctccacctttgttgcttcattcttttcttgctttgtttgtgcattttgtccaattctttgttcaagacaccaagaacctagacgccctccaccggtaacatattttggcaagccagccaggatgtaaaataagtttgggatttatttttttccttttcctttctgctccacgcagtggaatctcttcttcactcgggacccttggtgggcagcgcctaaacacagaggcaactgcagatttctggctgggatcactctgaaggactctcttctgtcttttctgcttgtggttcctgatccctacatgtggagcagctcagggcgaactcacatgtgtttcaggcaacttaaatcttcttttcttacactaaatttttcccttactctactcgactggctaaggacaaaagaaacccacctagcctccagttcctatcactacagttcacggaatggagcaaagtccactttgctccatcactctagtggaacaggaagcatgctgttccactagagtgggaccaaatgctcctcctttgctccatcactgtagtggaccaggaagcatgggaaaagatggccttatcaaattttaaggattctgaaagtcagggattatacctaggaaccaaagggaagctcayagtagtaggccattgcctctggagggaaaacatgcaaagcggcactggtgcccacgtaacgtcagagacgtctgatactcttaagactggaccccaaagagggatgccccaggggatcctttggacctcaacctctctgaagggaacacccttggcagaggtcctaaggcctagtactaagccctccttagaattttatctcacagttgcaatactgtttggccccagtattgtttggaatcaagtgtgttgttgaatgggaaagtgagatggagttgcatgtatccaggctttgatgctgctgttccaagcagggtcaggcctggttatatgtgatgttctcctttggtgctgtttggccccagtgttctttggagtctggggaggtttgacctttacaaattaaactgccatggaaactgctttacctgaaattttggttcactgccttcattggattaactactggggcaaacaaaagtagaaccggcaagtttgtattgctgtctcatggctagagttccaaggtaaaagctattgaatcttcatttgtatgtgtatatacatgtctagatgtgtttatttgtatgtacacttattgttatacattctgtctacaaaactgacatacacgtaaaagagtactcataaataagtctaagtacttttcaagttcatgtgacttaagtataactttactaaacaagctggttttaaaatgattggtaaaataaaaatagaaatgacttcaaaaaaaaaaaaggaatggacattttttactgttgagtcttccaatccatggacatgatatatctctttatttacttaggtcttctttgattttattcatcagtgtttcgtaatttttagcatataaaccctgttgactttttgtttgatttacatgtaagtacagatcctcctcaacttatgatgatggggttatgtatccagataaacccatcgtaagttgaaaatattgtaagccaaaaacatatttttggcttacagtattctcaccagtcaaaaccagactttcaatttatggtattttcaccagtgaaaagcacacttttgacttaatattttcaaaccagtgaaaagcacatttttgacttaatatttttatcagttgaaagcacactttcaaattgtgatattttcaacttatagtgcatttatctagacataacctcattgtaagtcgaggagcatactgaatgtatattgcttttgtaccactgtgatacggtttggctgtgttcccacccaaatctcatcttgaatggtggctcccacaattcccatgtgtcattacttccagtgggaagtaattgaattgtgggggagggtctttcctgtgctgttctcgtgatagtgaataagtctcatgagatctgatggttttgtaagggagagtttccctgtacaaattctctcttgccatgagtgtgaggacttccctgccatgtggaactgtgagtcaattaaacctctttcctttataaattacccagtctcaggtatgtctttattagcagcgtgagaacagactaatatacattgtaaagctgaaaaattgtaagttgtaccatcataggttgaggactgtctgtatttatttcttagagctgttgtaaatggtatttaacaagaattggtttccagttgctctttgctagtatatagaaatacaattgagttttgtgtgttggctttgtattctgtgatgttgctgaattcacttattagttctagaagcatttttcatagagttcttgagatttttctatgtacagttgacccttgaataatgcagcaaggtggaagttaggggtgctgacccctgaagcagttgaaaatctacaaataacttttgactcccccaaacctaactactgatagcctgctgttgactggaagccttaccatcaacataaacagtcaattagcacatatttttatgttatatatgttatatactatattcttacaataaagtaagctagagaaaagaaaatgttattaagagaatcacaaggaagagaaaatatgtttactgtttaattcatggaagtggattatcataaaggtcttcatcctcactgtcttcacattgagtaggttggggaggcggaggaagaggaacagttagtctgtctcaggggtggcagaggcagaggaaaatccacatataagtggacctgtgcagttcaaacctgtgttcaagggtcgactgtaaatgataacgttgtctgtcaataggacagtttgatttctttctttctaatctgtatactttttatttgttattttcctgctttattgtactggctaggacttccagtaccatgatgaataagagagatgtgatattatattttttccttggttccaatctaggaaaccattaaatatgatgttggctgtagttttgtttaaatgccctttattatgttggggaggttcctttcagttcttagtttgctgagagtttttatcatgaatgaatgttgaatgctgtcaaatgcctttttttgcatcaatatgatcatgtgggtttgtttttaaactgttaatatgatggattatattggtcaatttaaaaaatattgaacagctttgcattcctagtataaatcccacttgattgtgatatattcttatacattgctggatttgatttgttgatattttattaaggatttttgttgttgctatgttcatgagggacataggcctgtagttttttgttgttttttttttaataccttttttggtattggggtaatggtgactctcaaaacgaattgggaagttttccctcctctattttcagaaatgagtgtatagacctggttttatttcttcttttttaaatatttttcttttattgatacatagtattgattttttttttttttgagacggagtttggctcttgttgtccaggctggagtgcaatggcatgatctcagctcaccacaacctccgcctcccaggttcaagtgattctcctgcctcagcctcccaagtagctgggattacaggcatgcgccacaacgcctggctaatttttttctgtttttagtagagacagggtttctccatgttgatcaggctggtcttgaactcctgacctcaggtgatccgcctgccttggcctcccagagtgctgggattacaggcgtgagccaccgtgcctggcctgatttttttcttttaatgttgggttgaatttgctagtgaaaccatctgggtctaaattttttttttctttttgtttttttggaaagctttaaactatgtgttgaacttatttaatagttatagaattactcagaatatctatctcatcattggtgagctttggtagtttgaatttttcaagtaatcgattcatttcatctaagttactgaatttatgtgtaaagtgttatttgtagtgttattttattatccttttaatatctatggagtctataatgatattcctcttttattcttgttattggtaatttatgtctatctttttttctttatcagttttgtttgaggtttataaatttttaaatcttttcaaagaacaagatttggtttcattaattttctctattatttttctgttatcactcttattgatggggagctgatcattatttcttttttttctgcttgctttaggtttattttgttcttcttttcctaatttgttaagataaaagcttagatgattgattttagagttttattcttttctaatataagcattagcttctttgagtttccctctaagcactatgctagctgtgtgccataaattttgatacattgcattttagtttttatttggttcagactatcttctaatttctcattaaacttcctctttgaatgctggcttatttagaagttatttaatttctagtgtttggagtatttctgccatctttttgttacctatttctggttcaatttcattatgatcagagaacatactttgtatgatttcaattctctgcatatatttgatgtctagatatgagattttatctgtggtacttatcctggatagatttactaggttgtagattatgtcagtcttcagttttgctagaaaatgccaaattgtttttcaaagtttgaaagtatcaggggaacccaccccccgtatttcaacgtaggttctttatattttctgtaagtgtcggccagttgagaaataaagagaaagtacaaagagaggaattttacagctgggcctctggggatgacatcacgtatcggtaggaccatgatgcctacctgagccttaaagccagcaggttgtattaagatttcaaaaggagagggggtacaagaacagggagtaggtcacaagatcacatgcttcaaagggcaaaaaggagaacaaagatcacatgcttctgaggaaacagtacaagggcaaattcagaactactgattagggtctttgttcagctgtgcacgtattatcttgataaacatcttaaacaacagaaaacagggttgaagagcagagaactggtctgacctcaaattcaccagggtggggtttttccccaccctagtaagcctgagggtactgtagggaaccagggcatatttcagtccttatctcaaccgcataagacacttgcagagcagcgtttatagacctccccccagggatgcattcctttcccagagtcttcattattaatattccttgctaggaaaataatttagtgatatcttccctacttgcacatctgtttataggctctctgcaggaagaaaaatatggctctattctgcctgaacttgcaggcagtcagaccttatggttgtcttcccatgttccctaaaattgctgttactctgtttttttttcaaggtgcactgatttcatactgttcaaacacacatgttttataatcaatttgtacagttaacacaatagtggtcctgaggtgacgtacatcctcagcttacgaagatgacaggattaagagattaaagtaagacaggcataagaaattataaaagtattaattttgggaactgataaatgtccatattaaaatgaaatcttcacaatttatgttcagagattgcagtaaagacaggcgtaagaaattataaaagtattaattttgggaactgatatatgtccatattaaaatgaaatcttcacaatttatgttcctctgccgcagctccagccggtccctccgttcagtgtccctgacttcccgcaacatgaaagtagttgtacgaatctattgcaccactccccctgccccagaatgggatatgaatgttctatatcctccctaaacctactatgtatttgatttattcattattctagtcttggaagacaattaatcactaagggaacatttttctcatctttttttttttttttttttttttttttaagacagagtcttgctctgttacctgggctggagtgcagtggcacaatctcggctccctgaaacctccatctcctgggttcaagtgctttttctccctcagcttcccaagtagctgggattacagacgtgcaccaccatgcctggctaatttttgtatttttagtagagacagggtttcaccatgttggctaggctggtcttgaactcctgacctcaggtgatccacgcgccttgacctcccaaagtgctaggattacaggcatgagccactgcacctggcctcatctttcgtgagttaagttttatatcatccttgataatttagggtatcacagtaagcatactgaagttgaaaactcaagtaggttttggttatcattccaaacgacttgaagtttctcattggtcatggagttttggctgtgaaacaggacctggggctgcctctagccagagtgattctacctatgccacaggtggacaggtaagcccttttatggttgctgaaataagtccatatcctagagatgagattagattttcaccaatatctacttccagtcttcatgctttaaatgttgaagttcttcagttttgtacaggtaaaagaaattcttcacctaattctaagtttttacctaacttcttcaaccagtcttttcattgcctgatggaattctgcctgggttttaaattcttttaaatttaaaaatttttttacgttcttcctatctgacaaagacacaagtcttccattcgaattctacaaatctcttatacctttatctgagtctatattttcaacccttatgtgctaatgacaaatatttaattccatccttaaaggatagttgattgtgggcatctactgtatttcataacctttgtaatacaagttatataatttttagtgcttaaactatactttaaagaaaataataacagtgattagtagaacttagccttgaattaatttgagactgttgaaatagtggtgaacttttaagacgcagaggaaagtttttcctttggggataagttattttaacctgagacattttaaatgacaggaaaacatctagctttctttttttatgagtgattaaaatttaaagaggaaagtaaagactgaattggctttatacttactttaaattttaaattaccttaccatctatttaacttaaaaataagccacttttattattcagttaacaaactgaatatcattctttgtttttatttttattttttttaaagacagagtctcgctgtgtcgcccaagctggagtgcagtggcatgatcttagctcactgcaagctctgcctcctgggttcatgccattctcctgtctcagcatccctagtagctgggactacaggcgcccgccaccatggctggctaattttttgtatttttattagagacggtgtttcacygtgttagccaggatggtctggatctcctgaccttgtgatccacctgcctcggccttccaaagtgctgggattacaggcgtgagccaccacgcctggccattcttttattaaaatattttttatagtaaaaatgcaggtgtattatgttatatttattcgttttggtaatatggttttattaaacttgacgaaaatgccttccaactatccatgtgttactcagaggtatgagaatgaattagccgaacaatttgaacaaaagttaagataatagacatttagaatgcttcttgctagaatgaagttctgatttgtgaagaatattactttatcaggtagggaagatatataaaggcagaaaaattattaaattgtgacttcctaaatgtctacttaaaaacatttatggtaaatttataatgttatattgaattgatttgaattatttgaatcttaaaatatagtgtgggagcttttttctaaagtatatattattaaaagctgagaaatatttaagtggttgaaagccagtgggaaatatgaagcaaactgctaatgcaactggggagacaatagaactatgtttatttaatattaagcattaaacttatgaagattttactggaaatttgattggtttttctgtcacccaagggtattttaagcctgttttatgcattatacctgggctgtaccaagagcagatggcaagttcccaggggaactttccaactgacccataatttgagataagatgatagtttacagagctacaaaaatagtcttggggtttgccactgtttttgttttagttgcctatcagatcttttgtcaccttttctctcacagatcatatggatgacatacagttctgtttatttgtcaatatctaattgattagcataaagttataagattataattcaagaggtgaaatggatgctaattggaactcctattaggaatttgctcatcaacatacaatttctttttttgaataatcaaaatatatacttttcattatatagattcagaaaggttctgaaaacataggagatattttcttttaaagctgcactcagaattttatttctgtgatactcaggtgaaagtatgtagtttcccttttcatttaattttattaaaattgaattaaaattttctttctttttctttctttctttctctctctctctctttctctctctctctctctctctctctctctccctccctccctccatccctctctctctctctccctctccccctctccctcttctctctctcggagagaacatgagtattttcaggaaattagagatttgaatttgaaatattttttgtatatcaagaaatccatcaatctttgtttaactatggaatcttcagaacatcagagttgcatgtttttaagcttagagaaaaatggacacactgaatcttagcaactgaaagcaaatagacatacgtcagtatctgtgtatagtgctgacacttatgtcagcactttatcctatttgcttgggaactcttgtttagtagtgtgtttacaatgaggcctttcagtggagagggctacatgactgaatgtgtgtgtactctgtattgtctgagtacattctatgtgtaaactttaagatatgtttatagacatatttgttattgacatttaktcttgtatttattttatttctcagaagtattttatttgttcatttttgataactagcactcagccattcactttttatttctaattttggtgtctttgtgtaggtcactgagtgtgattccagataagttattacagctagatctatgtggctcatcagccacatatttggtttttttgttgttgttgttgtttgtttgttttgagacagtcttctctgtcacctaggctgcagtgcagtggcatgatcttggctcactgcaacctctgcctcctgggttcacgcgattcttctgccttagcctccccagtagctgagattataggtgcccaccaccatgcctggctaatttttgtatttttagtagaggtgaagtttcgccatgctggccaggctggtctcgaactcctgacctcaggtgatccaccatcctcggcctcccaaagtgctgggattacaggcctgagccactgtatgcgtcccacatatttgttttagagagggaagttcgtgcaattaaaggtggaataatctggatttgtcataagtcctatgatttcattgtgctttagttttctgaacagatacgatgaaaattatctactaagagtttaaaatatatcgctgagggttaaaataaagttcaaagtactcccaagtattatgggaatttgtctgtttcttgggaagcagggtagacgttatctaggtggaaaagacgagtgggcaatttgaaatgttagactaggagcttggaaagagagaataaggctagagttatactctagaagttactcagtatattttattgaaggcctaatatatgtcctttaagattgaagccctggaattcatgcagaccacaagactagcatctcctttgcttgtggaattgatagtctagttactagattctagagggaggattatttgctttgaaggtcataggtgaagcttgggaatggatgagactgaaaaaaaagagtgtagatatgattaaaacaattaaggacacagtgactttgggaaatacattatgtaggtttttaggagaaagacaaggactgtgggggaagtacctatgtttggtgattggcatgatgaagagtcagtgaagaaaagaggttcagagtgtcagggatttgggggatttatcattaagctaattaaatttaagctccaggtttgtcacttacataaaatcctttcaagtctgtaggaggaaggttttcacatgggcatatgtttctgtaggatttccaaaagtaaggcatttcaatattgccatttctttcattctgacttaccctcatgtcatatggcattagagtggctgcaggcatttttgggatccagctaaggggaagttgaataggatttacatttagtttgggaggcatgtatttatgtggtcatgtcacttctgaatatagactagctgttctggtataggaaggatatcaaggaatactggtgttactcactgtgttaacacttagtgttatgacacaaagatggaaggctagagatcacctggtgatatggacgtgtcctataatgcatcacattagaagtacgtggtaggataagagaaacaaaatttgaaatacacggggccagaagctagtctgggaaaaattcttccaaatcgaatggtttataaatgaaagaaaatatatgagtttctctaaatttgacaatactaaaagtttatgacattaccagtagtagtttgtgaacagtttgtgaagactattttgtaaaatataaataacaatttagtcttttgaaaattaaaaagatatttatagaaaaccttacatataattgccatatgaagaggtgataacaaaagttatgcaaaaaatatgtagaagtatactagaagtgtgtcagggagtttattgataacattattgttattttttctggattcttgtgatgtttatgatgctgtgacttttttttctcattctcagtaagtattcacctttgtatctaattttgtatttgtaattttgcttccttttttttttttttttaaagaaggccccctaaattctagaaggttcaggcccaacaatacctgggaggcacagaatcatggaagttaagaggagacaaatcacggatggagaatatgtactcttttaaatgatgcattggggtagctaaggaaggcagttgcatttggcaattcagggattattgataatcttcactaatgagtatgaatttgggagtgggaagtggaggttgtgtactttttaaagaaagtggcagtagagtccaagaacagtagcttttgaggaaagcaaggtccagggaagtttttttgtatgtgtgcatgcttcaaaggtaggtggacatctaaatacgttaaaggaagggaaaacatgcaaatagcacagaaggaaaaattaaaggcaatagcaagagaggttaaagcagtgtagaaatagtgacgagagcagggaggaaaaaggaaatgaggtcaagacataggagtgttctaaatagtagaattcagtaaaggtgatttaattgttactgtattagcactgtgctagtgctgagtgcaataattgattttcataatgctgtaatttttctgcaaatcaacattttatgcttagttcattaagatttattatacaatttataaagacttacaatcacataatttataaagattttcatttggatgtttaaaatgaaatgtttcatgacatagttggaagataattatcttaattatctaattagttgaatatgttaaaattaatcttccagaattttttgacttattaagtgattgccccaaatcagcttagagatattatcaagtattttgctagtaagttatgtaaactaattaatagaaaatacatgaaataatcttattttctcttagttttatagatggtatggaaaaaggtacagaattgtcaggtaggatatttattattattttttccatttaactcatcaaaatgtattgaatgtttattatatgccaggagcaggtctaggtgctggagatagagcagtgaacaacacaaaatttctgccttcatggaatttacattttagtggaagagacagaatataagcaaataagcatgtacgtatatattgtcagatagtaatgtgtgttacaaagaaaaataagggagagtaaggcgacagagagttgtataggatgatatttcagatagtgtggtaaggaaagccaggtaggacacttatatgttgctttttgtcagtgtatttagaaaactattttatgcaagtcaaattgtgtttactaagatcaaatcatttacaatttaataggagcaacatctgcttacctgagttttcccttctgaaattattgatttataatagtaccaggctaggtgtggtggctcatgcctgtaatcccagtactttgggaggctgaggtgggagaattgcttgggtgcaggagtttgagaccagcctgggcaagatgctgagacccccatctctacaaaaataaataattaaaaatcagccaggcatggtggcatgtatctgtagtcccaactacttgagaggctgaggcaggaggatcctttgagcccaggaatttgaggctgcagtaagctatgaccatgccattgcactccagcctgggtgacaaagcaagaccctatctctaaaaatgatatatataataataatagtatctacaccataggtttgttgcatggtttaaataagattttgtatgactgttttggtgcagtgctcttactcttcactttatatgaagtatgcctgtaaaagggaataaaacttagtatgtttcgcagatactgtgtttttcacaaattggaggtttgtggcagcgctgtgttgagcaagtctgttggcaccatttttcttacagcatatgctcactttgtatcttcgtatcacattttggtaattcttgcgaaaaatttttaattttttattagtatatctattatgactatttgtgatcagcgatctttgatgttactactgtaattgttttggggcaacacgaatcactgcacccagagaagagagctaacttaattgataaatgtgtgggttctgactgctctaccagctggctcttcccctatctttctcccctgtccttggacctccctattccctgagacactgcaataatgaaaatgggccgattaataatcctacagtggcctctcagtgctcaagagaaagcaatagttgcacatttcttaccttaaatagaaagccagaatgattggaccttagtgaggaaggcatgtggaaagctgacatacaccaaaatgctaggcttcttgagccaaacagttagtcaagctgtgaatgcaaaggaaaagttcttgaaggaaattaaaagcgcttctccagtgaacacaaaaatggaagtgaccagctttactgctgatacggagaagttcgagtggtctggatagaaaatcaaaccagtcagaacatttccttaaaccaaagcctatcccagatccaggccctaactctcttcaattctgtgaaggctgagagaagtaaggaagctgcaggagaaaagtttgaagctagcggaggttagttcatgaggttttagcaactatctccataacataaaagtgcaaggtgaagcagcaagtgctgatggagaagctgcagcaagttatctagaacatctagctaaggtaagtggaaggtggctgcactaaacaacagattttcaacgtaggtaaatcagccttctattggaagaagatgctaggactttctagctagagagaagaggtcaatgcctggtttcaaagctttgaagcctaggctgactgtcttgttagagactaatgcagctgataactttaagttgatgccagtgctcatttcccattctgaaaatcctagggcccttaagaattatggtaaatctactctacttgagccctgtaagcagaacaacaaagcctagatgacagcacatctgttggtagcatagtttactgaatattttaagtccactgttgagatctactgctcaaaaaaatatattcctttcaaaatattactgctcattgacagtgcagctagtcgtcgtccaagagctctgatggagatgtacaaggagataaatgttgttttcatgcctgcaaacataacatccattctgcagcccatggatcaaggagtaattttgactttcaaatcttattatttcagaattacatcttataaggctatagctgccatagattgatggatgtgtgcaaagtaattgaaaaacctggaaaggattgaccattctagatgcccttaagaacatttgtgattcatgggaggagatcagaatattgacattaacaggaatttggaagaagttgattccagccctcatgagtgactttgaggggttcaagatgttagtggaggaagtaactgcagatgtgatggaaatagcaagggaataaatagagcctgaagatgtgactgaattacttcagtgtcatgaaaaaacttgaacatatgagtagttactttttatggatgagcaaagaaagtggattcttgagatggaatctacttctgataaagatgctgtgaacattgttgaaatgacaacaatgggtttacataaacttagtggataaagcagtggcagcatttgagaaaattgactccaattttaaaagaagttctagtatggataaaatgaagcattggatgctccagagaagttcttcccgaaaggaagagtcaattgatgtggcacacttcactgttgtcttgttttaagaaattgccacaggccaccctgccttcagcaaccaccaccctgataagtcagcagccatcagtattgaggcaagacctcccaccagcaaaagaactacagtttgctgaaggcttagatgatcattaacattttttagcaatagagtatttttagattaaggtatgtacattgttctttaagacataatgctacttagcactttactacagtatagtgtaaatatacttacagtatagtgtaaatatactttttatgcactgggaaaccaaaaaattcatgtgacatgctttattctgatactcactttatttcagtggtccagaaccacatttacagtatctccaaggtatgcttgcatttcttgtctgcttttatgtgaaccaaataagttataatcctctattaaatacctttcttttctgtagatacctccaaattacagaatgaagcttctgtgttttttcaacttggagattaaataatggttttaaattgaggcacatgcatatactgtaaggtatattagtctcagatatactactcagtgaatattttcttagatacatacctatatagtcgccacacagatccaagtatgccgtattcccagcacaccagaagaaatctttgttcaccctttgagtcattactaccttctgtaggtatccactgttctgacttccatttccatcaatttgttttctcgtttttcaatttcatatttctgacttctatttccatttctattttatgaaaattcaaaaaaggcaaaacaattttatttatttatggtttgttatcttttttatctggcttcatttgctgaaaacaactcctacaaaattcatccacattgttacgttatcaccagtttgttgggtttcagttctgtgtagtgttccatagtttgaatggaccacaatttatttattcattttctagtttatggacgtttggattatttttattttgagggagtagttatggataaagcttgtgtgagcatttttatacatcattttggtagacatatgtactaattttgttggctatatacaaggagtgggtttactgagtcatagggtaggtatatgtatttttaaaataattattttattttttttaagttctggggtacatgttcaggatgtgcaggttacatagataaacatgtgccatggtagtttactggacctgttaacccatcacctaggtattaagcccagcatgttttagctcttttccctaatgctctgcttccccaccctcccccaacaggccccagcaagtattgttcccctccctgtgtccatgtgttctcactgtttggctcccacttataagtaagaacatgcagtgtttggttttctcttcctgcgttagtttgctagaataatggcttccagcttcatccatgtccctacaaaggacatgatctcattccttttaatggctgcatactattccatcatgtgtatgcaccattttctttatccagtctatcattgatgggcatttgggttgattccatgtctttgctattgtgaatcgtgctgcagtgaacatatgtgtgcatgtataatatactgatttatattcctttgagtatatactaagtaatgggattgctgggtcaaatggtatttccggttctaaatcttggcggaattgccacgctgtcttccacaatggttgaactaatttacattctcatcaaccatgtaaaagtgttcctgtttctccacaaccttgccagcatttgttgtttcttgactttttaaataaccaccattctgtctggcgtgagatggtatctcattgtggttttgatttgcatttctctaatgatcagtgatgttgagctgtttttcgtatgtctgttggctacatgtatgtctttttttgagaagtgtctgttcatatcctttgtagggtaggtatacgtttaacttcagtagaaactccaagcagtttcccaagttgtaccagtgtattcacccaaaagcattaggtgagagtttcatttgcttcacattctcaagaacacttccagtgagtgaagtctttcgccattctgggaggtgtatatttgtgtatcattgtcattttaatttgcatttctatggtgctgatgatgcgcgagtgcttctatatatgttgactggccatttggatattgatattctcttttgtgaaatttctctttagatctttacccctttaaaaaattggattgtttgccttatttattattgatttatagtaattctttatattatgtattttatatacaaaacttttgtgggatatatgtattgggaatatcttctcctggtctgtggcttatctcttactgttttaatcttaatggtgtcttttagagaacaaaagttcctagttttcatgaagtccaacttatttttttctttagtagtttagtgcttttgaatattaatttacaaaatctttgcctacaggaagatcacaaagatattgtcctacattttgttctagaagttttatagatttatctttcactttttttttaggcagggtcttgctctgtcactcaggttggagtgcagtggtgcaaatatagctcagtgcaaccttgacctcctgggctcaagtgagcctcctgcctccgcctcccttgtaattgggaccactgtgcatgccaccatgtccagcaattttttgatttatttttatagaggtagggtcttaccatgttgcccagcctggcctcacactcctgggctcaaaggatcctcccgccttgaccttccaaggtgcagagtctatagctgtgagccaccacacctggctacctttcacttttagatatgtgatctagaattaatttttgttcatggtgtgcaattgggattaaggtttttgtttgtttgtttgttttactggtttacagtgctctagcaccattaattgaaaagattgtcttttcccttcagactttcagtggtctttttcataaactaagtgactgtttatatgtggatctgtttttggactctgttccattggtctatttatgcattctttggttgttgtcagactctccaatataataaattttgaagtctggtagtgtcagttctcaactttgttcttaaagattgccttggctagtctaggacctttgcatttgtatgtaatttttaggatccttaggtcaatttccacaaaaaaacttaatggaattttgatttggtttgcattgtatctatagattaatttggggaggattggcatcatagcaatattgagtcttttgaaccatgagcatgatatatttctccatttatttacatcttaaaatttttttctcaatttttagttttcagttgtagatgtctttattcattggtattttattttcttatgttattgtataagtggtgtttcataaatttcatgtttgattgttgttgttagaaatagaaatagaaaaatcttgagcttgtattaaacaaccttactaaatttgcttattcgttgtagttggtatataatcatgttacctgttttctttttgatctttatactttcccacccttttattgcctgttttcctgactataacctttagtataatgttgaatagaagtgatgatagtggacaatcttcttttctctttaacctttggggaagtattgaacattttaccaatctaataaatagattggtattagtggtaggtttgtgtgtatgtgtgtgtatattattattactattatttttggtaatagctaccttttatcagattaaggaagttcccttccattcctaggttaccaagagctttttttaaaaaaacgataaatgaatgttaaattctatcaaatactttttctgcatctattgagatgatcctagaatttctctgcttaattttgttaatgtagtgaattactttttaaaaaaattttaatttctttttaaagatgggtctcacttcactgtgcctggatattacttaggtttatttttgaatgttgaaccaacactgtattcttggaataaaccccacttgattatgtatattatgtatattatccttatatattgctgggttttctttgctaaattatcatttttatttttaaaagttttcatctgtgttcatgagagatgttagcctataattttcttttcttgtgtccatatcatgtatgcatattattaggcttatgctggcctcacacagtgcttaggaagtgttttcttctctttctattggctagaaaaatagtacaagattgatttctgttatttttaatctgtatgataatctctttttctctttttaaaatttgtgaaatagtcatcaaaatagagtatggttgtcttcttttgcagctgaagaaactgaagcttatagaatttaagtactattagatagctggtggttactgctctgtattgaaaaccagttctgttttacttcaaagcctttgctatacagtatacatggaggaaaatgagtgaccaggtgatcatatggggatcttaagaaataccagaagttgttcttttggaaacttgtaagcttcttttaaaatcttacttcctgtcggtctaagaagggcactcttgatgaatgcttcttagttgtttgtgagggttgtggcttaaagtagctaagctttataattctgttggctctgtcaaatgaaaagtctatccattccaaaactgaacaaataagttttatttctgtgtgagaacaaatggttacttggaatttactgggatttttctttttccaaatccacatagtactggcaacatcttttttttctttgatgttaagatatttccaacattgattctttacagtatatgataggtcaagggattccattcatcatatactgataggtccaaggatgagggaaaaacttcatacaagggaaatataaggtgagttttaagatgaatctagtaccttattttcccacaagtccaaacattattacttttttatataagaaaaatgtttagctgttgtttcatgtggaaacatcttttcttcctttaagtgatatagaatacttgaaaaactattccttgttttcgttaccaaagaatttaggttttctaacaattgtttcctaatgacttctcattctgtagctatttacatttttttcttgaagattttattggaaatgtttggcgtctttatgagttttcagcaagttttgatgtcgtttaatcactaaagtttatactrtgccagtgatgttattttatttgcttaatatgaaaaacctcaataagtttgtctcatttccagttaacttaattagaacatttggctccctctgaaactgcttctcatttttaaagcagaaggtgttatttagtgaaacctacaaaagaataatgttagagaaaattgtactttttagctgaaaaatgttctgtgttaataaattttagagctagaaactttttcgagagctcagttaatccttctgggacttttgaaattgctatctcagtggcagtatttcttgacaaatacagtattgagtgcttttaatgatcttttgttaattatatatggctccgacagtagagatttgagtttggcttaaatgaataaatactatttttacccatggtcaccttaaaaattggagttaaagtgttggcctgctggtctttttccttctctttagttttgctagtaatagtaagttttatttgccattgtataggcttaattggttaacatgtggctgctaatatttagtaaggttaatttttagtatgaaaattaagagtttcattttggtttttatataaagtgaagctatgtattaatagatttggtagttaattatgctgaataacaaaagtctaatatttggatgatcagtatattagtagaattagaaatacttgctcttgaagttgtttaaaaattgagatagaaaaagaggaagttgattttattaatgctgtaaaactgtcaaaaataagtatttagaaaggcatatttgagtgctaaattacttatgaactgacaactgttaattctttgcttaaaattaaaatcaaagtataatgccattaaaacaagtatagaaaaggcatgccagtttcccccatatttagggtattatttttcaaaacatttgctgaattaaaaaaaggttacttaaatttcaaatgtgtgttttcctctaaatgaaaattttccctttttcctcagtgtttttctgatgttcaagtggcagtaggtgtgggaagccgttgcaagcagtatctcccaagagtgagcttattctcctattgtagatatcaggatatcattgctttccttttctgcactgtatcatgttttagttattttatggaaatctatcagagtggaagagcaaaaggtcagttggaagagaaaaaagatgaaactgaaactaaaagtggttaaatatacttacattaggtatcaattactacttgtatattatccatgttacattttaaatttgcattggcttttttgttgttctttaggtaccttgctaggattattgattttgttcattatgagcagatctgagtgcctatcatgtacataatatttctgtgaccagttcattcattgtgctcaagtgataataaccaattttaatattaattctgtaaaacatatagcgcttaatattcctcacatatggagcttaatcttcccccacaaattttattttgtatattttaattgcaaaaataaaggatttattcatattgtagctagtttgcatcagcatgaattaataagtttcactatttttcttgttagcatttttaagttttattgaattagatgggtaaatgaatagtaattatattatctgcagtgtaattatctttgatttcagttattcacaccatctctttacaastgataatcaaaaattatttcaaagtttgaaaatttttaacataaaatttctgctcaatttttatactttttaaatttccttcaagtaatatatgcacatagttaacaataagatagtaccaaaagacttaaggtgaaaaatagcagtcttctttctatttctgttccactctacagtcctgcactccaaaagcaattactcctaattttttccccatttcttaaggtatttacctacataatttaaaataatatggctcttctactaattttttggcttaagcagttttcttatgataattgaagagttagctcttttattatgcctctctccattctttctccattctcttgctatagttatgtcatgaatttaaaatctatttttggtatttatattacttgattatggaaatactgtttatttgtgaactaagtagttcactttttttttttaaagcatccagtgttactattaataagtagaaagccattctgatttctctctggaagcgttcaagatttcctttacccctggtgctcacaagttttgtgatgctgtgctttgataagtgtctttttttcaacctttgtgctgatatttgatgggtctttttactttttaatttttggggaaaaattcatgtgtgtgtttttttttctcttccctttttttgattctttctgggcttcctgttagttgaaaattctgttccctaggttaatttgcctaatttttaaagtgtttttctcctatagtttatctcttaggctttttgtcttatttttctagttgtccttcacttcatctttctgtccgtctactgaattataaaaattgtattatcatagttttaatttcttagaggggttccttattctctgttcccattttaatattatgtctttgattcatgggtacaacatctattcttatttttctgagattattaataagagtttattgatgtcattcctcctacttcctaatttcttttggcacattttggtctttgcttttctgttgcaagcttttgtcagattcttcaagtcttagttcttgcaaaagcagaatctaaaataccctatctttggtttatttggaaggtgattccaggaattataatgagagaataaggaggtgagacagggaagagaagaagtccagtaaaaggtgtattgattttgtgggttatcgtttggagcagctggagctcaatactgctggagactttcagagagactgtgtagaactgcactgtctaatactaatcactagctacatatggctattaaaattaaaattaaaatgaatgaaattaagtaaaattagagattcagtttgcattcacaccagccacactttaagtgcagatgtagaacattagacagtgcagatatagaacactccaattcagtccagtccagtgcagatataggacatttccatcatggtttataacataccttagaattgtaccatggaggttcaggaaaactgacctatttatctaccatcatctgtcccttattgattaagagttgctcctagagttactgactccctgtcacttatggcctgcgccacacaggggctgtgtcatttctgctaccttactcatttccactgggtacctagtaacaccaaatgcagagtttctctagttcatttttttctagagatccaaatcctggtcttctgtcagtctgaggcaagtagtcacttgactgaatgtggtggagggaagatagtcttttataagtatgcagatttttaaccaaattgctcatatttttttggggaaatcttaccccagtatcccatggcaactgttacattcgagttccaagcctttggaggattccatggagtaaattgacttcttattcttgtcctttaccacaggcattctgattgcagttttccctgatctgcaaattactaccactctgtagcttaagaaaaattatgatatatagtatttcaaacatgtggagaagtataaagaaaaaatatgcttgcaattcatatagtgctgggataaattcaactaagccctgtagggttgtctttttttttttaataccaggaatcttttgtttaaattttaggagacttgtcaccactcagtgatatcaaggctgctggggttattatgtcctttttcttctcctttgctgtgtttaggtggctactagtttattgagaaatttttggtctatttgcataagagatcttagcatattataatgttctttctatgtaacatttgtctgcatttggttttgatgtccaggtaacactagatttatgaaaaaagtttgtgttacctctttttccgttatgtggaacagtttgtacaaaattaagattagttgttccttaaatgcttggttgaactacccagtttaggcccggttgtttgtgtgtgtgtgtgtgtgtgagacattccttcttactagtttaatatttttctttttaaaacaccttaaatgtagttttttcagttagagtctgttagtggtaagttctttttgtgtttctggaagtttctttgtttaactctcactcttggatgatagtttagctgggtatagaattctgacaagtctgttttgagttttttcttccttaaatcttttgaaaattttctaagttttttcttattttcagtttggcttgatgaccatgtggcttgatatgtggcctgaatcttacttaaatattaggtctatagatttaacaagtgaaaactaatttttataattcatttcctagtttttatttagataccagcaatattcatgataaaaagtaccatatagtctcagatatctttaattttaatggttagaattatgttaaaatattaaaccagcatgtctgaatcatgactacataataaagcctattgatttaattggtttgaggtgggagtccaagcctgtattttctttcagtgtgctcaaataattctaatgtgcagccagaggttaaagaacatgaagttacaaattgagctgtaaattcagagatattctaatacaaatctcaactgtctttttctttttgttttgtttttatttaaaaagttggcagcctaaattcaaaatgtatgtggaaagacagatcaatagtcaaagcaataaaaaagaagtacatcattggatttatagttcctgattttgagatttacttaaagacaatgtggtattagtgatagaatggatattatggacaatagacccacacatacatattcagttggtttttggcaaaggtggtagggcatttcaaaggaggaagtaataatatttacaacaaatgtgctggaaaaactgtataataygtatgtaataaaatgtatactgactcttacctcacatcatgcaggaaaggtgaacttaaaatgtgtcatagacctaaatttaaaactaaaaaaagctgtaagacatctagaagaaaacatagaacacagaaaacacaaaccataaaagaaaaaaattcataaactggaccttgtcaaaattaaaaccttttgttctttaaaagttatcaataagaaaattaaaagataagggttaacataggaaaaatatttataatacatatatttgagaaacgacttatatattggatatataaagaactcttacaactcaatgaaaagaaaataattgactcaatttaaaataggcagaatatttcagcactgctactacattctagaagatttgaacatgtaccattttcattccttggaaaatagtttggcagtttagcatatgatactggaattctctcctaggtatttatccaagagaaatgaaaacagatatccacacaaaaatttcgtcatgcatgtttatagcagttaattcataatagctgtaaactgggaacacccaaatattcattgcagatgaatggttaaacaaattgtgctctatccctaccagtagaagggaatgaactatgaacacacacatggataagtcttaaaacattaacaaaaacatgacgctaaatggaggaagccacatacaatatattctgtataatatcatttatatgagattttagaaatcaaaaactaatttatggtgtcagaaagcagatcagtgacttggggtagtggtaggagagtttgactgcagaggcacatgaggtatcttttgttggtgatggaaatgttttgtattttaattttgttggttgtcacacagttgtacaacatttgttaaaaataatcaaactgcacattttaaatgggtgtatgcatattttattcaacaagtttgacgaaggaacttaggaacactaagttggacaatctcatgagctttttttgtgatttcaaatccatgttagtggttaagctacaatgtttattgttgaatgtgggtatttactatggaggaagtgtgtgtatggtcttagctcatttacaaataaaatattttaacctttaattgaatattgatatagcatgatgttaactttatgttacagttactttctgctgtgtattactgggaatgtctttcggtacttatatagaaataaggtaaaaaagctatacaattaaaaatgtggcaatagtcacttcaaatcttttatgtgtgcctactaaagcaaacaaaatactaaacttgttttatatgtgttcaataaactgctgaacaagaaaaggatgcaatggccatgttgttagactgttggagtaagtgtaatagcaataacctaccttcctttttaccttcctttctccccctctccttccctttgtttctccctccctccttcactcccttctctccctcttctacctatccttatttccctttgctggtgacagtgcaagttgaatttgtacactgatctagattcagattagtataataaatttttaaaaatatcaagttgaatgaagaaggaaaattaaaattatacagtacctgaaactaaaaggctaaataaatggattcatcttttaaaaaaagttacattttctgagcatctataattcagttaagaaggtgactgaaaattgcagtttactggatgatcttgggaaaattactcactgtgtttctcagttttctcatttgtaagacaacaataatatgttgaaaggattaaatgaggtaatgtatttaaagtgcgggcacatagtaactactcaataattatttgcctgtcatcatcatggtcatattcaaagtgaaatttcttccacatctgaccttggctattttaatatatgtgttactaagcaatataatgtattttaaagaaaaatacggtgatatgccactttcaaagaaacaaaaaagatgtgcattataaattttagatcataggtgaaattgtacttattatcaattcattaggtgcatacaatacacatttagataggagcattgttaattcatttttagagtttttgaccactttcatacatttcaaaatggctttgaagacataactgcagttttcatatttttcatactttagcattttggtacatgccatattagaatgtatcttagacatctgataagtgtcaagatttcccccttactctgttatctagcaaatattgagtacctggtatgtaccaggtgctggggatataacagtgaagacaatctagatgcctctgtcatggaacttagatttcattgtttggggagatactggggaggaaagattggacaagacaacacataaaataacaagataacttcagatagtaataagtgatgagaagaagaaaatgggatgatggggtagaacatgcctggaaggactaatttgggttgtgtggttatagaaagcctttgtgagatgacatttgagcgaagacctgagatgaagagtcctgaaaatctggggatggattttctagtcagtggggacaggagttcaactgcatcttagacctgatgaacttggtatatttgaattcttacaaaagatgaatattgctaaaggatggtaattaggtagaagactaataaagtagaggagggtggaaagatagccaggacctatctttcacagatagccttgggcatcatttcttactgagtctgtgaagcttgatgccgtaagcaaagagaaatatggaaaataagtggttggtattaacggtgtggcttttaggaaacaggcaaaatatcctggaagatttttattggggatttggaagtataataaaataaataatcattaactttgtatgccgtggggagaaaccaggtctgattattgacttctctttagggaaacatcagtttgtaaaatgtgttttgaaagcagcagaggaggtaatatgggcatactactctttccctcccattaattctttagacttcttctttgatattttactgagagtgtggggttttccccctgtatatatgatatttgtgatgaagaaaggcaaataatttagctagagttcaacactttgtttcctactctttggtcaaaacataaatagtatttggataccttatagtaacatacaaggagaagtgactagagagagcttgtttggttaagatcactcatttaagtagattagaaaagtatacctatggagaagcatcccttggaaggtaagactaggttattttatttagccttcttcttggttgcaatggtttggatgcttgtcctcttcaaacctcatgttgaaatttgatcttcagtgttagaggaagggcctaaagggagatatttgggtcatagggatgagtccctcacaaatagattaatgacttccattgggggtgagtgagttctccattaattcctggaggagcttgttgttaaaaagagcctggtacttccttccatctctctcttgcttctttttttgtcatgtggtctatgcacactggcttcccttcaccttaccccatgagaggaaacaacctgaggccctccctagatgcagatgtccattcttgaactttccagtcatcagaatcatgagccaaataaatcctttttctttataaactacccagcctcaggtattcctttatagcaacaaaaaatggaataagacattggctaagtcctattataaatatatataagtatttaaatgtgttttttacatatggggacagcttagagtctcaaatattagacgtacctaaatgtaatacatggcttctagactggattctataagcagtactataaagaatgttattggatcagctgacaaaattgtactagtacagtaaatctgatgcaggtatttagtgatgttgatttttctggagtcgataactatagtgtggttatgtaagagaatattcctcatcttaggaaatttacattgaagaatttaggactaaaaagcatgatgtaagcaacttactctaaaaaagttcaggggtgaattatatatatatatagagagagagaatgtaggtgtatgttaataataaaacaaataggacaaaattttaacaatagatggatctggataaaggacatataggagttctatgcactaatcttatttttgcacctcttctgtaagtttaaaattatgtctaaataaaatactaaaaatgggttaaagttattttttgtttaaaaataatttcaaaatgtagctatatctcattgtcagaaatactatcaattctatgttgagtttatcaagcaaaattccaatgttagtacaatgatcaagtgttaaatattgggttacaaactaatattttttgaatctagaggtagaaaagattagtgtggattggatgttagaactgtgaaaaaaaagtgcagagtggtgaggtagttaagagaaactggaaagaatgagctggttgagaattcagaattggagaaggtaaatttagtagttacccatgtaaatgctaccattgtagagcaatgttttgtagtcttttgcagtcttcctgaggatacttaccatgttttattgaattttaacgtgcacattttttttcacattaaaaaaatctctgaaatcagggtgtaccttataatcagtggcatctgataatcacatcggtgtggattaaagtcagtttttccatataagatttgtggttttgcctgtaacctgggggcactaccagtaacctggaggcactaccacttttcttctgccagtaacctggggacagtaccaacctgaaactattttaaattatcttttgtgtttgagtacttggaccaccctagtgtgaattcggattacagatttgtgtgtgttctggctggtggttcaaatttggagaggagatagcacctctctcccccgcaccactagtgccaagattgagaagacaaattcctgtgctgttgctttccttgkaataggtttatttcccctttactcttatacgttttttgtcacagtcttcttatgagggttcctgttagactattggatattttttgttgttttcagttatatatgaaaataatggtgataaaaatactttttttcctgcttaactttggtgtccttgctttttggatatatgttcttaattgtattattcctattcatggtttcacagatatctttaatctcaccctatccaaaggaattctaaaggtaaaataacaccctacattgatagcttggtccattaagtcatttgtcttggggaaaagttgtagcataaagtcatagtcagtttttggttaggaggaccttatagaagagatgaatgagcatacatacaccctggagttagtccaagttttggattctctgaagcttacctctgtaacttaatctttctgaactttagtttcctcatctagagaatggtttgtgatattactgctctgttaatgttattgtgctccttcaatgagatagtgtatataaaggtctagtgtgggctctggcagagatgtggtgctgaatagatgatttatttttttgattgattgtgattgccattatttttggtttcctaggacatcctcttccacccagtccctcttcttatggaaatatatcttgtccaaccatcccctcccaccaaccacgagagaggtgggcacattattcatcctggccaatttagattaatcctctaaatataatggtaggttcacgtctgagtgggcatgtgaccaaagtccatcagagtcttttcccatcaggattgatatacagggaatgggggaagaaaacctctctaccggaattacaaaggttggatttagatccaaagccactggcaactaccatctaattccatatggagaagtctgcttaaataatgaagctaaggagaagctatcaaggataagagatggaggttgagggttggggagggcgaaaaagagagggaggagagagacagagactgagggagatccagttccatttttttaggctatccttcctatagctcttctttcagagatatgccagtctcctttccagctttgtgaactagtaaatgctttttttaaaaaaatgtggtttaagttggatttctgtcacttgcagtgaagagttctgatgaatatgataatggtgttatttgcccaaagaacttttcttgctcaaagaactgcctatattgctttcttgctaacttgttaaagactagtatataataggctattacatagaggatgaatgcctggaaaaagaaataaaaattatgatttttttaaggaagatctctgagtttaagattttttccatgtcacattattatttctagtgatgctatagggataccgtattgcaagtaaacatctatagatgtacaaagaaaatttgcagtcttaattttaattagaaaccatttaccacatttagaagctctgattaaagatataatggataaaagggataaaattacatttgcagttatttgtttttaatctttaatgtcccttcttatatgactctcagatagagtgagcagggcccaacttgtctgaagcttaagaggtgacccagaatataattgagaggactagaaaggtatattagactattcttgcattgctataaagaaatatctgagatggagtaatttataagaaaagaagtttaattggcttacagttctgcaggctgtacaggaagcatagtgctggcatctgcttctggggaggyctcaggaagttttactcatggcggaaggtgaagtgggagcaggcacatcatatggccagagcaggagcaagagagtctggtgcgggaggtgccggactttgcaacaatcatatctcaagagaactcactcattattgcaaggatagcaccaagccatgaggaacccgcccccatgacctaaacccctcccaccaggtcccacctccaacattggggattacaattcaacatgagatttgtaggggacatccaaactatatcaaagggcaatggatcagtgtcagcattcactgctggtaaaaacagtatttgtattcttaatttggttagtctggataggagccaaagattcacagcatggccgtattcacttggaagtttgcaatttgattaaggtttgagaacatgtcagggaaggaaagaatttcctttaaaatcatcctgcacactgaatacctaaagtagtacaaataatttgttatggcctgagaagctaagaaaaaatttagtcattcttctaagtccaagaatggctgtaggggatagtacatgagtgactatcctgtctacttctgttttctgttttattttgtatattttttagaaacaggatctttctctgtcccccacactggagtgcggtaatgcgatcatagctcactgtaacctccaactcctgggctcaagctgtcctcctgcctcagcctcccaagtagctaggactacagacgtgtgccaccacacctagctaattttttattttttgtagagacagggtcttactatattggctaggctgctcttgaactcctggcctcaagcaattctcttgtcttgggctcccaaagcactgagattataggagtgagccaccacrcccaatcctgttttcttttttgaggtgcgttaaatatttacattttacctggagtttggaaaagtagtttatttggacgtacaagcttgtttttttttttttttttttgagatggagtcttgtcctgttgcctgtgctggagtgcagtggcatgatcttggctcactacagtctccgcctcgcaggttcaagtgattctcctgcctcagcctcccgagtagctcggcttacaggtgcacagcaccacacccagctaatttttgtatttttaatagtgacagggtttaactatgttgggcaggctggtcttggactcctgacctcaagtgatcctcctgccttggcctcccaaagtgttgggattacaggcatgagccactgcgcctggccaagrtgtgtttttaaagtagaagttaattctgtggattgatttaaccaattttctttgcaagcaattgtataggagaattaaatacaaatcctcctactgatgtcagatttagataatgccttaatatgatgtaatatcttaaatagtgaactgtttggttataccttgtgccatgatttccttaatatatctcataaagttgtacaaagaataagattgagatgctttactgttaggcacatagacatttatgtaacattcattttaaaaaatttgaataccaattatgtgtaaggtactaggataaacacaaaggatacaagaagtctttgccttaggccaatacattctgatagagtgttaaaatagttacacaagtatctgttactcaaagcattaattacataggtgttatatatattaagtatataaacattatgtatattaagtgccttgtgctgagtatcaactaagtgttttaagatcagagtccatttggggtttgtgatggttaattttatgtgtgaacctcactggatcacgggatgaccagatatttggtcaaatattattctgagtttctatgagagtgtttttggatgagatagatggattatgagtagagcaaaaaggcagactctcccacatataagagagaattctttcctacctgactgccttcaaactgggacattggctttttacctgcctttgaacttgaactgaaacattggcccttcctgggtcccaagcttgctggccttcagatggaaactatactgccagctttcttggttcttaatgcttcagacttggactgaaactaaaccattggttctccaacttgctcccacaactctgcacatgttaggtcagcctccacaatcatgtgaactacttccttataataaaaaatctctacacacacacacacacacacacacacacacactcacacacatactattgtttctgtttccctggagaactgtaattaataaagggtgacttggaaaggcatcacagaggaggtggaatttaagccagaggctaaactatcgtataagcaggatttcagtagataaagatggtgaagaaaaacactacaggcagaggaaatagggtatgtgatggaagcagtctcaagtagtataatttggctagagttcaagatgtttctactgtttttttgcatttcagaagagttgtgggagaacaccagttttaccacaacctggctagtacttggtggtagtgtggtagtggcagtggcagtgcgcgtgtgactttttttttaaaaaatgactgtagcaggttgattgatgattggttaaagaggaagtctgctttctcagcattctggttaatctaacctgagatcatttttcattactctatcatgctccagtccaggggaggggagggttatagtcagaaaaaaagaccgtataaatgtgtatatatatgtgtgtgtcttgctatttgtattggttctcatagtttgcaaagtgaatatgatgacattcttcccttggccctatttttagcttgcttttctcttagtggacctaagttatgaaatagcaaaggtttatatagctttgaaattcatgtttttagctgggcgtggtggcagtgcctgtcgtcccagctactcagggtattgaggcaggaggatcatttgagcctgggagctccaggctgcagtgagccatgcctacacctctgcattccagcctgggtgacccagctaaaccctgtctcaaaaaaaaaaaaaaaaaaaagaaatacatgttttataccctcagatttaattgcttattttacatatttgaccatccatttcctgggatgactgatgccccaagatggtgccaatgtggaatggcagtactgtttagtaggactttctccagtgtccagtgtggtatccaccagccacacatagctattgagtccttgacatatggctagtgtggctgaaaaatggaattttaagttttatttaattttaattgatttaaatttaaattgtaacatatagctagtggttactgtatgagacattgcagttctggagcttaagaagttttggcttgtttctagctctctggtgttgagaagggctgaccaagcagtattttcactcatatttaaaatataatatcttaaatattcttaaatattctattggtgattacacagcaaatgaattttgatattgccaattcttcagtaaaattaggtatttattaattaattgtttatgttctgcctcattccaaataaagattgtatgtgaatgataggaaatgatctattaaaggtacaattattaaaataatgataaaagaaaaagagccatgtaacaaatgaagtgagaagagaagcaagaaaaggggaaaaatcaggtagcgtgatgcctccagcttttttcttttggcttaggattgacttggcgatgcgggctcctttttggttccatatgaactttaaagtagttttttccaattctgtgaagaaagtcattggtagcttgatggggatggcattggatctataaattaccttgggcagtatggccattttcacgatattgattcttcctacccatgagcatggaatgttcttccatttgtttgtatcctcttttatttccttgagcagtggtttgtagttctccttgaagaggtccttcacgtcccttgtaagttggattcctaggtattttattgtctttgaagcaattgtgaatggcagttcactcatgatttggctctctgtttgtgtgttattggtgtataagaatgcttgtgtcttttgcacattgattttgtatcctgagactttgctgaagttgcctatcagcttaagattttgggctgagacgatggggttttctaaatatacaatcatgttatctgcaaacagagactatttgacttcctcttttcctaattgaacaccctttatttccttctcctgcctgattgccctggccagaacttccaacgctatgttgaataggagtggtgagagagggcattgcgacactattaacagtagcaaagacttggaaccaagccaaatgtccaacaatgatagactggattaagaaaatgtggcacatagtgggaggagccaagatggccgaataggaacagctccggtctacagctcccagcgtgagcgaygcagaagacaggtgatttctgcatttccatctgaggtaccgggttcatctcactagggagtgccagacagtgggcgcaggccagtgggtgtgcrmaccgtgcgcgagccgaagcagggcgaggcattgcctcacctgggaagcgcaaggggtcagggagttccctttccgagtcaaagaaaggggtgacggacgcacctggaaaatcgggtcactcccacccgaatactgcgcttttcagaccagcttaaaaaacggcgcaccacgagactatatcccacacctggcttggagggtgctacgcccacggaatctcgctgattgctagcacagcagtctgagatcaaactgcaaggcggcagcgaggctgggggaggggagcccgccattgcccaggcttgcttaggtaaacaaagcagccaggaagctcgaactgggtggagcccaccacagctcaaggaggcctgcctgcctctgtaggctccacctctgggggcagggcacagacaaacaaaaagacagcaggaacctctgcagacttaaatgtccctgtctgacagctttgaagagagcagtggttctcccagcacgcagctggagatctgagaacgggcagactacctcctcaagtgggtccctgacccctgacccccgagcagcctaactgggaggcaccccccagcaggggcacactgacacctcacacggcagggtattccaacagacctgcagctgagggtcctgtctgttagaaggaaaactaacaaacagaaaggacatccacaccaaaaacccatctgtacatcaccatcatcaaagaccaaaagtagataaaaccacaaagatggggaaaaaacagaacagaaaaactggaaactctaaaacgcagagcgcctctcctcctccaaaggaacgcagttcctcaccagcaacggaacaaagctggatggagaatgactttgacgagctgagagaagaaggtttcagacgatcaaattactctgagctacgggaggacattcaaaccaaaggcaaagaagttgaaaactttgaaaaaaatttagaagaatgtataactagaataaccaatacagagaagtgcttaaaggagctgatggagctgaaaaccaaggctcgagaactacgtgaagaatgcagaagcctcaggagccgatgcgatcaactggaagaaagggtatcagcaatggaagatgaaatgaatgaaatgaagcgagaagggaagtttagagaaaaaagaataaaaagaaatgagcaaagcctccaagaaatatgggactatgtgaaaagaccaaatctacgtctgattggtgtacctgaaagtgagggggagaatggaaccaagttggaaaacactctgcaggatattatccaggagaacttccccaatctagcaaggcaggccaacattcagattcaggaaatacagagaacgccacaaagatactcctcgagaagagcaactccaagacacataattgtcagattcaccaaagttgaaatgaaggaaaaaatgttaagggcagccagagagaaaggtcgggttaccctcaaagggaagcccatcagactaacagcggatctctcggtagaaaccctacaagccagaagagagtgggggccaatattcaacattcttaaagaaaagaattttcaacccagaatttcatatccagccaaagtaagcttcataagtgaaggagaaataaaatactttacagacaagcaaatgctgagagattttgtcaccaccaggcctgccctaaaagagctcctgaaggaagcgctaaacatggaaaggaacaaccggtaccagccactgcaaaatcatgccaaaatgtaaagaccatcgagactaggaagaaactgcatcaactaatgagcaaaatcaccagctaacatcataatgacaggatcaaattcacacataacaatattaactttaaatgtaaatggactaaatgctccaattaaaagacacagactggcaagttggataaagagtcaagacccatcagtgtgctgtattcaggaaacccatctcatgtgcagagacacacataggctgaaaataaaaggatggaggaagatctaccaagccaatggaaaacaaaaaaaggcaggggttgcaatcctagtctctgataaaacagactttaaaccaacaaagatcaaaagagacaaagaaggccattacataatggtaaagggatcaattcaacaagaggagctaactatcctaaatatatatgcacccaatacaggagcacccagattcataaagcaagtcctgagtgacctacaaagagacttagactcccacacattaataatgggagactttaacaccccactgtcaacattagacagatcaacgagacagaaagtcaacaaggatacccaggaattgaactcatctctgcaccaagcggacctaatagacatctacagaactctccaccccaaatcaacagaatatacgtttttttcagcaccacaccacacctattccaaaattgaccacatagttggaagtaaagctctcctcagcaaatgtaaaagaacagaaattataacaaactatctctcagaccacagtgcaatcaaactagaactcaggattaagaatctcactcaaagccgctcaactacatggaaactgaacaacctgctcctgaatgactactgggtacataacgaaatgaaggcagaaataaagatgttctttgaaaccaacgagaacaaacacacaacataccagaatctctgggacgcattcaaagcagtgtgtagagggaaatttatagcactaaatgcccacaagagaaagcaggaaagatccaaaattgacaccctaacatcacaattaaaagaactagaaaagcaagagcaaacacattcaaaagctagcagaaggcaagaaataactaaaatcagagcagaactgaaggaaatagagacacaaaaaacccttcaaaaaatcaatgaatccaggagctggttttttgaaaggatcaacaaaattgatagactgctagcaagactaataaagaaaaaaagagaggagaatcaaatagacacaataaaaaatgataaaggggatatcaccaccgatcccacagaaatacaaactaccatcagagaatactacaaacacctctacgcaaataaactagaaaatctagaagaaatggatacattccttgacacatacactctcccaagactaaaccaggaagaagttgaatctctgaatagaccaataacaggagctgaaattgtggcaataatctatagtttaccaaccaaaaagagtccaggaccagatggattcacagccgaattctaccagaggtacaaggaggaactggtaccattccttctgaaactattccaatcaatagaaaaagagggaatcctccctaactcattttatgaggccagcatcattctgataccaaagctgggcagagacacaaccaaaaaagagaattttagaccaatatccttgatgaacattgatgcaaaaatcctcaataaaatactggcaaaccgaatccagcagcacatcaaaaagcttatccaccatgatcaagtgggcttcatccctgggatgcaaggctggttcaatatacgcaaatcaataaatgtaatccagcatataaacagagccaaagacaaaaaccacatgattatctcaatagatgcagaaaaagcctttgacaaaattcaacaacccttcatgctaaaaactctcaataaattaggtattgatgggacgtatttcaaaataataagagctatctatgagaaacccacagccaatatcatactgaatgggcaaaaactggaagcattccctttgaaaactggcacaagacagggatgccctctctcaccgctcctattcaacatagtgttggaagttctggccagggcaatcaggcaggagaaggaaataaagggtattcaattaggaaaagaggaagtcaaattgtccctgtttgcagacgacatgattgtttatctagaaaaccccatcgtctcagcccaaaatctccttaagctgataagcaacttcagcaaagtctcaggatacaaaatcaatgtacaaaaatcacaagcattcttatacaccaacaacagacaaacagagagccaaatcatgagtgaactcccattcacaattgcttcaaagagaataaaatacctaggaatccaacttacaagggatgtgaaggacctcttcaaggagaactacaaaccactgctcaaggaaataaaagaggatacaaacaaatggaagaacattccatgctcatgggtaggaagaatcaatatcgtgaaaatggccatactgcccaaggtaatttacagattcaatgccatccccatcaagctaccaatgactttcttcacagaattggaaaaaactactttaaagttcatatggaaccaaaaaagagcccacatcgccaagtcaatcctaagccaaaagaacaaagctggaggcatcacactacctgacttcaaactatactacaagcctacagtaaccaaaacagcatggtactggtaccaaaacagagatatagatcaatggaacagaacagagccctcagaaataacgccgcatacctacaactatctgatctttgacaaacctgagaaaaacaagcaatggggaaaggattccctatttaataaatggtgctgggaaaactggctagccatatgtagaaagctgaaactggatcccttccttacaccttatacaaaaatcaattcaagatggattaaagatttaaacgttagacctaaaaccataaaaaccctagaagaaaacctaggcattaccattcaggacataggcgtgggcaaggacttcatgtccaaaacaccaaaagcaatggcaacaaaagccaaaattgacaaatgggatctaattaaactcaagagcttctgcacagcaaaagagactaccatcagagtgaacaggcaacctacaacctgggagaaaattttcgcaacctactcatctgacaaagggctaatatccagaatctacaatgaactcaaacaaatttacaagaaaaaaacaaacaaccccatcaaaaagtgggcaaaggacatgaacagacacttctcaaaagaagacatttatgcagccaaaaaatacatgaaaaaatgctcatcatcactggccatcagagaaatgcaaatcaaaacactatgagataccatctcacaccagttagaatggcaatcattaaaaagtcaggaaacagcaggtgctggagaggatgtggagaaataggaacacttttacactgttggtgggactgtaaactagtacaaccattgtggaagtcagtgtggcgattcctcagggatctagaactagaaataccatttgacccagccatcccattactgggtatatacccaaaggactataaatcatgctgctataaagacacatgcacacgtatgtttattgtggcattattcacaatagcaaagacttggaaccgacccaaatgtccaacaatgatagactggatgaagaaaatgtggcacatatacaccatggaatactatgcagccataaaaaaggatgagttcatgtcctttctagggacatggatgaaattggaaaccatcattctcagtaaactatcgcaagaacaaaaaaccaaacaccgcatattctcactcataggtgggaattgaacaatgagatcacatggtcacaggaaggggaatatcacactctgtggactgtggtggggtggggggaggggggaggggtagcattgggagatatacctaatgctagatgacgagttagtgggtgcagcacaccagcatggcacatgtatacatatgtaactaacctgcgcaatgtgcacatgtaccctaaaacttaaagtataattaaaaaaaaaaaaaaagaaaatgtggcacatatacaccatggaatactgtgcagccgtaaaaaatgatgagttcatgtcctttgtagggacatggatgaagctggaaaccagtctcagcaaactatcgccaggacaaaaaacaaaacaccgcatgttctcactcataggtgggaattaaacaatgagaacacatggacacaggaaggggaacatcacacaccagggcctgttgtggaatagggggacgggggagggaatagcattaggagatatgcctaatgttaaatgacgagttaatgggtgcagcacaccaacatggcacatgtatacatatgtaacaaacctgcacgttgtgcacatgtaccttaaaacttaaagtataattaaaaaaaaaagaaaaggggaaaaatctaggaaagtctagtcgagggtagcaaaaaatccatctgtgtcaactggcagatagagtaaaaaaaataaatccaataaaaaaataacatttttatgtaatgagacatgccattgagtcaagagagaaactttttccaaagacgaaacaaggagaaatttattccgttttgtaagatttgttgagtagtatagtggacggcatcgtttaatagcaattttacaaataatagagacatttttatcatatatttacatcaaatcttggtaaaaagttttttgaagagctaaagcctgccaataaccatgtgagcgagctgagaagcagattctgcagagctagtttagtcttgagatgactgcagtcctggctgacagtttgattataacctcatgagagaacttgaaccagaggcactcagctaagccactttcagattcttgacccacagaaactgagataaaaaatgtttgttgttttaagctgcttagttttggggtaatttttttatgtagaagaagctaactatgttatgatattttttttagaatggaggtgcttggtgttaaatgataaatagatacagctttctaaaccttcaaatcttatttatgaaagtacatttatagccttatatgtttgagggtgtaaatatagttaggaaaaatgttgaaattaagtattttcactagccatcctaaatggcatctggccatttgaatgaatgaaaaatagctaataacaatagataacatgtattgaactctttctctgtttcagaaactatcctaagcatgttatggacattgtatcatttagtccttacagaattgtattgagtacttcagactttaaaaccaaatcactttgactccaatttagccattgtactaaccatactgtgatcaggtaacttctgaggtatagaaattcatgtgttaaacatctgagggattcttaaattttgatggatgctggagatatagtggtgagcaaagggagacagaacctcagatctcatgccacttacaacattttgaagtacatagacattaatacaataaatacatatttacagactgaggtcagtactatgaagatgagttctgagatcctttaataaaagcaagtttctggtccaggcacagtggctcatgcctgtaattctagcaattttggaggctaaggtgggaggatcgcctgaggccaggagtttgagaccagcctgggcaatatagtgagaccctgctgctacacaaatttaaaaaaaaacccattagctgggaatgatgatgcacacctctagtcctagctactcaggaggctgaggcaggaggatcgtttgggcccaggagtttaaggctacaagtgagctatgattgggccactgtactccagcctgggcaatagagtgagactccatctcaaaaaaaaaaacaaaaaccagtaaaagcaagtttttattgttgaagagcaatggtatgcttacaaactgaaagaagggcaacaaggttatagcacagaaaacaaaaagaagagtggtgtgagattaggctggaaagatatgcatgggccagactagcaaggccttggaaggtgatgttttattctacttcctaagggaagctatcgaaaagtttttaacagatattatgttaaggttttctttttggaaatatcattgtagttaaaatatggacattgtagacatgccatagtggctatggggagactcttaggaagctgttgaaataaccaaacaaaaaagatggactaaggtattggcaaaagttttttcagaaatggagagaaatagacttgaaagatggttacaggataaaatcaacaggacttggtgagaaaattgattaccagggggttggggagaaggcattgttaagaatggtgaaaagatttcctacttgcctatctgtgtgtatgatgatgctatttattaagggtacagaacattaataggaagggggacacatttggtggtaaaactcattagttagcttttgccgaatttgagatatgtttgagacatccaagtttggaatgttgagaaagatgtacaggttgaacatccctaatctgaaaatccaaaatcagaaatgctccaaaatctgamgctttttgaatgcctataagatgcttgaaggtcatgctcaaaggaaatgctcatttggagcatttcagattttggatatttggattagcgttgctcagccagtgtaatggaattatgttattctaaattctgaaatatgaaacacttctgatctcaagcatttcagatcaggatactcaacctgtattagattggatcacacagaactccaggccagagataagaatgttcaaggaatgggcaaatatatggtaattgatgtaatggttaagaatgccttgtgagagggagtgagaagagaagaaggcctagaagttgaggaactccaatattaactggccaaactgaagaggataacctacaaaggatatagtagaaggattctttcactcatttatttatttattcaacagatatttatcaagtgcctattatataccaggcacaaatatggaatccagggatatagcagggataagatagtcaagatctttgctgtcatggaacctaaactgtagtagaaagtacgtaaataaacataaatactttagataggtacaggtactaaaaggaaatagaaaaggattatgtgactgaggaagggaagactagaagaggaacaaggcttttgaggaaaatcaagaacttccttctttttagccatgctacttttgaggtatctatatccaaatccaagtgattaataggggctgctgcatgctagtaaatagcaccaccattcacccaaattggcaggctcaaacttccagcagcttttttctttctttcgttctttctttctctttctttttctttctttctttttctttctttctttctttctctttctttctttctttctttttctttctttctttctttcttctttctcctctctctttctcctttcttccttccttccttccttgcttccttctttctctttttcttttcccttccttccttccttccctccctccacccctccctcctttcctccctctgtccccctttccctttccctccccctcccccttcccttccccctccttctccccttcccttcccctcccctcccctctccctcctcctgcctattctctcccctctccctccctcccccttccctcccctcccctctcctgttctctcctctcctttcctttcctttttctctctctctttcttatactccatattcagtccattagcagctcctgactactccatctttaacatttgtgctcaatatgattacttcaattatatgcactatttctttactctaagccaccattttctcttgcctagactattggagtaacctctgttctgatctcccagcttccaatcttgtccccatataatctggtattcacattgcagcccgaatgatcttttaaaaaccaaaattatttgatcatatgctccagttgtttcctataatatcgacacagtttaccatggcaataatgctctatatgatctagtcacttttttgactgcattttggaatgctctttccctctacttcagcttcactggccaagactccgctattccttgaagatatcagtattattccagacttcagggcatttgcatttgctgttttttcacttggaatgctcttcccccatattttcacttagcttgctccctcacttcataccagtctctgttcagctgtgatcttatgaaagaggttttccctgaccaccctatataaataagccttctttgacacctgcctatcattctgtattcccttagcccatttttatttttcttcatttcacttatcatctaatatgttcttgtttattattttttctttccctctagaatgcaaagaccttgtctgtcttattaatgtctgcatcccaacagccaagaataatgcctggtatataatatgtgggttccataaacatttttttttagtgaatgaatgaatgaatatataagtctggagctcagaggagatttcagtgctgaaatgtaaatttagtagtcaatagcatataaatggtcatttacactgtaggactggatgaaattatcaagagatagtatggagccaaaccagaaaagggacccagattcaagcctttcgctgatttttcatttataaatcagattagaaggacccaacaagttaggaggaaaaccaggagagacatatcattgaaactaagagaggaaatgttctaaggacacagctttgttggataatgcttacaggctggattaagatgtgtttgtaaattaaccattggatttgcaaagatgaagattgttttgtggcttttaagagttatttcagtggagtggttggggtagaaatcagactggagtatgacaggtgaggtagggagagtgaagtagactcctttgagaagtcttgctgtgaagaacagagaattgaatgatcattgaacggaggaaatgtaatcaaggaaggacttaagtattcccccagagttttctgaatttgcaattcattcatcttgattatctccccttgaggtctagctgtcatcagttaactggaggattgattcataatccctttttgcaaggtggcaaagcttacctttctcctcaaacctatctaccaaagttctctttcttctttaatttcattagagtccttggtaaatgattcacatttctttttgttataactcttcagtaaattaagcctttgcctttcttgctgattttaccgtattatataactatcatagatgatttcaaatgttaatagtgatagaaactgtaataatataatactaacatgtattgatatttactatgtggggtcttttgaagaaatttacatttttttaacttaatattcaaaacaaccatgggaggcaggtgctattattatcctcagtagaggatctaaggatctgaggttcagagggcttaggtaatttcctcaagatcatatagttcataagtggctacaggtatgattgtagagcttttgctgttagccaccatgctattctgtctttaagttaacaaagtaaatgtttcatcttctaattatgttaaactaatatgcctttggtgaattgttttggtaaagttaatacttctttttctccacttttatatctgttatgtgaatttatgtcttagactggattattggtaactctattatttttacaataatcaaatgttagggctagatgggacatttaattacataatgaatggaataaaaatctgctaatcagatagatctgttttctaaactgcattttttctcctttgtcttttttggcctaccctgttggctgtgaactttattttaaaattcatttgtgcttataacaataataagcactatttattccttgagtggttttacaaaccttaacaaggcttaccatttccagagtgtcagagtagctatagcaggtttacacttaaatatactcttggttttatgacattccattttgacagtgatgaagagcatgcttataggcatcgttgaaaaggaatgttagaactgtttatgtgatagttctacaagtttcttacatttatctattatagaaagatctatcatacatgcttacttttcacagagtttataatatatgcatatgttttaatggtttgttataaataatatgattagctggcaaaagcttttagcaatttaaattttggggttattttaaattatgaatttaaacaagctctttcatttcaggtggttggctaaacccactgtggctgatagtgttatataaagttgttttctagttttgaaaagctaaaagtttatgtttttatgctttctgtgaaagtcactaatacttgtaacctaatgaaaatgtttctactgctacaattgtggagaaattttgaaaacctagatttagtcagtatttttcatgctaacattgtaaagaatgtcagaggccatggagaggatctaagggaatcagagaaaaggaagaggaagtaacatttttagagtacattttatgttctaggcaactcagtaatagggcagtatatcatttcattctcacagaagtctttcgaggtattataatttcccttttacagatgaggaaactgaggttgcagaggttaattatgttgataaagatcatatagataagtagaactaggattgaaatctagatctacttgatacttaagcttcctcttacacttgttttatggagttgttcttgggccttcttaaacaggtaattattctatgtcatagcagaattcttgatagaattatgatatttaaatttttatttactcagctatcataaacataaaaatactatactactatataagcttgcaggtcttttgaatataaaaactaaactgcatgttgactcatttatcagagttctgtagaataattaaaagtaattataggaggtcttttttaagtgtatgtagtcatttgtattatttgaaagcttagacagcttttatagcagtttgcttccagaccatgctcattgatgcattgaagagatacccgtgaaccaccttgtctactcccatacagctgatttatctttgtagcagtccctgagttagagaatcttccctactacctctgctatagttttcagtaaattgggcaagatcaaatgtttcctggagataatttccttagctcttgtattagatcccaacagtaaatacattattgactgatgtgaacacagaaagcatctcaaactttttgttgatcagagcatagctcagttgttttaggaattccagataaaatgacagtaatgtattgtgattatttccttcttttgaaatgaacttgaatatacttttatgtttatttgtaaaataacatttcaaagatcacattgtgcttatttttacagtggcctctggctgaaagcaataaagttctgtcctgggtggaactaggctagttgcagtttctcaaatttcttcaatgagatgctttgcttttgtgaaaataagtcatattgtccactgccacctttgtttacttctccattttatcccctcttggttacagaaattagctactacaaataaaatgccaagattttataattttctatgtttaaatttgcaagtaaaaagttctgttgaaacatttgtaagatcaaactaatgtgagataaatatgactgatattcagaagttgattaatctaactttcagtactgtacctattacataaagtatgattaatctctatgtgcaagtatataaacaaattttgagtataaaatcataatctaaaattttgttttatatttaatggagtgttcaaatactttgtaataaaaacaatggatgactaaaatgattgaataagttatcaaatagagctttgtaaactagggttcatagttgcaaataatagaaatcaactctggatattttaagaactaaaaaaaaaattgaaacgttactgagaagcttacagaatcactgagagggttgtagaactaggctcaataaaaggatcagaataggagaggttaggcagcaaataggaccacaaccaaaatcacagcacatcagtctggtgaatacatgcatggctaccaccaaaaatgaacactcacttgcccctcacgttagccaatgaatgctgtctcttccactgctatctaagaacctcgatgttgctaccatcagtttccagaatggattctctgatactcccctctgcatcattatctcccagtttaaagatgggtgtttctgagtagctgacctaaggtcacatactaatactgtaactacaagaatagttgggaaagtgaggattggatattttcagattgtgtggagaactaagctctgtggtctatcaacactcctcaggtaggtaatttctaagtgtaggaaagttcagatgttgggtggccaaaaatgtacagatatccactacatttccttgtgatagcatctaagttctttccatttcattcttttataaattcttttaacattattgttgcataagagaaaaaggcataaattattttaaaattttagattcagagacttggttggacacatgatattactctggatgttcttagacgtttcaggccatttcaaccttattttagttattactttaacaagtttctgcaaagttgtggttgtattaatagcaaacatactaatagtgctatttgagcattatcagatatcataaacatagtattctatcccttcttctgaaagatatatcaacatttccctagatatatccttatctttgtactcactttggagaatgagctctaaaagtataatggaaggaacaaaaactttagagccagatttgggatcagatgtgacctctgtcactctgtcatcatcatttggtatctaacattagcagttattctcattttagatatgataaaactgaatcatagagaggttaagtagctcaagacttttaaattaaacatgaacgattaaacattaaaaagtatccagaaaaattaacttactttttttctaaatgtagtataaatatttttagtgcatctcaagtatgcagtgacttagatacccatattccaattacagatgtctaattttttaacttacatacaggaacaggtaatcatgttagatcagtttgtctcagttccttgtgttttatgtttagaatgttggggatattttgttcatattctaaataactatttgttatacccttccaccatcatttaatatgttaaagttttaaagcattttactttgatttttttttttttttttttttgagacagagtcttgctctgttgcccaggctggagtgcagtggcactatctcggctcactgcaagttccgcgtcccgagttcacgccattctcctgcctcagcctcccgagtagctgggactgcaggtgcccgccaccacacccggctacttttttgtatttttagtagagacggggtttcatcgtgttagccaggatggtctcgatctcctgacctcgtgatctgcccacttcagcctcccaaagtgctgagattacaggtgtgagccaccacgcctggcctttactttgattttttaaccttacaacaccccttgtacttgtataatgtcatttttacagatgtgggaaattaggaatatagattaaaaatgacatagttataaggctatagtttagttctcacagagaaactcagtcatataagttaagcgtttttgttcccaaatgatagtcatagtagtaaaagaaatttttaaatttcacttatttattcagaaagtgcttactgagcgcctagtgtgttctgtgcactgacttaagtgctggagatacctaagtaaatcagacgatttctgctgtcatggagcttatacacttatagagggaagtagaaaataaatgtaaaaaatattttcaccttttgataagtaagtgctgtggaggaaaattaagcaaggaagggtaaaggggaattctaggggttaggaaaggggagttataattttaaacagaattattgaggaagacatcactaggaaggtgacatctgagcaacaaaagacctaaaggaggtatgggaaggagacatgcggatgtcttggagaagaacattataggtagagagaagagcgaaagtccaaggccctgagaatgcagcatgtctgacacgttcaaggtgaggcaaggtgcaggtggggggcagtatgttgaaagcaaggtaagcaaagggaagagtaaaaggaaatgagatgaaaataatgaaaaagcatacgaaagcaagtgattttttcttgggtctagatttcatactggtacctaactttgcttaatttttctgttgttaataggagctgttaatgcccagtcaatatatcagagaatggagtttgagcaactatagtttaatgaggcaattaaattgagaaccgtggctttagactagttcaatatgaagaacagattaaatgtactctgaggaactgccttttaattatagatttttgagattcattttagtgtcatttttttcatggttaaacaacatggagaggaaagtaatgatcttataaaatagaagtgttcaagataacttactaggatggatcatctgtgtttgccaaatcaaacagggcaatttaaaatacagttgttccttggtatacatgggagattggttccaggactcttgagtatatccaaatctgcacatactcaggtcctacattagaccctgcagaacccacgtatacaagtttcacatcctgaacttactgtattttcagcccgtgtttggttgaagaaaagccatgtatataagtggacttctacagttcaaacctgtgttgttcaagagtcaactgtgtatcaggttagcatataaacctgttttgttttgcctaccataaaacactgatctttagattgatacaattgctgttttattcattggttcatatacacctaatgagattgctattttaattttcattgttaagacacacttaaattcctaatacttaaaaacgtatatgaaaaatttattttcacaaatcgatatacctattttttgaacagtagtatgcatattgctttacaaaatgacagtgtaaaaatggcattcagattcccgtttctaagatgcttgaacattttgatttttactcattagaagtttaattgttattagtcaacaaggagaaacaatgaggaacttacagaggagtgtcagttgtattgaaagattaggagtgaatgttttatcttgtaaaaagatatctcagcccctaggatggtctacagaaatgacaataagctccgattcttattttaattttttattttttctgtttctctgtctcctgtcttttcctgcgcattctctcttttactcccaacctctcttgtttatttctttggatccgtcaaagttggaaattgaacagtatttctgatatattatgtagtatgagttctgaaatcttggtgaattaaattcatgaatgctaccatagtgattttattaaggtgtggcttttgattacatgttcttcaagctagggttatgggagtcagctagtaggtaggcttagtttgattgtcctactttaacatttgtttttccttcttgaaataactttcatgaagttagatacaggcttttgtacaggatcattttgtgggaaatggtgggtctgaaaagtaagccattggtattgataaaagcagagagaaaatgaaaaagaaaaaaggtaggaaagatgtgccttttagccaataaatagaagtttaaaagacatgaaagaatgagatgtaatttttttaggagctctaatttagccatgaacacagccaccattactctgcagaaagggaaaaaaaggggattctgtttcagaatttgctgtattaaaaactatttgagaaagagaacactttattgaaaattgaaaattattggctaacattcagtgtgagggtatgtcgaagtaccatccgactaaaaacaaattaagtgtagtcgtgagtcaaacatattgtttcttccaaaatttaaattaaattagtttcatatgagtgttttctttttttcttgagacagggtcttgatctgctgcccaggctggagtgcagtggcatgatcacagctcactgtagctttggcctcccaggctcaagtgatcctcccacttcagcctcctgagtagctgttactacaggcatatgccactacacttggctaatttttaatttttttgtacaattgggggtcccactgtgtttcccaggctggtctggaactcctgggctcaagcgcctccagcctccagctcccaaagtgctgggtttacaggcatgagccactgcacccagccaattttatgtgttgataacaatcttgctgaacttactgtttcttataacttataggttgttcttcttgggattaccaagtaaatgtcctttgcagtagtgacactttttctttcttttcaatctaagattttgcttttttctctgattgtgtaaagttagcacttctaaaacaatactctcagcatgtattgcatgattacatactttttcttcttatattaataatatgaagtatattaattgaatgctcaatattgaattaatcttgaacttctggaatatgtcatataattctattcttttaaatgagttattatgaaaaattttaaccatacagaaaagttgaaatttattcggtggaaatctgtatatcctctgtcttaatttaacaattaacattttgctatatctcctctttttttttgttagaccacttgaagctgtttttgagaatacagattccaatacaaccacaaaaaccttaccacatctaagaaaattaatactgattctatcttatgtaatatctgttctttatttaagtttcccgaaatatccccaaaatatcttttatagctttcatttttttccaaaccaggcaaggtttatacattcattgcatgcggttatgtctctttcatctctttcaatctagaatagcccaccccatcatcttttcttctgttggacagttatactaatatgcagagatgatgtcatatttttcactacagaaaaagcactcataaatatgtataaatgtatatcgatcataatgcttgagaaggaatgggcattggacccatacctctgcactctggcttgaaggaagatgaaaagtttctagatacaacagaggaaatgataatatagagaagtccaggaggtacaaagtctgtgtgacaaagatagaaagtagaggaatgtgatacaaagggagaaataaaacctttgaatcttggagctatataataaatgttaagattcttcatactgaggttgtgaagcaggacaatagtgaagaggaatactgaagaaattataggagttttaaaaatgattacaagatatatcctatatagagagaatattacaatttctggtgaaaactatcaaatataaggggatattctccagaacgaaaaggtgaaagaaaacacctcattggcactatgtagaagaaatgggttgtaattatccaccactgcacctgccagccacgaatggctgtttaaacttcagttaaactagttaaaattacataaaataaaaaatctagtccctcagtcacactgaccacatttcaagtgctcaatagctatacatagctagtggctccatattagagtgttttcatcatcgaaaaaagtttaactggccatcactgcaatagattcaatataaaggtatgctggcttttagggtacacattcaaggtttggtagggagcctattaaaactgatcaaaatccttgattgttatttagtctggatgaatcacataggggataatgacagtgaggaagagaacacggaagcatatttagagtcctcacaaaaaatctggatgtgctgggaataataggttgtgtgtgtgtgtgtgtgtgtgtgtgtgtgtgtgtgtgtgtgtgactccttattgttgattgacacagtggaacaatgaaggaagatagtagaagacaagtaatctagttttacctgtgctcttctctcttgcaaggtagaaggctaagcctttgatccaggctggaggccctgaaactgggattgataggatgggcttattactgtggccctgaactgaagcccagttgagggcggcctgggaagcaaggcatgaacacagccttgataaacaaaatgagtaaaggatgcacagttaagagccaaaaagagaatagcctgaacgtgtagaaggaaactaaagctacaagggagttaaaagctggttgaagtgagtgttttgggggttttctgtgaattaataattttgaagaggaaacagccctggtgcgtggggcacattttcgtagagaacacaaagaaaagaaaacctctttggtacatattttctttcagtatttttgggcaaggagaatgatgtactttttactgacaagagtataactaaagttgccattaacagaaataaagcccagttatcataaaggaactgaagtccaagattaaagaagattatagaaaagtacttgattgattgttcataaacatattcaaatatcccaatacagatgaattttgtcctagggtattgagataacttacaaaggagattagcaaacagactatatatttttttaagacactatagagaaggagagaggttctggaatactggagatagatacatgccattctgattttcagaagggagaaatgaaggttccacaaacaataaatcaattggtttgacattgaccttagaaaagattaaaggggtgggttttgatcatctgagagagatagtagtggtcactaagaaaagattaaagaagtgggttctgaacacccaagagaggtagtagtggtcattaggagttagtatgggctcatggtgcataattgtgacagattgacttttcaagtccaccatgtactagctgtgcaacattgagtaatttgcttcatctatctgggtctcagctttcttatctttaaaatgaaaataaaaataatatctattacataggctcgtaataaagaataaatgaatttacatttgtaaaacatttagaacgaaatgtgatacataaaaagcacaatgtcagtgatagataaatagctagagagagaccaacaggctgccttctttttttttttttgagatggaatctcgctctttcacccaggctggactgcagtggtgcaatcttggctcactgcaatctcggcctcccgggttcacgctgttctcctgcctcagcctcctgagtagctgggactacaggcaggcgccctgccactatgcccagctaattttttgtgtttttagtagagacagggtttcactgtgttagccaggatggtctcgatcttctgacctcgtgatccgccagccttggcctcccaaagtgctgggattacaggcgtgagccactgcatccggccacaggctgccttctttaatcaaacttgtagctccgtgaaatgaaacagctaatgtgcaaagattgtagcagctcttctttaaaaaaattgaggtgaaatttgcatagcctaaaattaaccattttttttattattatactttaagttttagggtacacatgcacaatgtgcaggttagttacatatgtatacatgtgccatgctggtgtgctgcacccattaactcctcatttagcattagttatatctcctaatgctatcccttccccctccccccaccccacaacagtccccagagtgtgatgttccccttcctgtgtccatgtgttctcattgttcaattcccatctatgagtgagaacatgcggtgtttggttttttgtccttggggtagtttactgagaatgatgatttccaatttcatccatgtgcctgcaaaggacatgaactcatcattttttaaggctgcatagtattccatggtgtatatgtgccacattttcttaatccagtctatcattgttgaacatttgggttggttccaagtctttgctattgtgaatagggccacaataaacatacgtgtgcatgtgtctttatagcagcatgatttatagtcctttgggtatatacccagtagtgggatggctgggtcaaatggtatttctagttctagatccctgaggaatcgccacactgacttccacaatggttgaactaatttatactcccaccaacagtgtaaaagtgttcctatttctacacatcctctgcagcatctgttgtttcctgactttttagtgatcgccattctaactggcgtgagatggtatctcattgtggttttgatttgcatttctctaatgaccagtgatgatgagctttctgtcatatgtctgttggctgcataaatgtcttcttttgagaagtgtctgttcatatcctttgcccactttttgatgggttgttttttcttgtaaatttgtttaagttctttgtagattctgaatattagccctttgttagatggatagattgcaaaaattttctcccattctctaggttgacttttcacttcttttgctgtgcagaagctcttgagtttaattagatcccatttgtcaattttggcttttgttgccattgctttttgtattttagtcatgaagtctttgcccatgcctatgtcctgaatggtattgcctaggttttcttctagggtttttatggttttaggtcttacgcttaagtctttaatccatcttgagttaatttttgtataaggtgtaagaaaggggtccagtttcagttttctccatatggctagccagttttcccaacaccatttattaaacaggatatcctttccccattgcttgtttttgccaggtttgtcaaagaccagatggttgcagatatatggtattatttctgaggctcctgctctgttccattggtcgatatctctgttttggtactagtaccatgctgttttggttactgtagccttgtaatatagtttgaagtcaggtagtgtgatgcctccagctttgttctttttgcttaggattgacttggctatgcaggcccttttttgggtttcatgtgaaatttaaagtagttttctctaattctgtgaagaaagtcaatggtagcttgatggggatagcactgaatctataaattaccttggacagtatggcccttttcacaatattgattcttcctaaccatgagcgtggaatgtgtttccatttgtttgtgtcctctcttatttccttgagcagtggtttgtagttttccttgaagaggtccttcacatcccttgtaagttggattcctaggtattttattctctttgtaacaattgtgaatggcagttcactcatgatttggctctctgtttgcctcttattggtatataggaatccttgtgatttttgcacactgactttgtatcctgagacttgcagaagttgcttatcagcttaaggagattttgggctgagatgatgggtttttctagatatggaatcatgtcatctacaaacagagacaatttgacttcctttcttcctatttgaataccctctatttctttctcttgcgtgattgccctggccagaacttccaatactttgttgactaggagtgctgagagagggcatccttgtcttgtgctggttttcaaatggaatgcttccagtttttgcccattcagtatgatattggctctgggtttgtcataaatagctcttattattttgagatacgttccatcgacacctagctcattgagagtttttagcatgaaggggtgttgaattttgtcgaaggccttttgtgcatctgttgagataatcatgtggtttttgtcattggttctgcttatgtgatggattacatttattgatttgtgtatgttgaactagccttgcatcccagggttgaagctggcttgattgtggtggataagctttttgatgtcctgctggattcggtttgccagtattttattgagaatttttgcatcgatgttcattaggtatattggccaaattttcttgttttgttgtgtctctgccaggttttggtatctggatgatgctaaactcataaaatgagttagggaggatttcctttttttctattgattggaatagtttcagaaggaatggcaccaactcatctttgtatctctggtagaattgggctgtgaatctgtctggtcctggactttttttggttggtaggctattaattactgcttcaatttcagaacttgttattggtctattcaaggatttgacttcttcctggtttagacttgggagggtgtatgtgtccgggaatttatccatttcttctagattttctagtttatttgcatagagatgtttatagtactctctgatggtagtttgtatttccatgggatcaggggtgatatcccctgtatcattttttattgagtctatttgattcttctctcttttcatctttattagtctggctagcggtctgtctattttggtaatgttttcaaaaaaccagctcctggattcactgattttttgaaagattttttgtgtctctatctccttcagttctgctctgatcttagttatttctggtcttctgctagcatttgaatttgtttgctcttgcttctctagtacttttaattgtgatgttagtgcatcgattgtagatcttttctgctttctcttgtaggcatttagtctgtaaattcctctctaaacactgctttggttctgtgccagagattctgatatgtagtgtctttgttctcattggtttcaaagaatttattcatttctgccttaatttccttatttacacagtagtcattcaggagcaggttgttcagtttccatgtagttgtgcggttttgagtgagtttcttaatcctaagttctaatttgattgcactgtggcctgagaaactgtttgttatgatttccattcttattcattttctgcagagtgttttacttccaattatatggtcaattttagaataaatgcgatgtggtgctgagaagaatgtatattccgttgatttggggtggggagttctgtagatgtgtattaggtctgcttggtccagagctgagttcaagtcttgaatttccttgttgattttctatcgtattgatctgtctaatattgtcagtggggtgttacagtctcccactattactgtgtcggagtctaagtctctttgtaggcctctaagacttggtattatgaatctgggtgctcgtgtattggctgcatatatatttaggatagttagctctttttgttgcattgatctgtttaccattatgtaatgcccttctttgtgtcttttgagctttgttggtttaaagtccgttttatcagagactaggattgcattttttttgctttccatttgcttggtaaatattctgctatctttttttgagcctatgtgtttttgcatatgagatgggtctcctgaatacagcacatcaatgggtcttgactctttattcaatttgccagtccatgtcttttacttggggcatttagcccatttacatttaaggttaatattgttatgtgtgaatttgatcctgtcattatgatgctagctggttgttttgcctgttagttgatgcagtttcttcatagtgtcgatggtctttacaatttggtatgtttttgcagtggctggtactggttgttcctttccatgtttagtgcttcctttaggagctcttgtaaggcaggcctggtgatgacaaaatctctcagcatttgcttgtctgtaaaggattttatttttcctttgtttatcaagctttagtttgactggatatgaaattctgagttgaaaattcttttctttaagaatgttgaatattggcccctactttcttctggcttgtagagtttctgccgagagatccgctgttagtctgatgggcttccctttgtgagtaacccaacctttctctctggctgccttatcattttttccttcatttcagccttggtgaatctgacaattatgtgtcttggggttgtgcttcttgaggagtatctttgtggtgttctctgtatttcctgaatttgaatgttggcctgccttattaggttcaggaagttctcctggataatatcctgaagagtgttttccaacttggttccattctccctgtcactttcaggtgcacaaatcaaacgcaatttggtcttttcacatagtcccatatttcttggaggctttgttcgttccttttcattctgttttctctaatcttcttgctttatttcatcaagttgatcttcaatctctgatatcctttcttccacttgatgagttcagctatcgatacttgtgtatgcttcatgaagttcttgtgctgtgtttttcagctccaccagatcatttatgttcttctctaaactggttattctagttagcaattcatctaaccttttttctaggttcttagcttccttgctttgggttaggacatgctcctttagctcagaatcgtttgttattacccaccttctgaagcctacttctgtctgtcaaactcattctccgtccaattttgttcccttgctggtgaggagttgtgatcctttagaggagaagaggcgttgtgttttttggaattttcagcctttttgtgctggtttctccccatctttgtggatttatctacctttggtctttratgttggtgacctctggatggggtctttgagtggacatgcgatttctttctgcttgttagttttccttctgacagtcaggcccctatgctgcaggtctgctggagtttgctggaggtccactccagaccctgtttgcctgaatgtcaccaggagaggctgcagaacagtaaagattgctgactgttccttcctctggaagctttgtcccagaggggctctcactagatgccagccagagctctcctgtatgaggtgtctgtcaactcctgctgagagatttctccgagtcaggaggcacgggggtcagggacccacttgaggaggcagtctgtcccttagcagagcttgagcgctgtgttgggagatctgctgttctcttcagacctggcagacaggaacgtttgtttgctgaagttgcacccacagctgccccttcccccaggtggtcccagggagatgggagttgtatctctaagcccctgactggggctgctgcctttatttcagagataccctgcccagagaggtggaatctagagaggaagtctggctatagtggctttgccaagatgaagtgggctccacccagtttgaacttcccagcagctttatttatgctgtgaggggaaaaccgcctactcaagtctcagtaatggcagacaccccttcccccaccaagttggagcatcacaggttgacttcagactgctgtgctggcagcaagaatttcaagccaatggatcccagcttgttgggctccatcagggtgggatccactgagmtagaccactgggctccctggcttcaactccctttccagggtagtgaacagttttgtcttgctggtgttccatgtgccactggggtatgaaaagaaactcctgcagctagctcggtgtctgcccaaatggctgcccagttttgtgcttgaaacccaggaccctggtggcgtaggtaccagagggattttcctggtctgcaggttgcaaagactgtgggaaatgcgtactatctgggccgcaatgcaccattcctcacggcacagtccctcatggcttcccttggctaggggagggagttcctcaaccccttgcacttcctgggtgaggagatgccccaccctgcatctgctcgccctctgtgggctggacccactgtctaaccagtcccattgagatgagctgggtacctcagttggaaatacagaaatcactcaccttctgcattgatctctctgggagctgcagaccagagctgttgctattcgaccatcttgccagccactatcaaagagattagttttatattgttgagtgttcttagcacctttgttgaaaatcagttgaccacagatatataggtttatttctcaattctcagttttattccattgatctacatgtctgtctttatgccattaccatgatgttttgattactgtagcttttataatcagttatgcaaccagctatgtgagtcttatactgtttcttttttcctttctattcttttttctttgatttggttattcaatgttcttaaaattctgtatgaattgtaggatcagttttttcatttctgcaaaaaaagtcattgggattttgataggaattgcattgcatttttagtttgctttgggtgatattgccattttcacaatattgtcttccaagtccatgaatgtgaatgtttttccatttagttaggtcttctttactttctttcagcaatgttttgtagttttcattgtcaaagttttgtactgccttgattaagtttattaccaagtattttattatttttgatgccattgtaaattctgttgtaaagatggattatttcatctatatctcccatctcagttctttctcttaagatcccaatgtgcatacacagagaataaaataaattgagtagtagatttagttctaagcatcctgaaaggctggcaaaaaggaaatgagatagggaagcagggtcagtgtatgtgactttctaataaaagagaagaacttttttctggaactcaactctaggagaaaattattatgagaacttttgcattagggacatgaaataacattataaggataattttaatgttttataggaaacatatttttaatattgacaatgaataaaagcccaggggatagggttataatttagctcagtcatatagtataattgttctttaagtgtttatcctttttgttaatttataagctctgtgaaaatagcttttttgtttttttgtttttattttatagagacagggtctctctatgttgcccaggctggtcttgaactcctgagatcaagcgatcctcccacctcggcctcccaaagcactgggattataggcgtgagccactgcaccagccgaaggtagcttttttggagggagactgtgttttgttcttttcacattccctagagcaagtgcctcacaagctgtttacaaaaataatttttttctgaattctgtaattaaatatctgtgaaatttataaactgactttgaaattttagtggttctttaaaatgttatttcttgattcagagaaagaatactgtatctggataatcacttatttttaaggttttggttttttgcttgagtcttgtttgtgatctaactatattgattaagttattatacatacacacacacagcagatctaatatggcatttttttttaaccacgtacttttcttgttcctgttgtggatcaaccattatttctttgtatttagctacataaaaaaaactatcaagaaatatataaaaatgtacttttagaagtattgatttctgctcaccatcatttgtcaactttaatgttagacagctactagttagctggaattcagtgccaaatgaagtcagaggtggataggaatcttttattatgtatattttttttattttccttctccttttatttttcctcctttcctcgctatactttttcccttcaccattttttttccaccctccctgcctgtgcccatctaaagtacatacaaggattgtttagcctgtttgacaggaaaaggaaaagaattaatgtatattggctggattctcttggaattttgtgagatcagggacctgaatctgaatcaggtaacatccatgatagttattccacatccccatttgctatctgattcagattcaggtccctaataacatagcatccatgatagttattccatatccccatgttctatgttatgttgtccagctcttcccttcaggactgaaagatttatttccccagctgctaggaagattgtccactgacaggtctcatcaggaagccctctcataaaattgttgaaatgtctaacgagagcctgtcttggccaggtgccaccgcactcatgcctgtaatcccctcactttgggaggccaaggcggatggatcacttaaggtcaggagttcgtgaccagcctggccaacatggtgaaaccctgtctctactaaaaatacaaaaattagctgggcgtggtggcattcacctgcaattccagctactcgggaggctgaggcacaagaacccaggaggcggaggttgcagtgagccgagatcgcaccagtgcactccagcctgggtgatggagtgacactctatctcaaaataaaataaaataaaaaataataaaataaagctgtctttaaaaagctaatgccctttttctagggcagctcacattaaatgagttgttgatttgatgctgtaaaggcttcaccctctctcaacccaatttaggacaactctgaagggatgtcttagttgcccttttctagttactagactaggatgttttaaaagctgaggatataaacttacctaaatgtttttgtattcttttgctaatgagaaataatctttcactggtgtcatgttttgagatatttgaaagctatccttaggctcatttagctgtcacttaaaatattaagcattacataaggttaaaaaaatggaatagtggcaagagtatgacccagaaagcatgagtgaggctgaaaagaataygaggatcctttcgatggtaattttggaagatcctatttgaaatagtgaacttaattatgtagaatttcatttccatctctatggctttagtcactgttacaggacatttttgcatcactataaaggaatacctgagactggtaatttataaagaaaagaggtttagttggctcatagttcttcaggctgtacaggaagtgtggtgccagcatctgctcctggcgagtgcctcagtaagcttacaaccatggtggaaggcaaaggcggaggaggtgtgtcatgtggcgagagccagagcaagggttgggggaggtgccatgctcttttaaacaacacaatctttaaaacaacataatcttttaaacaacacagtcatcaccaaggggatgatgctaacccattcatgaaggatccagccccatgatctagtcacctcccagcaggccccaccttcaactttgggaatcacatttcagcatgagatttggagggataaacatccaaaccatatcagtcactctgttttgtttcagagtgaatgatacttacagaatcatagtattgtaaagccctttgatttgccacttttgactagacttacacaacataacacaaatatcaaagcctcaacattgtaaaaaataatataacatgaaagtgagtgagtactaggaagagtaagtgctgtcatgtctttctcccatagagaagacagtcagaagatagcctaaacagaatctgttattcattgtggttgactccaggggatagggacaaagggaagtgtatagttttcattttaagcctttatgtgctgtataaagtttttaaagaagcatatcgtgtgcataatccctaaaaaatcaagcaaccaaaatgtagtggtgatggtgggatgtgtgtgtattgggggagggaaggaggggagaatggcttaaaaattaattcatttaaaatatttcttattttttaacttccatattttgaatcaaatgatttgcaaaaataatggattgttttataaacgcatgtaatatacatatttaagtagcaggtatttcataaataccttgttatagaagtgcacacatttctgtgtttcagaattcaaaagcccctttgaagaaatagtcactatttgacttaccacatacgtaatgacaagaaatttacaagtataattagatttttagtgattaaattgtgcatataataattttaccaacatagtatagcatttcctttagcatttattatattgtaaatgagtgttataagcgagttataacctaaattctttaatgtaacctagttctttaacataatctaaatggtttaacataggcataggcctataatattagtaagaatagatcatatggtttagaattattttaaaatgttgaggattacttcagatcttattactgtaattccctatttgtgatgggtagccgttctgtgacctattaattgttctcttggatatgtagctgtttatgtttcagattggctgcagctgttttgatttgaggcagatggcctgaagaagcagcattcataaattaaatcacaattttttttctatgtatttttaaatcattctcagaaacctgaagtcttttcagtacagagttaatttcaaattcataatattctttgaattttcacataatatattaacttgatttttgtataacaatattcttttcatttttgtgaaatacataattgctaacttattttaacatagacatgagctaaagagaccctaattatatttttacacaaaccttatacaattatttaaattctgacccaaatagcagaatggttattacactgattctttaatcatttcaaaataggaacaattatttccaatggaattctcactttctaacttatttagttctctttttcattcattatggttttggaaagtatctgagacagctacatttattaactacactatagttaaggtaaaaagataatggtctttctcgtcattgttgaaatacccatactaaaatgatactattaaaaaaagagctaacttccttttaaggagtggtctatagcctttctcttttctttcttttttttttttttttgagacagagtttcgctcttttgcccaggctggagtgcagtggcgcagtcttggctcactgcagcttccgccgcctgggttcatgtgattctcatgcttcagcctcccaagtagctgggattacaggtatgtaccaccatgcctgtctaatttttgtctttttagtagattcggggttttgccatgttgctcaggctggtgtcaaactcttggcctcaagtgatgcacctgcctcggcttcccaaagtgctgggattacaagcgtgagccatccacgcctggccaagaactttctatttttgtataaaactttttttttaaacatagattggtacatatgtaaatgaaaagtaatattcatgtagaaagagaagtgaagatcatctagtctggcctttcagtgcttgaatttccttaaacacattaactaaatagtaagctagcttatgcaggtactgatccaatgatgagtaactctatacctctgaagataatacattccatctttggatagcattgactagtgaaaagcaaatagttatactgaatcaaagtcagcttccttgtctttctttttgtttttaacctgttggccctagattctttggggctacacagaacggtttaagcagtcttccttatgacaatcataaaatatttgaggacagcttttatgactccacaatctctcttaccattcctgaagtttcttctctaaataaatacttttggttccttcagccattcttcatatgtcacaaaggccttctctgttattcagaatatactgcagatggtctctactaggagcagaatccatgaataggattcaggaaacccatggattttgatattagtcagggttgtccagaaaaatagaaccaataggaggatatttacacatgcacatcctcctatatcccataaatatatatatatttatttatatatatttaaaatttatatatttatagatttaaaataaatatatcccatatatatatatatgtatctttgtggaagctgagaagtcccaagatctgcatttagcaagctggagaccttggagagccagtagtgtaagttccaatctgaaagctggtcagcttgagacccaagaagagaggatgtttcagtccagttctaaagctggaaaacaccagtgttgtagctcaagctgtcaggcaggaagaattcctcctattcagccttttggttctatttaattgattgaatgaggtccaccagcagtagggaaagcaatctgctttactcagtgtactgcttcaaatgttaatctcatccagaaataccctcctagatacatacagaatagaataatgtttggccaaatgtatgggcaccttgaaactcagtcaagttaacacataaaattaactatcacaaatatgaaaaatttgtatccttatatttactaacttctgaatgagagtttatgattatttcaaatcataaatttgaaaatttatgattgtaagcaacagaccactatagcaaaactgtggcttcacaacagtagaaatcacagataactttatatccactatagttgttgcagatatttggaaatattgacattcattggttcttaatgtgaatattatatataatttcctaattataagaacatatattattgaatcatgtttattttaataatatttataatgtagatatgatataaattttattgactgattggttttctctgttttcttatgcattaaattttatgcttttaagaatattattttgaaaaggatccataggctttactagactgcaaaaggggtccattgttcaagaagtggttaagaacctttggtctatactttttctaaaagtgtaattttagaaaggaatacattttatgggtgtggcccattaacactgacataggagtagagattattatctccctgcatctacataaaataaaccaagatctcattcattttttttaggcagccagactgatcacactagttggaattagtccatcttttgattctagcctggtcttttcagaatcactctgttagtgtgttccctgttctacgtttctgtcatttacaaatacaataggcatgttgtctatatcacagattaccaaacctggctgctcatcagaatcatctgaggagttttaaaaaatagatttttagttcctccctcacatttagtcagaaacattgtgcacctggtgattatgcaagctgcctggcactgttctgtgaattcatatttggaaatcccattttttatataatttatgtcatttatagtaatatttttaaaaatgttatagaagttagaattttgtagtgttgcacttgctaagtctttccaggttgacctgcagcaccctggaggttccaatgattattactttatatcattactgtaattcattcttttctgttttgaatcagtttgtttcaagaaattgagtgcatctacctaatttctctgatacgccatctaataataaatcttggcaaaaaaggaaattgtcactcatttttctagtgagttgatataaacttatactaatcactacctcttcacctgatttgtcataaattattccttaaaacttgtttgtaatcagttgatatcagccgtattgttttggtttaagtttccctaaaagtcaagcatgaaacaaggacagtagtttatttgggaagtgatcccacaaagtgggaataaggaagtggtcaagagtgagacagggaagaaggaaatgccaatataagactatagtattgtagtggtagttttgacagcagaaactagattctgctgtgacatcctgaaaagtgttcagaaagcttcctaractttctatctgaaagataggcaacgagatttatctatcagctcttgttctttattggtcaaagattccctccatcccttaacctgggaaagttaactcacccatatttccaggctgcccttgctaacaggctgagtgggacattgtagtgccagtgaaaatcctgggacagaaagtggaaagatggtgaatgcatctttgaagtggcagtctgttaatgtgaggtaaatcttttcaggaaggttcaccacaagtatgacaaaaagtggactgagggactgtgacatgggttatcagtggtacttgctacactcatcttctgtattctaagaaatctacttttttatttttataaatcaattacatttgtttgtttctaagagtctttaaaggttaccaataacctcatgtgctagttctctcagtatcctgtgactataattcattctgactaagaacttggagtgacttacctgtcttgggctttagttctggcattacaatgtttgttcagaccttttcagtttctgacagagaaaactgggacaatctaggagttaaagagttttactttctctttagtggtattatactatcttctgaaataaggctttgttgttgttgttgttctatcttggtttaatctatcaaagaaaagaaaaagaaagaaaattccttttgttgtctcttgaactttgcaagccataggtaattttgaggtttgggttttttgagttcactggttaaattctttaatttcttttcccagctctcttctaaagttcctccctccttcaagttttatgctatggagtcatggctgtcttttctgtgagaacgttgaaatgttttattaaattttaaggagatccattgaatatatctagactttttctttatttgtggccatcacaaactctgagctgacatggtcactccttgcattttctccttgattctgataagccctggaatccttcatttaggtattacttgtctttgtacaagtcaaaggctactgttattcagtcacttttgtcctcctgccccattcttaatcttttttcttttgccttacccctcttttccacttcttctaaaagttatctagtattctagtataatctgttgacttttgctttctaaactatctactgtttgctctcatttattccattgctttgggatgcttattcagtgaccatagctaaactgataaactacttagtcttcaggtattaaggaatgatagtgtgtggaagtggtaagataacatrtttgtgttttgtcaggagtctaggatccctgtttttcccctttgtttccctattcaccatccattggatcataggaaaaattaactgttaatgtaagtgaaaagtaacttagttctttggagggagagatataaaagttttgactcaggtgattttacaattacaagcatattttcagtatagatccttttgagtgccttccatgaaccacatactttattagtcaccgaggataaagaaggccaggaatattgttatcaaagaatctaataaaagagatggagatgtaaacaaatacttgaattttaatgtcgaagttaaattgaatgccctaaatgatggatatatttttttatgaaatatcttctgtaataacatgatgttctgataattcttgggtttataaattgaatcatttggtgtgtgaagttgacatattattctcagatgccaattctgatttctccatgctgaaaattacgatggtaagaatccaatagctttgatttccttaggtaaatattaggctaaacatccagtgctgtatcttcagtattttctaccaggcagaagaattgttatttttatgcctctgtgtttaaatgatagaagtaagatactttaattgaaaagagaataaaaaacaaagtatcccttttagaggatgaaaggggagcaggaactccccaggtttttaaatattttagtacataaaatatacacaacaacttaaaattgttacttttctgggaaaactgaagcacatgcaggagattttaaaaactccacttgatgttagatgattaaatagtgttttgctttggaaattgaaaagcaagacttgttataaaaatagttcattccataccaataaaatcttattggcttgtttatttttattttgtaataagatagagtgaatgtggaagcttgtgttttaagaacttcttgtcctgtttagattatgttaaataacatacaacattttttaaaacagcttttataaacaactaagactttagacaaaggaatatgagtatgtgatgaggcttgacccaattaggtaggcaaaaactttaaaaaatatttcatggcatagagggagaattagttcactttttattaattacttgttcttttctgagttacatgtatatttatgggaattaaatatttaaataattgggtaatttaatgtgataatctaattttaccagccagtttctttagcattttaattttcactgttccttaactctatataaataaacaaatcaagagaactcattattattaatatcaataatactaacaaatcatgctaacatttcttgagatcaatctctagagtaatatgtaagctctcatgtgtattatctcacttgatgtctcaataacctgagtgtgtagatattattattgctatgttataaacgacattacttaaaagaactctgtagtaaatcctttggaaaaataaatagtgttttggaatgtgagcatgcattcctcaatttatctattttatacatatatacttttgtatatgacaacgttttgttaaatatgctatttctagccaggtgcagtggtgggtgcctttagtcccagctactcaggaggctgaggtgggtggatcgcttgagcccaggagttcaagtccagcctgggcaacattgcaaggctccatctcttttaaaacaaacaaacaaacaaaaacagctatttttaggtctcttcatcctttattatttttatgaatgtcgccattatcttttgtgtctgctcagatttgaactctataggctcttttggctttgctccccttcttctctttcatgccctcttcaaaccaggaagttgcacagtcttggaaggacaatctctgtaatatttctcccattatctgttgtactttttgagctcaggactgagattgaaatttttctgaatgagaagaaccaccctcaaccacgattactgaacactgagtgactttggaagttaacttttgctgcagacttgataaatccatcctaaagttacaaggaataacagtttaaatgcaaaaatcatgttatagtaaaagtcattttgatgacaatgaatgttgtttgagtcacaagtaatgtcaagccactgtatatgtcacatcttgtcaaaagttaaaacaagaagttagatgtccattcccacacaaatttatggcagatacattttctagataaaattatagttctagcagcagttttcaaactaaaatacaagttagggattttccgtatttcaaaatctgtttaactgtgcaatcaaggaacttccaggtaactgtcaactggaaatgattatttacagtgtaatgacctgctaaaagtcaggagaagaatctaatagaattttataaataccttgtaagtgaggaatatacttaaataaaataacgtgcctgtggactggtatcaatatttggcagtgcttgtctgcgtgaaaagacattttcaaaaatgaaatatgtaaaatctcattacagatgaacattaacagataaacgttgattttgatgatagagaacaccagctttgagtcccaattaaaatgaaatactctttccccaaaagaattccattcttctcattggaagacccacattacaaaacattatattcacattattatattttgaattttgtcgataaaaactttatggaaatatatttgtattgtactaggtacctacataataaccttgattttgtctcttgggcattaaagtctaaaatatttactatctgacccttatatacaaagtttgctaactgtgagctaaacaattattcattcttttaagtgagctcatacctatcaaacacagagaaataagtctctactggtagagtttcaactattagtgttgaaaaaataattctacatcattcccagaacagactttagatgattatttactccaacttaacccattttacaattattttacaattaagaatccttattttacaattaagaatccaaggtttaatggaagctaaacattggtataactgaaaatggaactgagatattctcattttccatctagtgttctttctagtgaactttatttatatgcaagtgtttctgctggatactaagaatgataaaaaagaaatatgagaaatggtgtctatatcaagatatattataatctagttggggagtgtatcagtcagggtcccagcaagaataatacactccaatggactagttgagggtcatttaatgacagactatttataaaagggtggagagagttttgggaaataggcttttgccatcgaagcctaaagagacaaggggtggctataggagaggcccctcaagaggagctgtggcttttggtggaggaatccaactactgtcaacccacgctgtccagaaaggaggtgataccccacctacaaataccttgacctcattctcctcctgccctttcatctcctgctggtgcctcccgtagtcctaatcctgccaaaagccacatggcaaataacctttggatggagtccaaaaaggttagtctcctaaggaaaactgcgagttagagagtggatctgaagggacaaatggagaatatccacctcagagagcaggattacttgtatggtaatagcacatggtaacatattctaagtgcatgagcaatctggactacatatacttaatagcatactgacacacaagatatcattttaagtgcttttcattttttttttttattatactttaagttttagggtgcatgtgcacattgtgcaggttagttacatatgtatacatgtgccatgctggtgtgctgcacccactaactcgtcatctagcattaggtatatctcccaatgctatccctcccccctccccccaccccaccacagtccccagagtgtgatattccccttcctgtgtccatgtgatctcattgttcaattcccacctatgagtgagaatatgtggtgtttggttttttgctcttgcaatagtttactgagaatgatgatttccagtatcatccatgtccctacaaaggacacgaactcatcattttttatggctgcatagtactccatggtgtatatgtgccacattttcttaatccagtctatcattgttggacatttgggtcggttccaagtctttgctattgtgaataatgccgcaataaacatacgtgtgcatgtgtctttatagcagcatgatttatagtcctttgggtatatacccagtaatgggatggctgggtcaaatggtatttctagttctagatccctgaggaatcgccacactgacttccacaatggttgaactagtttacagtcccaccaacagtgtaaaagtgttcctatttctccacatcctctctagcacctgctgtttcctgactttttaatgactgccattctaactggtgtgagatggtatctcattgtggttttgatttgcatttctctgatggccagtgatgatgagcattttttcatgtgttttttggctgcataaatgtcttcttttgagaagtgtctgttcatgtccttcacccacttgttgatggggttgtgtgtttttttcttgtaaatttgtttgagttcattgtagattctggatattagccctttttcagatgagtaggttgcgaaaattttctcccattttgtagggtgcctgttcactctgatggtagtttcttttgctgtgcagaagctcttgagtttaattagatcccatttgtcaattttggcttttgttgccattgcttttggtgttttggacatgaagtccttgcccatgcctatgtcctgaatggtaatgcctaggttttcttctagggtttttatggttttaggtctaacgtttaaatctttaatccatcttgaattgatttttgtataaggtgtaaggaagggatccggtttcagctttctacatatggctagccaattttcccagcaccatttattaaatagggaatcctttccccattgcttgtttttctcaggtttgtcaaagatcagatagttgtagatatgtggcgttatttctgaggactctgttcttttccattgatctatatctctgatttggtaccagtaccatgctgttttggttagtgtagccttgtagtatagtttgaagtcaggtagtgtgatgcctccagctttgttcttttggcttaggattgacttggcgatgcgggctcttttttggttccatatgaactttaaagtagttttttccaattctgtgaagaaagtcattggtagcttgatggggatggcattgaatctgtaaattaccttgggcagtatggccattttcacgatattgattcttcctacccatgagcatggaatgttcttccatttgtttgtatcctcttttatttccttgagcagtggtttgtagttcttcttgaagaggtccttcacatcccttgtaagttggattcctaggtattttattgtctttgaagcaattgtgaatgggagttcactcatgatttggctctctgtttgtctgttgttggtgtataagaatgcttgtgatttttgtacattgattttgtatcctgagactttgctgaagttgcttatcagcttaaggagattttgggctgagacgatgggrttttctagatatacaatcatgtcgtctgcaaacagggacaatccttctcctgcctaattgtcctggccagaacttccaacactatgttgaataggagtggtgagagagggcatccctgtcttgtgccagttttcaaagggaatgcttccagtttttgcccattcagtatgatattggctgtgggtttctcatagatagctcttattattttgagatacgtcccatcaatacctaatttattgagagtttttagcatgaagggttgttgaattttgtcaaaggctttttctgcatctattgagatagtcatgtggtttttgtctttggctctgtttatatgctggattacatttattgatttgcgtatattgaaccagccttgcatcccagggatgaagcccacttgatcatggtggataagctttttgatgtgctgctggattcgttttttccagtattttattgaggatttttgcatcaatgttcgtcaaggatattggtctaaaattctcttttttggttgtgtctctgcccggctttggtatcagaatgatgctggcctcataaaatgagttagggaggattccctctttttctattgactggaatagtttcagaaggaatggtaccagttcctccttgtacctctggtacattttttaaagtacattctttatctgcacaacaagtttaaatctgcaccacattcctttttacactgacatctggaacaaagttcagtctaattgtagttcagtagtagttcagttctaaattggtaggccacttctgctgctgcataaagttgttccactgtctatcagaagtagtttttttttttttttttttgagacagagtcttgctttgtcgcctggttggagtgcagtggcgtggtctcggctcactgaaacctccgcctcctgggttcaagtgattcttctgcctcagcttctagagtagctgggactacaggtgtgtgccaccacgcccagctaatttttgtatttttagtagatacagggtttcaccatgttggcccagatggtctctatcttgtgaccttgtgatctgcccgccttggcctcccaaagtgctgggattacagatgtgagccaccgtgcccggctacagatattgttttaagtggtttagagctcagcttcaggaggaggctaagtagtaagaagcccagaagttaaataatgcattgctattgtttatcagttgaaaattcattattttgagatttttataaactggtcgtttttataggatgaaagagacttacataatagagattctcaacctaaaaataaattgtgagtattgcaatataatattgttgttaaagttatrgattttgtagttagagaaaccmcagtatgattctggctctgctactgccttgccctgtaagtctgggcaagttgcttagacttgctcagccacagtttatttaaaagtgaggacagccmcaaggttgtttcaagttttaagtgagataatggcatatagtaagcccttaatagatgttagctattattagtagtgttcatagattctataaccaaaatttcaaatttataatggaacaagtgatatttataggttaaatcattctacagatatttattaaacaatgattatgtgctgcgtactcactgtgctagatgctataatcaaagtaggaacaaatcagacctcgacctcctggagactgaaggtgcataatttgcatctgatttatattaataattgatgaattagtaaacagttcctgtactgacatatgtgctgccagcctaatgggttacttagttatcctcattgaccatcagcataccaaaaagactaggatagtttaaaattgtttttcttcaaaatcaagtttaatggggttcttatttaatatttcaaagtacataatatattcacatggttcaaaatgcaaaaagtggaaacagtcataagttgacaattctctttcgcattgcttagttctcaacttaccccacaaaagtaaccactgttctcagtgtgtatacatattcttttggaacattaaaaaaattgacatcacagttgtacatatttctgtggtacatgtgatattttaatacttgtatacattgtgtaacaatcaaatcagggtaattgggatatccatcacctccaacatttatcttttctttgtgttgggaacattacagttcttctctctagctattttgaaatatacaataaattgttcttaactgtaattttcctgttatcctatactagaacttattccttctaggatttttttttagttgtcttgtgttcaagaattagcacaatttatcattgtgctagactctttaatcacagtaaaacactagacttgtgtatttgcttcctaataaacgagcagcgctattaatatagaaaaaagaccgttgaattaaaaatagaagtctttaaaaattctagtagtacattcatcattgaaagactttaattatcatctgattttcctttctatgccatttggaattataaatggtaattttttctttgtgtggcactaccaaaaagtgcaatgtttgggaaaataagttatttcacattgaacagtagttagacattgtgctcagtttagataggattacttgaagcttggttttgatttgtcagtttctttagcttatacctgccattttgtagtaacagtcaattcagtattatattattctcagattttattattttatgctattttttacatgaacaattagtatttaatggtcctttgtaaagttttttctcaaaatgtagtgttaatttgtctgcatgtttaaagtttattggaaaagttattttgcctattcagagcgtaaaacttttagtacattttgttttataagtataggataccatgatgatccctggggaatctgattttttttaacagacaagaggttcccagttttcatttttaaatcaagttgctatggggctagcatctttgtttgcttaattttaatcacaattaccatgacaaaacttatttatttagctaatgcctaacagtgtcaaatgtatactgctggaaactggactaatttctatctgactaataaaaatcccaaataaaaatggtacatttttattttaaatggaaaaagattagtttctgaatataaattgagtttttaagtttttctttttggttaattaaagtctactctgatgcttttttgttaattttctttaatatccatatctcctaaatttaatatgcagttctaaaataaagacaagtcagctgggtgtggtggttcatgcctgtaatcccagcactttgggaaactgagcctggcagatcgcttgagcccaggagtttaagaccagtttgggcaacatggtgagaccctgtctctacggattttatactttttttttttttgaaatgggatctcactgtattgcccaggctggttttgaactcctgggctcaaatactcctcctgcctggtactacaggcattcaccaccccacccagctgattttgtacttcttgacaggaaaagaaaaatgaacaagaaattccttaatgcatattttaagtgctgctttaaaattttatcagtacagctttagaacatcacgctagataatagtgttgtactgttatttcctttttaatttattaagaaaaaggaagatgcaggggaatgaatctttattgaactttcctggcctgttcaaggaatagtaaataaaccaacttagctggaggggagtggagagggccttgtaggccattgttaaaaccttaggcttttactcaggttgagatgacaagtcactggagagtgttgaacaaagaagtgacattatgtgacttaagctttaagagggttgctttgctctgttgagaatagattctacctgggcaagaaaggaagcaaagaatatttaggaggctttggtaatgatttgggcaagagagcatgatggcttaggctagagtgggagcaatgaagatatgataaatgtttatattctgtacatattatgaaagtagagataacaggattttccagtgtgatgtgtgagaaagaggggagttatatttttggcctaagccaaggtaatgatgggattcccactaactgagatgagggaagactatggggaggaaggtcagttcagttttggacatgttaagttcaaggtatctattagacagccaactggagatgttgagtaggctattggatatataattcttcagctcagagaagaagatacatatacatttgtgagtcattagcttattgaaggtatttacacccacaaagctaagtgaaatagaaaagagaagaggtccaagggcagtgggggtcacagcaatgttaaaacatcaaaatggtaagtaagactcagagaggagactgagaaatagtgtccagtgaattagaaagaaatctggagaatgtaatactccagaagccaagtgagaaaaataatttcagggaggaaagagtgttagattgtgtcaaatgatgatggatcagaagtatgaagagtgagacttgaccattggttttaacaacattagagacctcatcaagaacagatttaatgaaaaagtgccaaaacctgattagagtcaacttaccagagaatgaaaggagaagaactagaaacaaccaataaagacaactcttttgaagaattttacagagaaatgagatagtggccgggtgaaagtatgatcatgataaaggggtgtgtgtgtgtaatgaatgtgagatgtgagaaactgcagcatgtttataatctaattggaatgatttagtagagaaaaaatgatgatgagagagagaattgctgctgaaatatcttcaggtagggaagagggaatcgaatctactacatttatggaaaagtagctgtaggctggagcacagacagttcatctgttgtgacagaatgaaatgccaggtatatggatacagatattagaaggtaatatgatgatttgataaataaaaacaaggtctaggtagatactttccatttttgaaagaaatgtgttataaaaattattaccattttagcatagtggaaaggaatgaaattggagggagataaacctgggtttagattttagctctgccaattactagctgacatgtggcagaacttagttacaatgcccctgtattatttagggacccagcaagaaataaaattcactaaaaagtggttcaaataaaaacactttaatgaagagtctactttgagagaatgaacagagttaaggaatgggcaagatatggtaaggcaactagaaactagcaattatggaaagctgttacctcacctggggctgaagaggcaagagtggacatggtgtttttagtttagtgattgccaaaggtatgaaggaaggaccagctagtaagagctatagttgtggaggaacacagctgttgccagagacaatggtacataggtaaggaagcagcagagaagaaataaccttgatctctctctactcctcaactctatttttctgctattgacctccattggctaaatgtaagcagaaaccagctgcaaggcttcttaggtgttgcagaatatagggttcactctccctagggtccagagaagggcaaaagatggatgtggagacaaatgctgagtaatcagtagaatcactaagcctcaacttctccatatataaaatgaggctaccgcaaagttgctgtgatgttacatgtactgccaagcactgctacattgctagcatatagtactgtttattaaatgacaaatataagatgctacagcataatggttggtccttaaagctttggaattaggcagatctagatttaagttctgtccgtcacttactaatcatgagattttgggaagtctttgttttgtcatctgtaaaatggggaaataaggcttaccacagagaattctaataaagatgaaaagggacagtgtatattaagtgcctaatatagtgctggtacacagcatgcagtttaagttaccatgaccatcataatattatatgactagaaagaatagtaaatgacatcagtttccaagtaatactagtctcctacccctccccctccccccacactttttttttctgcttctcagtttttctgaatagggttatttctttgttacatagggttcaaggttaatatctttgcactttaaacaattaggaaatatagctttagttagtttaactttttggctattcatttattttgtttttgatttatgttcgctaaacacacacaaagagttaagtggatttttttattaggcctaagttggaaggcatagaaaaagttggaaacactgaattcagtcagtttcattagcatagatttatatatgaagctcaagtaaaatgtcatcaagaaatgggagaatataggatgctgtaacagttaattcagagccgtactataataagtattctttttaaatttcacataaatataacagttctgtaagcttgatttgagggcacatacatgtttttctttttggctacatagagaacaatgaaataaagcctcattgacgtaattgaacctgataacatctcctggttgtactgctgatgtttcactgtggttttggtggttttgtagagctccgtagagcgtgttagacttaaaaacatattcaaacagaaacttttatcaggattcaactttttaaccataaagaaaaaatgaatgtaaataaaggtgcagtcttgggtacacctagatcaacttaaaaatgtttaatagtatatattacttagagaaattactgttccttaattagttttgaacaaataaccacagtatgaaaagaaataataatttctggtattgtattatatattagcacagaaggaaagaggtaaatataataatggaagctcctaaaaacagcaagttaaaattttatgctttcattaaatgatgtcttatagtttgatagaactacatgtttaaaacataccatagcactataactttttgttttaaactgggattaaaaatttaattttatttattttatatatatatttataaaattcttatatttaagttatttacaagatctactttggtattgggtttagatgcctaaaactttgctgacttggaaacaatgtgtatcagagcatttactgtctacttggaagtaaaattttaaaagagctacattttattatataggaggaatgagtgcttgaaccagtatttcttaaaagttttaatatacatgtaccgccaactatgcattccgtatgcgtggtagctacccaccaacttaaggtaaatgtataaaaaagaattaatcacaatttttgaaaactaaaaaattaaaatattttatatcagtgtatatttacaatattaaaggtatctctgtttagctcaatgttgagtaaataggctgcttgttgtaggttcattgtatatcgtcatattcttttctcatctctatttctcttaacttggaaaaatccaaccaaaattataatttatgaggacagtcagcaggggttttttggctgttggttctgaatactcaggttaaacatggactccagaattaagagattgctcactgaagactctttcaaggctgagtcacttgctaagttgatggacattatcatacttgaaagtttaagaaatagaggcttttgcattttattgaaaaaagctctttttgctctttatattttatatttacttttaaatattttatttgctcagtttttccaaagcacactgaaaagatgtatactctgtatccaaaaattgagtgcatttacatttatgctatttctttaacattgaactcagcataatgtattttaaccaccagcctctttctgtgaaaacaaacaaacaaacaaaaaaaaaacagggtatatagatttgcagttagtgtagtactcattgcttagcaaggctttttcttgatgtgcagacaactgattttttctctcaggactgatttcatcacatatttcccagtctatatcatagtttacaaaacaaatattaagtaggaaaaaaaatcatgttttgtagtatgaatttttcagaggtaaacacaaaaacttgtctgctattcttcctcaagtgtattacacatataccaagagctgatttggctttgcacttcagtgcatttatcaagcagtaaagtaaaatatctggtttttctttcagcataatatttatcgtttgtgtggctgagagttttataaatctctcagcaatagtctatcttttttatatgcttttgctaggaggagcacagaatctgaatggtgcctgtgtagtttttgtctcttttaggaacaaaaatcttcagtttcatatatgaaagcattttgtgcttgttctagaaagattctgttcatttaccaaagaggtttttatgttttgtttgaaaactttccatagcttcatgtcattatttgataaagtttcaaagtagacaacatccagaagaatatagggtaaatgaattaccagtcagaaagaaatccagcttttagatagttgctattgtatgtgctagtaaaatttttgtttttatctctttgtgtggtattatcacatgcacagatttatattgtttgcattgaagtcctattcttgatttaggttcaacatttattccgagctatttatgttaccttatttttatcaatatcttargctttaaaaaccaattttgagccatttatttattgattggggagtataatgcaacacaatgaaaataatgcaaatttaaaagatataaataatattcaaatgatgtgaaaatacttcaggtaagatgatttgttctcttttagaataatgcaggtcttagagaaccttttcagcttttaagaatataagtttttaagataataatgagatttctgcggaaatcaaaattaaccttatagttcacaattatgaaatatatgcaaactaagttgtttcctttttccctctaaatattctgggacaatgaggaacaactagtgattgacagatcataatttgataaataatggctaatattctattacaatttcctagtttaaaattttatgtttttaaaaatatcatatatatatttttttcgtgtatacatatatgtaatctaataytacggagacacttagcagtattttcattaagtatttgctctttgcatatttctcactttattctgtcattagttctcccactgttcaggatcattcctatcaagtacaagcatgctttagaacctaccatgttaaaaaaaaaagtattattcccacatttttttctgatgattgcttcatttcattcttgcctttacagcacagtttttcaaaagagttttctctagtcactttgtctacttccttaccttcctaaattcatcttaacttttactaaagctgaacaaatatttatgaaatatgtgtaaagtacagagactaaagaaacagacaccatcaacccaccattactggtgtttttgaacattaccattaacattgaagttccctgtatgtcactcctggatctggttcacttctttttcttttagagataatcaccatcctgaatttctttacagtttaccataagtatttctaataagcatatcgcaatgtgtatttcatgttaaatgagtgaaggtatactgtatgtatctgtctgtgacttgtttttcttgttcaacattatgtttctgagatccatccatatacgatgtagctgtatgtacttcattcattttcactcctatactccattgtatgaatacatcaaaatttttctattttattgttgatgaacatttgggttgtatctagttttttgctaccctaagctgcacagctatgtgcattcttcctgtctccttctgtcaaactgtagcaaaggaccaagcttttgggtttttccctgatctgttgtggattgatgcttttgtaaaatacactaaaaatgtctcaccattgtcaaattgctataaaaatatataaacctttactctgaatttctgtatttatcttattatggaccacactttgaatactgctctaagatgtgtacctagctgtggaattcctgggtcattcatcttctattacttatggagaaaattgttttctcaaaatcactaatgtgctacttgctcaaattacgcagaaggcagtctgctagctctttgtggctttctgtgtatctgctttcaattcctaatatgaaggggatttcacagtaagacctgctgctttagggtaacatagttttcatcctagagaaagtgactgcaaataagattgggctttgcttaagaattgattcaaagccaatctagcaagcacaagtgagagaaaactatgataatgggataaagggccaggaagagtgaatttattgagggagatggtctgtaatattgtaatactacaatattgtaatgtacaatattgagggagatggtctgcaatattgtaaaaatataatattgaaatattgtaatacaaaatgctacagtagagagatctaaagagarcaagcagagaaaaaagaagcattgtacatagtaagatttttagagacctttaagagtccagttaaaatagggcatacattccttctcatattagcagccttccttctgcataggcagcctttaattgtctaaatgcattagagaactttcacaaaatataagctaagatgagattgctcttataagcaagcagcaggactactttttatcagtgtttctccaccgtattttgattacaactccgaatccagggatatatatatatatatwtttatattgtatatacatatgtaaaatatatgtacatatattaaatattatatatacatatattatatatatgtttccataatcatctcccccttcatgtaattttcataccaaagatgtacagtatatctgtttgtatactgtagcctttggagggctacgaaccattttaattttcaagattttttttttttttttgccccaagaaccagctaccacttgcttggaagtgatagcaccactgttgagagtatatcacatgaatacaaacatggctcttggcattagagtacaaatatttaaaaaggtaatgtttatttaatcatgtaggtcaatgaagtggggaaggcasactactcaatgttaagaaaccatcctaatgaaaagtatacttgagttagccagaaatcaacttctacttagagttgtgagtcagggaaataaggtatacaagtatttgtctctgtttgatggtattattgtgggaaaagtgtagaaatgtggatcagatgatagtacagttaaaaaagttagcagaccaagaatgccaattagttcattgatgcctatctcataggtgatttttagtgatatatcgtatggctctgttttcactcctgtctattctagacatctattcgtgaacttaagaaaacatcagatttatagatgttatgataatgggaggaatggagaatagggtagttgacattctcaatctccaaagaagctgacaggctaaaataagggcagaagtaaagtattgcagttgggtctaaaaagccatatttataagaatagcatggaggaaaatggatcataacaatatcatgtataaaagaaacttagggattttaggttatgttaatcttaaggagcattttaggaagctattaacatcttaatttgcaataattagtgtctcttgaatctagattatatgctgattaaatcacaacctgaaataattatatcaggaccacatttaggaccatataaaatactgcttaaatttaatgagtctgttatatatatggtatactttgcatgcagttatatcagagccattttgtgggcactggttcacaagtcttctgagtgattgtactgtgtctgaattttctttgggaagaaatagatttttcctcagtggtaagaaagaaattacgttctgcaaggatattgatgaggagatggtgataatgataattgacagttttttgagtgattaaacatgggtgtattatgtaaaatatgagtcagcaaactgtagtccactgaccaaatgctgccagcagactgtttttgtatcacctttgagctaataattttttttgcattttaaagggttataaaacaaaaacaaaaagcaaagaatatgccatagagaccttatgtagccagcaaagcaccaaataagatcttttgcaaccagaaaacttaagcctgaaggacaaaaaacaacacaaatagttcaatatatagaaattatgagattatattacagattaactgggctcatattcaatacaggttcaaagctatgtacaaaatggctattagaatgaattatttaagcaaaagaagacctatttaactcagtaaatgtcaaagaaatttaggattgatgataggtagcagttatagcttcctaaattaaagttaattttatctccttgggcatagtgactactatattgggttgggaagcagccaaaaagcttgttaggaagaagggcaggaaaaaaactagtctgggactaaagttaccattgataagctaggctatcaaggagacagacaggaaaacaatcactaattatgtgcatatcaaaaggggtatgtgctgcttttgataagtctattcttttatacttaatctaaccccaaggacaacaagcttttcaaaatgtttttgacagaagtaccttattggtaggaaaatagcatcacccatcacccatgatgagcctttggagatggtgggtaggcagagaatatctgatgatatgtaatttttcttttattttttgtgacttaatgtgattatggatttatattttcctttttgtggtagtatttgaaggttaatatggcttgttttagttactttattgtgataattctttattcttttgatttctcaattatagattatattaatgaaatattctgtcgagataatttttattttcaccattccaatatctcttccagattttgagctatattagataattataattgaaaatgctgaattttgtctttacatatacttttttgtttatttttggtttgtaaccaagtgaatttttttttctagatgattctttgggattgggacttaaaacaatggtataagcctcattatcaagtaagtataattaatatctgtgatgaatatctaaataatatctgtgatcactaaataatatctgtgatgcaacttttgacacttaaagttacactcacaatatttctgtgccataagattttctttaactaaactaataagttaactagaaccttcattgaggtagattttttaaaaatatattttaattataagggaaaaagaaaatgataaaaacaaaatttatataaattgttatgaaaaatattgctaatataatctgggctcagaatcaactaatatttctatattaaggataagatttttttcttttctgatgtggaccactgttctataaaggggaaaaaatagatggaaggccatatctgagacaaagcaaagcagttggcaacatattttattagggaagtaaagatatccaactttcattttttggtaaactttttatcaaattataacatacatgcaggaaagtgtacagctcaattttcagaagttaaacatcccatgtaactggtactgatatgaagaaatagaatgtttccagtatctcagaagcctcacatatgcccaattccagtcattacctatatccccaaagataaatcctatccgacttctaataactagttttgctaatttttgaactttatatatacacaaatggaataatatgtgtacttttttaggattaattttttgaacacctaagtaatatatgtttatatcagataaaatgaaaatagaagtatttaatataaggagaaaaaaggaaaatcactcataaaacatcaagcaataactgtgttaacttttgatgtctatctttattgatctttcccattatgctaaatttacttaataattctaatagcttatttgaagattctttgagtcttgacgtacacaaaaatgttatctatgaataaagacagatttatttatttatttcaaaacctatgccttttatttctttttctcatgttattgtactttctaggaccttcaacgcagtgttgaatggaagtggtatgagtaggcagccttgtttttcttcatgaactcagggaaaaaatgttcaacatatcaccactaatgttttttgtagataccctttagcagattaaggaagttttattctaattctagtttactaaggactttttttctcttaagttatgagtgggtatataattttatcagatgctttttctgcatctattcaaatgattcgagatttttttctaattattctactaatgtggtgaattacattgtttatgtttgttaaaccatccctgtattcccagaataaagtaaatttgatcaagatgtattttgtttaaatatttatcactagattctatttgttaatgttttgtttagaaattttgaatttgtgtttatgagagagtgttggcctataaattcttacttttcataatgttcttggcattatattggtatcacggttaccaagaaccttgatatcaagataaaataaggtgagatatttaccctttctattacctcgaaaagtttgggtaagattaaaaattggtattatttcctcctttaatgtttggaagaatgctctggtgaagctatctcaccttgaagaattattttgtggtcaaattttaagttatggattcaatttctttaatagttttagtatcatttagattttccatcttttcttctaacaattgagttacttgtgtttttctaggaattcctttttttgttgttgttccttctggcatttgtgagactgctgaaagccctattttaatttcaaaatagaaatctttttgaggatttctacttggtttatctctctcttagccactgtttataaattggcaaatacctttagaggaaaagcaggtctgaatttaagctcactactttgtttttctcatcactttgggatcttgtttggcaccccctgtcttcatagctctgaactccaatttcggtctcccagccccttgggactatagatctctactctgttttctggcctcttttgtgcttctcatcctctctgctctgtgccagttatgaatcagcagaaaattcctagagggaaaagagtagcacagaatgttggatttcttttaatcttttctcttaattctgggttcttggccttttatgccctggctgtttggttgtgttttgatgccttgaaatgtatgctatttatattttatttcagcttttctagttgttctagacagaagagttggtctgatacaaaccagtccctcttagctggaaaattaggcaagcctcttaagacactctgaacctattccctcacctacaaattgagaataataccagttccctcaaagggctaattaatatgtgcctggtacttaatacaaatgtgggccaatattatataaatttcaatagtaataaatactaatctgaacttgaagtataagacaggaatgagcatttttttctttaaaaggccagagagtaagtattttagcatttgctggaaacatatgaccattgctaccttttgccgtccccagtgcttctcattgcctcctttgtcctcttctccctcccactcctcttctttttcaataaccatttaaaacataaaaactattcttaactttctgttcaacaatcaagattttgctaaatataagtgaatggaaaataggaatttaagttcagcttttaaaattgtggcaaataatttgaatattcaatttgatctgccataagttatcatgtcactctcttgctcatttctctcgtttcacccagtgtaaaagtctttgtcatgtacgtaaaagaacttacacaacatggttccctcccttactctcttgtacttctctgtctttgtcttctactactttctccttcatttactctgttccagctgcactggcctccttgttattccccaaacaagtcagacaggcttctgactcaggtctttgcacttgctagtctctctgcctgggatgcttatttcccacactttgtcatgtctttacataagcatttccttcttagtgaggcataccccaactatcctctctaaaattgcattgcgttctatcacatctttttcccttaacttactttattttctctttttagcagcttgttcaaaatctattatatacgaccctttattactcatattacttagcttggaatccagtgttctcaaaaatttggtcccaacatgtctttccaacctgtttttcattgctttcttatataatctgtacttcaacaatttcatattccctgtatagcattattttaccacttaaaaattgtattttaccacttttatacttttatttatgctgtgtccattttgtgcagtacacttccccaatacatttttgttttgttttattgtaaacaaatataaatataatcctaccaaatttttagggcccagctcaaatgctaccccttccataaaatttctgttaccatccaaatggaaggtttctatatctcttttgaacgctaatgccattttgtctgtatatataatttttttctttttttgagacgaagtttctctcttgttgcccaggctggagtgcagtggcatgatctcggctcaccgcaacctccagctccctggttcaagcgattctcctgcctcagcctccggagtagctgggattacagrcatgtgccaccacacccggctaattttgtatttttagtagagatgggatttctccatgttggtcaggctggtcttgaactcccgacctcaggtgatctgcccacctcggcctcccaaagtgctgggattacaggggtaagagaccacacttggccattttgtctgtatttttatctcttcactttctgttaataataacagtactatctttgcctttagttatatatactatactttatatgctctgcatgtgttaccatatgtaactctctcttttcctccttgctaagtacagttattaagtctggaaataatgtaagaggcaatcaagtgagaactacaaaaaatagaaagaggaaggcagactggctagggaccctagtacaggaaaaacaacacagtgacagagtctcttatgacccacacccaacagcaaacctggtctaggcccccactctcaacctagcaacataaggtgacacaggtaggcttattctttccccagattaaacaagagccctgccaacactaggcaagtctggtggctctagcaagggggaattgatttggaaccactggcaatcagtgaccagggagaagcattctccttccctcctgggcatgagactccccttccccactgacagayactgggtggccagtgtgcctggcaagggggatgtcctcacaaatgcctagcccagaaagtgatctttgwtcctgtcacctggagactcctttctctcccctaaaggtaccagatgacccaacctgaggaagctctctttccccctactgtaaggcaccagtgtggactgtggactagtgggaacccaacgggcaccaaatgctagatgacgagttagtgggtgcagcgcaccagcatggcacatgtatacatatgtaactaacctgcacaatgtgcacatgtaccctaaaacttaaagtataattaaaaaataataataataatagtaataataaaaaaaaaagaaaaaaaaattcagacacacctaaatgattgtgaatgctttgaaaattgtcatccaaaccacagcccacaaaagtaggccaggacctgtgtgataaacctaaatggggatatgccttctaatggcaaagatttctgtaggacccagagtcttgtaagttatagtgaaaatattgaggataaaataaaaaatcacccatcataccaaaaccaagaaaatcacaacttgaataagaaaaaggaatgacaacactaagatgaatcagatttggaattatctggcaaggatttttaaagcaaacatcataaaaatgctctaacaaataattacaaagtatcttgaaacaaatggaaaaagaaagaaaatattagcaaaagaaatataaattataaagaagaaacaaatggaaagtatagagctgaaaaatacaataatagaaatttaaaattactggatgggatgaataacagtggagatgacagtaggatagaatctgtgagcttaagcatagatcaatagaatttagccaattttacaacatagaggaaacagaaacaaaatcagcaagccttagggacctattgggcagtaacaaagaaccaacatttgtattgctcgtgtttgagaaggagaaagggggtggcattgaaagagtatctgaagaagtaatggctgaaaacttcccagatttagccaaaaacttaatcctacagattcaagaagctttctgaaccccaaatagtatcaaccccctcaaaatctactctcagacatgtcataattaaacttatgaaagctaaagacaaagaaaatatcttaaaaagcatccagagagaaacaacacataacctataggggaacaccaattcaagtaatagcagatttctcatttaaaaccatgaagcccagaaggaagtggcagaacacttttgaagaggtggaagaaaatggctgtaaagtctatatccagcaaaagtattctttaagaatgaaggggaggaggttccaagatggctgaataggaacagctccagtctacagctcccagcatgagtgatgcagaagatgggtgatttctgcatttccaaatgaggtactgggttcatctctctggggcttgtcagacatggatgcaggacagtaggtgcaacccatggactgtgagccaaagcagggtgaggcatcacctcacctgggaagcgcaaggggtcggggaattctttttcctagccaagggaagccatgacagacggcacctggaaaatcgggcaactcccactgcgcttttccacctaatactgcgcttttccaacggtcttagcaaacggcacaccaggagattatgtcctgtgcctggctcggggggttccacacccacggaacctcgctcattgctagcacagcagtctaagatggaactgcaaagcagcagcgaggctgggggaggggtgcccaccattgctgaggcttgagtaggtaaacaaagcagccctgaagctcaaaatgggtggagcccaccacagctcaaggagtcctgccggcctctgtagactccacctctgggggcagggcatagctgaacgaaaggcagcaaaaacttctgcagacttaaatgtccctgtctgacagcgttgaagagaggagtggttctcccagcacggagtttgagatctaagaatggacagactgcctcctcaagagggtccctgacccccgagtagcctaactgggaggcatctcccagtaggggctgactgacgcctcatacggccgggcgcccctctgagacgaagcttccagaggaacgatcaggcagcaacatttgcctttctgcaatatttgcagttctgcagtctgcactggtgatatccaggcaaagagtgtctggagtggacctccagcaaactccaacagacctgcagctgaggttcctgactgttagaaggaaaactaacaaacagaaagaacattcacaccagaaccccgtctgacgtcaccatcatcaaagaccaaaggtagataaaaccacaaagatggggagaaaccagagcagaaaagctgaaaattctaaaaatcagagtgccccttctcctccaaaggaacgcagctcctcgccagcaatggaacaaagctggacggagaatgactttgacgagttgagagaagaaggcttcagatgattggtaataacaaacttctgtgagctgaaggagaatgttcgaacccatcgcaaagaagccaaaaaccttgaaaaaagattagacgaatggctaackaaaataaacagtgtatagaagactttaaatgacctgttggagctgaacaccatggcatgagaactgcgtgacacatgcacaagcttcagtagccgattcgatcaagtagaagaaagggtgtcagtgattgaagatcagatgaatgaaatgaagcgagaagagaartttagagaaaaaagaaagaaatgagcaaagcctccaagaaatatgggactatatgaaaagaccaaatctacgtctgatgggtgtacctgaaagtgacggggagaatggaaccaagttggaaaacactcttcaggatattatccaggagaacttccccaacctagcaaggaaggccaacrttcaaattcaggaaatacagagaacaccacaaagatactcctcgagaagagcaactccaaaacacataattgtcagattcaccaaagttgaaataaaggaaaaaatgttaagggcagccagagagaaaggtcgggttacccacaaagggaagcccatcagactaacagcggatctctcggcagaaactctacaagccaggagagagtggggtccaatattcaatactcttcaacaaaagaattttcaacccagaatttcatatccatcccaactaagcttcataagtgaaggagaaataaaatcctttacagacaagcaaatgctgagagattttgtcaccaccaggcctgccttacaagagctcctgaaggaagcactaaacatggaaaggaacaactgctaccagccactgcaaaaacatgccaaattgtaaagaccatcgatgctaggaagaaactgcaccaagtaacaagcaaaataaccagctaacatcataatgacaggatcaaattcacacataacaatattaaccttaaatgtaaatggattaaatgctccaattaaaagacacagactggcaaattggatagagtaaagacccatcagtgtgctgtattcaggagacccatctcacgtgcagagacacgcataggctcaaaataaagggatggaggaagatctaccaagcaaatggaaaaaaaaaaaaaaagcaggggttgcaatcctagtctctgataaaacagactttaaaccaacaaagatcagaagagacaaggccattatataatggtaaagggatcaattcaacaagaagagctaactatcctaaatatatatgcacccaatataggagcacccagattcataaagcaagtccttagagacctacaaagagacttagactcccacacaataataatgggagactttaacaccccactgtcaacattagacagatcagtgagacagaaagttcacaaggatatccaagaagttaactcagctctgcaccaagcgaacctaatagacatctacagaacactccaccccaaatcaacagaatatacattcttctcagcaccacattgcacttattccaaaattgaccacatagttggaagtaaagcactcctcagcaaatgtaaaagaacagaaattataacaaactgtctctcagaccacagtgcagtcaaactggaactcaggattaagaaactcactaaaaaccactcaagtacatggaaactgaacaacctgctcctgagtgactaatgggtaaataacaaaatgaaggcagaaataaagatggtctgtgaaaccaacgagaacaaagacacaacataccagaatctctgggacacatttaaagtagtgtgtagagggaaatttatagcactaaatgcccacaagagaaagcaggaaagatctaaaattgacaccctaatatcacaattaaaagaacaagagaagcaagagcaaacacattcaaaagctagcagaaggcaagaaataactaagatcagagcagaactgaaggagatagagacacaaaaaacccttcaaaaaatcaatgaatccaggagctggttttctgagaagatcaacaaaattgatagactgctagcaagactaataaagaagaaaagagaagaatcaaatagacgtaatgaaaaatgataaaggggatatcaccaccaatcctacagagatacaaactaccatctgagaatactgtaaacacccctaagcaaataaactagaaaatctagaagaaatggataaattcctcgacacatacaccctcccaagactaaacaggaagaagttgaatttctgaatagactaataacaggctgtgaaattgaggcaataattaagagcctaccaaccaaaaaaagtccaggaccagacggagtcacagctgaattctaccagaggtacaaagaggagctggtactgttccttctgaaactattccaatcaatagaaaaagagggaatcctccctaactgattttatgaggccagcagcatcctgataccaaagcctgccagagacacaacaaaaaataattttagaccagtatccctgatgaacatcgatgcaaaaatcctgaataaaatactggcaaaccgaatccagcagcacatcaaaaagcttatccaccatgatcaagtgcgcttcatccctgggatgcaaggctggttcaacatacacaaatcaataaatgtaatccatgatataaagagaaccaaagacaaaaaccacatgattatctcaatagatgcagaaaaggcctttgacaaaattcagcagcccttcatgctaaaaactctcaataaattaggtattgatgggatgtatctcaaaataataagagctatgtatgacaaacccacagccaatatcatactgaatgggcaaaaactggaagcattccctttgaaaaacagcacaagacaggggtgcctctctctcaccactcctgttcaacatagtgttggaagttctggtcagggcagtcaggcaggagaaagaaataaaaggtattcagttaggaaaagaggaagtcaaattgtccctgtttgcagatgacatgattgtatatctagaaaaccccatcatgtcagccccaaatctccttaagctgataagcaacttcagcaaagtctcaggatacaaaagcaatgtgcagaaatcacaagcattcttatacaccattaacagacaaacagccaaatcatgagtgaactcccattcatgatggcttcaaagagaataaaatacctaggaatccaacttgtgagggatgtgaaggacctcttcaaggagaactacaaaccactgctcaacgaagtaaaagaggacacaaacaagtgacaatactgcccaaagtcatttatagattcaatgccatccccaacaagctagcattgactttcttcacagaattggaaaaaactacttgaaagttcatgtggaaccaaaaaagagcccacattgccaagacaatcctaagccaaaagaacaaagctggaggcatcatgctatctgacttcaaactatactgcaagcctacagtaaccaaaacagcatggtactggtaccaaaacagagatatagaccaatggaacagaacagagtcctcagaaatagtaccacacatccacaaccatccagtctttgacaaacctgataaaaacaagaaatagggaaaggattgcctatttaataaatggtattgagaaaactggctagccatatgtagaaagctttaactggatcccttacttacaccttatacaaaaattaattcaagatggattaaagacttaaacgttagacctaaaaccgtaaaaaccctagaagaaaacctaggcaataccattcaagacataggcatgggcaaggacttcatggctaaaacaccaaaagcaatggcaacaaaagccaaagttgacaaatgggatctaattaaactaaagagcttctgcacagcaaaagaaactaccatcagaatgaacaggcaacctacagaatgggagaaaattttcgcactctatccatctgacaaaagggctaatatccagaatctacaaggaacttaaacaaatttacaagaaaaaaatcaaacaaccccatcaaaaagtgagcaaaggatatgaacagacacttctcgaaagaagacatttatgcagccaacagacacttgaatgctcatcatcactggccatcagagaaatgcaaatcaaaaccacaatgagataccatctcacaccagttagaatggtgatcattaaaaagtcagggaacaacaggtgctggagaggatgtagagaaataggaacacttttacactgttggtgggactgtaaactagttcaaccattgtggaagacagtatggtgattgctgaaggatctggaactagaaataccatttgacccagccatcccattactgggtatatacccaaaggatgataaatcatgctgctataaagacacatgcacatgtatgtttattgcggcactattcacaatagcaaagacttggaaccaacccagatgtccatcagtgatagactggattaagaaaaagtggtacatatacaccatggaatactatgcagccataaaaatggatgagttcatgtcctttgtagggacatggatgaagctggaaaccatcattctgagcaagctatcgcaaggacagaaaaccaaacaccgcatgttcttactcataggtgggaattggatagtgagaacacttggacacaggaaggggaacatcacacaccggggcttgtagtggggtgggggagtggggagggatagctagcattgggagatatacctgatgtaaatgaggagttgatgggtgcagcacaccagcatggcacatgtatacatatgtaacaaacctgcacattgtgcacatgtaccctagaacacaaaatataataataaaaaaaaagaatgaaggggaaaacattgtgaaatgaaggaaaacaaaagaatctgtcagtaagagatttaccttgcaagaaagacaaaaggaagttctttaaaccaggcgtcaccaaccagtaccggtctgtggcctgttaggaactgggccacatagccggagatgagcagtgggcagatgagcattaccacctgagctctgcctcttgtcagatcagccaccacattagattctcataggagcacaaatcctatggtgaactgcacatgcaagggatttggggttgtacgctccttatgagaatctaaggcctgatgatctgtggtgaacagtttcattctgaaaccatctcctcgcacccctacccagtctgtggaaaaattgtgttccacgaaacctgtccctgatgccaaaaaggttagggaacccctgctttaaacagaaaggaaattataaaagaaggactcttgaagtaacaggaaggaagaaagaacaatgaaacaggaagaaatagtgggagaatgcaatagactatccttcttgtgagtttcatgaatcatatttgatgattgcaacaaaaattataacatcatctgatactcaagacaagacaattatacttaaaagtaagcaaggtagagacctaactagtagtaaggttttcacacttcactcaaagtggtaaaatgttgataccagtagacggtgataagtcacatatgtacattgtattgccaagggcaaccgctaagaaaactttatatagtaatacactcagaaactctataaattaatcaagatggaatcataaaaatattctaataaccccagaaaagcaagaaaaaacagaggaacaaggaacagaagaaacaaacacaaaacaaataataaaacagcaaacttatggcctgacagaagtatttaccttaaaaggatacaatatgaagaaaagkaaaaattgaccatgaaaaaaagatttgtctatgaaaatgatttttttttacatgaggtattcctgttgtcattggagatatttatgagtagattctaattaccttgtattgttaaagtgaaagtcacactgtactctcagtaaatttgtgatttgttctttcctaatttcaacagtttttaaacagtattgaggaaaggttacttgcaaacaaaaattgtttttgtgtgtgttccatttgaatatgtaaatattataaggaacatttagaatcacaataatcagagaattcagattaaaacagcaattagaggtttttttgcctatcagatagggattaattaaattcatagttgctaattgtaatgggatatggaaaaataggtgctgttatatacaattagaagtgtagatttgatcaacatattctaaggcagttttagaggaatgaccttattttaacatgttaatttgcattcagcaattcagattatgggaagctgtgtataggaaatatgcttaattgttcacagtaacatatatagacaggtgtttattttagtggtatttgcaggggagaaaggctagaaatagttgggctatgccctggtatcaggaaatgttttaaagtgaaaactaatacatattaacacttcataagaaaaaaaattccgcaaagagcagacattatttagctagcttggtgtaatgttcataatatttctcagttccaaaatgtattggggatactttaataaacagttttgttgtgaactcattaatttgaataattattaattgcaaacatacccaaatgtaagttcaaggtacaacaacaacaacaaaaaacaaaagtaacatttaatttactgttctgattactagtccatttatttctatgggtaatcgagttgaacatcatatgtatgttttttcagagagtaaaaatcatctcatgtttacatcggtgacatatttcttctaaattaaaaaatttttttctaccaattttttaaggccttgcctgatgctaccctgtctgtgaggtttttgttaattattcatctttaagttatcgctatctcttttgaactataacatatttttctktatttttatctcatcattttccataatattaatagtaataatactttttgtgctttaaatcatacattatacactgctttatttgctttacatatattatcagatttctcatattagcccataataaggtagacattactatcctgattttacattgaagaaactaaaatattcagaggttaagtaaattactcaaggtcacacaggtaagattaaagtttaggtttcaaattcaggtatgtttgctacaaaaccttgtcactgtgttagactgcctctaaagtgagtaaggtaaatgaaataaatgctttgtatgtttaaaattttgttataaaggaaaggaaataatgaattaatgaaatgttcaaattacagactttaaagtaaatacagatttcgttttatactagtcataaggtaattcagtgttagtagttaataccattaaatataatgtgataatcagctagcgaaaaagaaaaaaattaaagttcacggttatttgctacatatatatatatataaattttaagttagaattataccatttgttatatcatttatgccatgtacaaatgaatgaaaatttcactttttttctttctagaattctggaggtggaaatggagttgatctttcagtgctaaatgaggctcgcaatatggtgtcagatcttctgactgatccaagccttccaccacaagtcatttcctctctacggagtattagtagcttaatgggtgctttctcaggttcctgtaggccaaagattaatcctctcacaccatttcctggattttacccctgttctgaaatagaggacccagctgagaaaggggatagaaaacttaacaaggtcgaaatacagtaatcatctaaccctatttatcaaatttaatgatattttcaaattaactgctcctttaaattctatatagaatacaattttcgtttcaaggatcagacataatattgagctgcttgggatgttagaggcaattataagctcaaataattatagttgagtattcagtttttattttaaatacattgctgtgattagcacttataacaactatgtattattattcttgttaagaagtagagaacagcaagcaaattttgttccaggcttgtacaacaaactagtagtcagatcacgttattgctctattttattctttagaatctaggaattgttcttgttgagccaagaagaaatggtcattatcatattcattttatgaattacatagaattattttaaaatgatttttaagttttttgaaccctgttttcccccttttacacctactgaagattactgtagcccagtaggcattgatttttatatcattagaatagaggattaatttctctttaaaatataaatatttcaaaataggattttctttagaaaataataaatactgttctaaatgggtatgcattatccttgttcagagtgcttttacttgttttatttgactattatcagtatctttgccaatagctaaaatcataaaactttaaaactagaaacattgtagaaattattttactcaaccactttattccagataaggaaactaaccaagagaagacaaaatttatttcagttaattttgtcaattgtaataatgcttatagaacttagaaataggtaaatatagtttttgtagggattttgatcatcagttaattttatcagttgtcagcattagggtttagaaatgttgaaaagttaagcaaacccagttagaggaaaaggatttcagaagtattgatcacaatctggatcattgttatgtgatacttttatttttttaaagtttatgcagtagcacctacattagtcaaaacccaattaattagtacttagttacatgacttcctttttagcactctatcttataagaaagaggttaatcacaagcattcagagggcatagcaataaaccataaataaaataactctaatgtattcttgagttagttttcactctatatgttactctttctttgcattttctgttgatatttgatactcaggatagtaatttttaaaaatagtaattcttaaaatttttaatcagaaatcatattgatatcagtatttagtgtgtagaaaagtgtactggtacattttaggaatattttaaacataatattaattaaacaggatgcctaaatgcctcatttcctgagcattgtagttaatcaaggaaggttattttgggttctggaatctactgatagagtaagtcatataagaaccaggaagtaacccttattccttttctttgtgttctttaaactcgttattagaactctatatcgaatttgtctctccttttggaaaagcatataaaaagcctgttgttacttcagaaaagggcaaaggcatttattgaaaaaacaataggcaaaagggaaaaggaacagacaacttgatataactatcttatacacattaagaacaaagaaagatcatatgaacctaaatgacactcaacaaggatattaacataaaggactttttcactgcaggtctaattaactattaacctttacaaaatcagtgtccttgggaaaactgaaatataagacagatacttatctctgagattgctgcagtgtctgctgatagaggaaattcataagaagcagaaactattatgtaaatctcagtaaaacacttatttataatggtcaaaaatggaatattggtaattgaacatttgggttagttgagaatattttttaaaattagggcaaaatattaatgctaaaggtgttctgtatttaactcagtcatttattcaaacccagaatcctgcagtttctcctgattaacagctaagtaaattctatagcactgtactgaaaatataaaaaatttagaatatagggctgatcatccctgatcctaagattgtcctctgaagttgattttcagggtaaatctttcatatccactttttaaattgccgattgtttcttatgaaacaagtagtaaaatgtacaaaagaaaaagaatctagcttaaattatagagttcagacatattttttagtaggaggaagaggaatagaataacaaaatagagtgtgaaatttggagtaaattgacagattttcagaataaaatgtttcttttttctctgtacatgttaaaaatatactttgtattgatactttcatgtgccatcactaatattacatatatagcatattaaagagtgacattttaaaccattgttaaattattcaacagggactaaataggaatagtttgccaactccacagctgaggagaagctcaggaacttcaggattgctacctgttgaacagtcttcaaggtgggatcgtaataatggcaaaagrcctcaccaagaatttggcatttcaaggtaaaatctgcagagccttttaagaaacttgaatcaaatgcatctactttgtttctgtcaataatgtttcaaatagttctggaagcagaaaggaatggttgaagtattttaggtataggacaacatgtgtagtaataatatggtaaaatagagaaactgattattaaagagaagctaatgtgtcttgtcctaaaactttgataggctgggtacaaaatgtgctggatccctgagaacatgagatagtttagggaaatcaggatcaactcaggactggatgctggggaagtttttaaatcgatagaagtggccattacagggttagccaccaatccaatgaatagtatccaaaggtaggtctgcagaattactgacttctgaaaagaggagcacgtttccaaggctcatcacaattgttaggtttaaggtaaccagactttcaaatcctgttcctgctggaggttgagacaactaatatattctatattctgttgaggatttacttggaactgaacaatgctaatcttataaatgaaaggcatcagtaactttaagtaaatgaggctgggraaatgcaggagctgaaatctcccgaatgtaaatatatacatttaccctgataacaaaggatttaataatacagtactttgtcttttgaaagccaggaaggatactgatccttgtgtgagtttgtcataagttttttctttactcagctttctaattatgttaatataatattggaattggcacaaattctgtgttaaccattttctggtattactgagcatgttttatacttttgagctgtatagtttcacatttgaaacagtagatggcaggattggatcatagctatttgttaaagtttatgttaacagataattagatgattatgattttctagattcttaggtggtttattaatttgaatcttgtataatatattcaagcaggtgaactccttttttgtaaaagaaaaattgaatgaagtgatgtctaaaacaggaatggattgaagtatgaagagtactgtacaggaaaatgagcattggtccaaaatttgccatggcctgaacatcatagtcttttttttttttttgtaaaggaagcaggatatagggaagtgaatgatgttaggaacagaaaatgtgacagtatttcttaactatgggtagcattatcttgagaatatagttgggttttaaaaggtatgataaaaatgttttatattttaacctttcatactgatgtaacagcaatgcatttgcagttaaagaaacatttgatacattgagttaaggtcatttttatcctgctgcctcagataattgattacaatagaaacatagttcagagaaaactaatctttaactctgaaaagtgtttattatataaagctaaatgtaggtagattctatgtagtgacttaactcattaaaacaaaatttatgcctcataaaatatttagaaatttggagaataaattaattggtggtattatgtacgtctattttaaagagaccaggctagatgtatcttttctagtttgcagaagctggagcctcttggtaataaatgtctatgtgtactttgcacataggtgggttacgatgggaatatatgaaacatttacaaccactattccttttcagattcaaatctctggatcagtgctgtctaatagaaatttttgcaatgatggaaatagtttatatctgcactgtctaatatggtactccctagctacatgtgactgttaatcatttgaaatgtgtctagcatgactaaggaactgacttttaaatgtgatttaattcttattaatttcattcagatataaagagccatatgtgactgttttgtagacatatgtgacatccatattagtgcagctctagatctttaatgcgtagtgatgttttgttcaggaatctttagactttagtagcacaaaactcatagacttatgactctgaaatcatcttgactttatattatagtactccagaatcgagatctcatatccttgattttgagtcttgagctttggattctgatcacagtttgcctgactgatttcagcatgattccggtgttgaacctctcatttcctgagcctatgcctgataccaggtttctcatcattccagctgcttttttgtctgttactattgttctgcccttatttcccsgcacaatgctgctatcctctagtggagtggttgcttacaaaattgatttacttagagacttggtgttatctttgcatcctgttaccttattctacagataacagttgtcagatatctgtctgcattatcttttactctctattcttctcctttatcactgtgcctatactattttatgctttcattactacttacttgggctattgaattagcctcttaattccagtttccagtatccttcttgactttattaatcttccaccttacactagaaatcttccttaaataaaactgtgattgcagttgtccctggttatccctgggggattggttccaggcccctccccttcccatgggtacaaaaatccatggatgcttgagtcctttatataaaatggtgtagtatttacatattctctctacacatcctttcatgtactttaaatcacctccagattatttataatacctaaggcaatgtaaatgctatgtaaagagttgttatactctattttttacttgtatttttttattactgtgttttttttccttgaatatttttgatttggggttggttaaatctgtggatgtagaaacctcacatacagagagctgactatgtatagtttgtctagtcattgcatttttggactctttaccagtcctatagaataacgcccaaattcctagtgtagaatgtgaaacccaattattacctcatgacagagctgcagcccttacttggaaaaagtaaatgaactaacacagatgagcagtctttcaaataatgagaatagaaaaatgatatggaaagctttctaggtaaaaacagtaggcatgtaacttgtttaagactcttccttgatgttttctggtaattttgttcttggtttaacaccatttgaaaattaagctaaattatgtttcaaaataattaaaatacaaacaatgaaatatatataaggtatttggataaaaagtaataccctatttgtgtaaagaataatacaggatttaattttgcttttattcatgctttgcctagagaaaaaaattaagtattataaccctgggagctatgataaaaataatcagaagaaagaaaaccacagggaagaagagttagtcccccattgaacagcgaccctgttcttattgttaagagtttattattgttcatctgttagaggacttgagattttactaattaaggaggccattcctttacaacaccaaaatatgtttccaacatcaccttcctctagtcttctgaaattctagtcaagctgaactatttgatcttctctctgtccatctgtgcacccttttaatttaaaaagcaatttaactggaatagatctcaacttcagttctgtatatccttagttgggctcataaatcaccttataaggataacacctggaggtccttctcccttctccaaggagaagtactcttttcttcctctgaatttccataacacattctcttacggcgcttttcacatttgactttatgtcagccattactactcctctaaagcctgtttaagttctgtaaagagttcgagattgcattaaaatgaatctttgaagacaaatggctgcttaacaagtgtcctgcagaggtatggtatccatatgagattatgacccttaatcttgccttctgcttaagtttcagatctgggatgagatttctgtggtcagaaagttccaggaaaggttgttttctggatttgctgatgataaaattacccatctctgagttctagttttagtacaggttgaatatcccttatctgaaagtcttgggaccagaagtgtttcagatttcaggttttggaatatttgcctatgcataatgttgtatcttggggatacaacccaatattcatttatatttcatatacacatagcctgaacgtgattttatataatattttaaataattttatgcgtgaaacaaagttttgactatattttaactgtgacccatctcatgtggtcaagtgtggaattttccatttgcagagtcatgtttatactcaagaaattttgaattttggagcattttggatttgggatgctcaacctatacttagagttaaaagaagactgaactgctatttttgaactgagtgatgggacccagccttctctgaggtcaaacagcatatattcagggctcacaggtcactctttttgaacaggttttccctggggaaaaaaataggcaagttgtgttcaattaccctgtgggctatcaattatagttacctcctacactaaagagacttgcttttaaacccatgagtcaccatttatcttcaccgctactgtgtaatgaaatctaataactcgttgcctggcaatagtatgtatgttaaattctgtgccttataatttatcagagacttacaccaaggttatattagcaaacttgaccctatttgaaccccagcaattcaagagggctaattgtgtcatcctactcagcttcttaagagaataactctgtaaatttagacatctacagttatcaagtttatacaactgcattgaaactgagttggtacagaccttgttaaggtaatttgtattgactgtctagaagtcagctcttaaaatatagcttagctcagggaccataacttttgacgtctcttgttcgtttgcttttgacaactcattcccaagtgagtagaaaaagaaaaacaaactcaatttcttccaccatactctgacagcacatttctgataccagatgtgtggggatttctccccaccagcaagcaagcgagcaagcaagcaggcaagcaagcaattctgtagtagacataagctaggtgtcctataattcaattatttctttttcttttctttttttttttttttgagacagagtctcactctgttgcccaggctggagtgcagtggcacgatctctgcccactgcagtctctgcctcctgggatcaagcaattcttcctcaacctcctgagtagttgggactacaggcacatgccaccatgcccagctaatttttgtatttttagtagagacggggtttcaccatgttggccaggctggtctcgaactcctgacctcaggtgatctgcctgcctcggcctcccaaagtgctgggattacaggcatgagacaccatgcccagcctaattccattatttctgacaccatctacctggagatagcgtcagatcatactggttaaggactcagtccgacaagactgatctccacttctgatgccaatagcaagcctcaggttattttgcctgtgcttctgaccaaccagctgtaaatcagggttcccacagccccctccctgggttcaggtaatttgctagagcagctcacagaactcaaggaagcatgtttactggcttattacaaataatattttaaaggatacaaatcaacagccagatgaggagatacaaaggacaggtctggaaggggcctgagtacaggagcttctgcccctgtggagttggagtataccaccttccttgcttgtggacatgttcttgttcactttcctggaagcccccacgtgtttggctattcacaagctcctcagacccagtcctttctggatttttataggagcttcattttataggcatgattgagtaaatcattggccattggtgagcaatttaagctttagtccctctcctctctctggaggttgggtagtggggctgaaaacccccatcatctaatcctgtcttggtctttcaagtgactagcctctatcctgaagctacctagaagctgccagccatcagtcaactcattagcatacaaaaagacactttggagatcctcaggagtttaggagttgtatgctaggaaacagggactggactaaaaccaaatatgtatttcacaatatcacaccaagtctgactttaatcaccttcctgccaactattagtagtcattggaactactcgtctgcttgtcttctgctttcttcgtattgatttatgtaatttcattgaggtgtgtatttatctggtgctgggccaggacatgatgggaagattcgggaactaatctgagaacctatcatttgacctgtaactcttaattctaaatagctaaatgaatgtatgatatactgaaattattgaaagaccctggatcaaggtagaagacagtggagcagtgctgtggtgccattctgaaaggagaaatctctctttgtcttgactattaatcatagaatcagggagtgggctttggtagaatacacagatttttctctttttttgttttctttcttttttattttaaactagaagcttttagagtgtgtttgtatgctgtgaatgatatggacaagaagaatatgagatttaattttgtttgcatgtctaagtgtttgaaagctcaattcattatcttattattattattatcattatactttcagttctggggtacatgtgcagaatgtgcagttttgttacataggtatacacgtgccatggtggttcactgcacccatcaacccgtcacctacattagatatttctcctaatgctatccctcctctagtcccccaccccccgacaggccctggtgtgtgatgttcccctccctttgtccatgtgttctcattgttcaactcccacttatgagtgagaacatgtggtgtttggttttctgttcttgtgatagtttgctgagaatgatggtttccagcttcatccatgtccctgcaaaggacatgaactcttccttttttatggctgcgtagtattccgtggtgtgtatgtgccacattttctttatccagtctatcattgatggacacttcggttggttccaagtcattgctattgtgaatagcaataaatatacatgtgcatgtgtttttataatagaatgcttcataatcctttgggtgtatacccagtaatgggattgctgagtcaaatggtatttcttgtcctagatccttgaagaatcgccacactgtcttccacaatggttgaactaatttacactcaccaacagtgtaaaagtattcttatttctccacatcctctgcagcatctgttgtttcctgactttttaatgatcgccattctaactggcatgagatggtatctcattgtggttttgatttgcatttctgtaaggaccagtgataatgatcatttttcatatgtttgttggctgcataaatgtcttcttttgagaagtgtctgttcatatcttttgcccactttttgatggggttgtatttttcttgtaaatttgtttaagttctttgtagattctggatattagccctttgtcagatggatagagtgtaaaaattttctcctattctgtaggttgcctgttcactctgatggatggtagtttcttttgctgtgcagaagctctttaattagatcgcattggtcaatgttgccttttgttgccattgcttttggtgttttagacatgaagtctttgcccatgcctgtgtcctgaatggtattgcctaggttttcttgtaagatttttgtggttttaggtcttacgtttaagtctttaatccatcttcagttaatttttgtataaggtgtaagaaaggggtccagtttcagttttctgcatatggctagccagttttcccaacaccatttattaaatagggaatcctttccccattgcttgttgtgtcaggtttgtcaaagatcagatggttgtagatgtgtggtgttatttctgaggcctctgttctatcctattggtctatatatcggtttggtaccagtaccagaggaaagaacaggcagtaatgattgctgttctgcagcctctcctggtgatacccaggcaggcaaacagggtgttttggttactgtagccttgcagtatagtttgaagtcaggtagcgtgatgcctccagctttgttctttttgcttaggattgtcttggctatgagggatcttttttggttccatatgaaatttaaagtagttttttctaattctgtgaagaaagtcaatggtagcttgatggggatagcactgaatctatatattactttgggcagtatggccatttttgtgatattgattcttcctatccattagcatggaatgttttttcatttgtttgtcctctcttatttccttgagcagtagtttgtagttctccttgaagaggtccttcacaacccttgtgagttggattcctaggtattttattctctttataacaagtgtgaatgggagttcactcatgatttggctctcttgtttgtctgtttttgttgtataggaatgcttgtgatttttgcatattgattttttatcctgacacttttctgaagttgcttatcagcttaaggagatttggggctgagacaatggggttttataaataattgaatcatgtcatctgcaaacagagacaatttgacttcctctcctcctaattgaataccgcttatttctttctcttgcccgattgccctgaccagaacttccactaccatgatgaataggagtggtgagggagggcatccttgtcttgtgctaattttcagaaggaatgcttccagtttttgcctattcagtatgatattgcttattggtttgtcataaatagctcttattattttgagatacattccattgatacctagttcattgagagtttttagcatgaaggggtgttgaattttgtcaaaggacttttgtgcatctattgagataatcatgcggtttttgtcattggttctgtttatgtgatggattacgtttattgatttgtgtatgttgaaccagccttgcatcgcagggatgaagcctacttgatcgtggtgggtaagctttttgatgtgctgctggattctgtttgccaatattttattgaggattttcatatcgatgttcaccagggatattggcctgaaattttctttttttgttgtgtctcttccaggttttggtatcaggatgatgtcggtgtcataaaatgatttagggaagatttcctttttttctattgagtggagtagtttcagaacgaatggtactagctcctctttgtacctgtcgtagaattcagctgtgaatctgtctggtcctggacttttttttggttggtaggctattaattactgcctccatttcagagcttgttattggtcggttcagggattcgacttcttcctggtttagacttgggagggtgtgtgtgtccacgaatttatccatttcttctagattttttagtttatttgtgtagaggtgtttatagtatcctctgatggtagtttgtatttctgtgggatcagtggtgatatcccctgtatcattttttaatgtgtctatttgattcttttcttattcttccttattagcctggctagtggtcaatatattttgttgatcttttgaaaaaaatagctcctgaattcattgattttttgaagggtttttcgtgtctctatctccttcagttctgttctgatcttagttatttcttgccttctgctagcttttgaatttgtttgctcttgcttctctagttcttttaattgtgatgttagggtgtcaattttagatctttcctgctttctcttatgggcatttagtcctataaatttccttttacgcactgctttaaatgtgtcccagagattctggtatgttttgtctttgttctcattggtttcataaaacatctttatttctgccttcattttgttatgtacccagtagtcattcaggagcaggttgttcagtttccatgtagttgtgcggtttcgagtgagtttcctaatcctgagttctaatttgattgcactgtggtctgagagactgtttgttatgatttctgttcttttgcctttgctgaggagtgttttacttcccattacgtggtcaatcttagaataagtgcagtgaggtgctgagaagaatgtatattctgttgatttggggtggagagttctgtagatgtctcttaggtccacttggtccagagctgagttcaagtcctgaatatccttgttaattttctgtctcgttgatctgtctaatattgacagtagggtgttaaagtctcccactattattgtgtaggagtctaagtctctttgtaggtctctaagaacttgctttatgaatctcggtgctcttatattgggtacatatatatttaggatggttagctcttttgcatttatccgtttaccattatgtaatgcccttctttgtctcttttaatctttgttggtttaaagtctgttttatcagagattaggactgcaactcctgccttttttttttttttttgctttccattttcttggtaaatattcctccatcactttattttgagcctgatgtgtctttacaggtgagatgggtctcctgaatacagcacactgatgggtcttgactatccaatttgtcagtctgtgtattttaattgaggcatttagcccatttacgtttaaggttaatatgtgtgaatttgatgctgtcattatgatgctagctggttgttttgccctttagttgatgcagtttcttagtagtgttgatggtctttacaatttggtatgtttttgcagtggctggtactggttgttcctttccatgtttagtgcttccttcaggagctcttgttaggcaggcctggtggtgacagaatctctcagcatttgcttgtctgtaaagtattttatttctccttcacttatgaagcttagtttggctggatatgaaattctgggttgaaaattctttttcttttggcggatcacgaggtcaggagttcgattccagcctgaccaacgtggtgaaaccccgtctctaataaacatacaaaagttagctgggcgtggtggtgcgcgcctgtaatcgcaactactcaggaggctgaggcaggagaattgcttgaacctgggaggcggaggtggcagtgagctgagattgcaccactgcattccagcctgggtgacagagagagactccatctcaaaaaagaatactggccctcattctattctggcttatagggtttctgccgagagagatccgctgttagtctgatgggcttccctttgtgagtaacctgagctttctctctgggtgcccttaacattttttccttcatttcaacttcggtgaatctgacagttatgtgtcttggggttgctcttctcaaggaatatcattgtggtattctctgtatttcctgaatttgaatgttggcctgtcttgttaggttggggatgttctcttggataatatcctgaagagtgttttccaacttggctccattccccctgtcactttcaggtacaccaatcaaacgcagatttggtattttcacatagtcccttatttcttggaggctttgttcatttctttttattcttttttctctaatcttcttgctttatttcatcaagttgatcttcaatctctgatatcctttcttccrcttgatcaattaggctattgatacttgtgtatgcctcacgaagttctcgtgctgtgtttttcagctccatcaggtcatttattttcttctctacactgattattctagttagcaattcgtctgaccttttttcaaggttcttagcttccttgcattggattagaacatgctcctttagctcggattagtttgttgttacccaccttctgaagcctacttctgtcagttcatcaaactcattctctgtccagttttattcccctgctggtgaggagttgtgattatttggagaagaggcgttgtgttttttggaattttcagcctttttgtgctggtttctccccatctttgtggatttatctacctttggtctttgatgtttgtgaccttcagatggggtctttgagtggacatgctattcctttctgttgttagttttccttctaacagtcaggcccctttgcttccggtctgctgcagtttgctggaggtccactccagaccctgtttgcctggatgtcaccaggagaggctgcagagcagcaatcattactgcctgttctttcctctggaagctttgtcccagagggacacctgccagatgccagccagagctcttctgtatggggtgtctgtccgcccctactgggaggtgtcttccagtcaggatacatgggggtcagggacccacttgaggaggtagtctgacccttagcagagtttgaaaactgtgctgggaggtctgctactctcttcagagccattgggcagggatggttaagtctgctgaagctgcacccgtagccaccccttcccccaggtgctctgtcccagggagattggggttttatctgtaagtccctgactggggctgctgcctttttttcagagatgccctgcccagagtggagaaatctggcagtctggcctcaatggccttgctgagctgcagtggggtccacccagttcaaacttttgggctgctttgtttacactgtgagggcaaaacgcctactcaagcctcagcaatggcagatgcccctccttccaccaagcttgagcatcccaggtggatctcagacagctgctgtgctggcagtgagaatttcaagccagtggatcttagtttgctgggctctgtggcggtgagatctgcagagccagaccacttggctccctggctttagccctctttccgggggagtatagggttctgtcttgctggcgttccaggtgcccctgtggtatggaaaaaacaatacaacaacaaaaaaaactcttgcagctagtttggtgtctgcctaaatggccgcccagttttttgcttgaaacccagggccccggtggggtaggcaccggagggaatctcttggtctgtggattgcgaagactgggaaaagcgtagtatctgggctggaatgcactgttcctcacggcacagttcctcacagcttgccttggataggggagaaaattccccaacctcttgcccttcccaagtgaggtgatgccccaccctgcttcagctcgccgtctttgggctgcatccactgttcaaccagtcccagtgagacgaactgggtacctcagttggaaatgcagaaatcacccaccttctgcgtcaatcttgctgagagctgcagactggagctctttctattcaaccatcttgcctgggaacacacacatttttctatttgaatgttgccccgggtggtactgttactcttcttttccagtctttgccaccccacatgtaggcagttgccggtatgaaataatcaaaaggataagaatccagcttaaaagagtttattcaaacacaaagctgtggatgcccatccaggaaacacagactccaaggaaatagggtcagtgcttcaaagttgaaaagttaagatcatatttgtataggcagaaaacaaagatatttagcagaataacattttccacacaaagttggcttctgagttacagcaatttgattagttacagcttgtttgttttctttttccaatttaaaagaatatatttaacagtccatcttagaaagtgtgtctttgtgtaagagaagaaaaagggaagttaatctataatgaagatcaacagtaaagagggaaggagtcttctttgacatcctttagttatttgcagcatttagcaaagcagtgtaagttaggggggaataaaaggctaatctgtagtcagggaaatcaaggctatgtctgcctaggttacagctgcctgttagtgactgaggtcccaaaatcacattcctttaaggctcagaataaaagttccaaaatttggttttgaattacttattttcacacaatgaaaatatgaagaatgactgagcattgacagggagatgagttcattgggtggtattatttgcttactgcttgttttttgcctacactaataaaagttgtcaatacttgtgaggatagggaacagaaaaaaatgaaaaactatactttagtccagtagttctcagtgaggtcactggatcagaaactccatcatataagaacttgttagaagtgtggattatctggccccacccaagacttagtgaatcagaaaccttggggacgagaccagcagcctatgttttaagaaaccttcaaagtaattgtgataacctatttcaccccagggattggcagtctgcagcctatggacctaatctggtctataacctgtttttttgtaagtaaaattttattgaaacaaaaccatacccatttgttcattttagtttatggatgcttttgtgctacatcagcagagttgagtagctgcaatagagaacatatagccaaaagtatttaccatcaggttctttacagaaaaagtttgctgactcctgctttaggccttaggcactagaggcgcaaactctgaatttatgaggatatatttgctaattaaattgagaaccatgaggaaaaaaggtgaaacttttcctgtttttaaaaattttaacctgttatttttcccttttagtcaaggatgctatctaaatgggccttttaattcaaatctactgactatcccgaagcaaaggtcatcttctgtatcactgactcaccatgtaggtctcagaagagctggtaagaaatcattctttatgactcaaatatgggggttctcaaagtatatggtagtgtaaacacttttcatcacatatttatagctaattttgaatacaatttcatgtrttataagttaacatgacttagcagtttgggttggctactaattgaccgtttgctaattctttcagtaaaaacagttttagaacatctactctgtaccaggtattttgctaagcagtagggattcagagataaaatatataactatttaactaacctgaatggttgcagacccaggacaagggaaaatcttcaagaaagagtatttttttttttcatagaatgataattgtggagaaaaaaattttaggattagaatagaaaaaaccatgacttcatcctggaaaaacattatgataggaattttttttaattaaaagattatagaatgattaaaaactcttggatgcaagatattttaataaatacaacataggaatagcaaagcaatactgatattgtgcttttaaagtacattatggctgatatcacataggtacaattttgtgattgggatatacaattacaaaattcttttatacacaataacctataaagcatgtgaagagatcagaaaatattattgataatcaagaaaagtaggcactagaaaaagatctatatatgatattgatgctgtattttacaatctttaaaataacaatgatgtttaaaaggaaatagaaggaataatggccaaaatgaatggatacttcgaatagagaactagaacacatagaaaagaaatggacagtctagaactgagaaatgcacttgattaaattaaaagcttattcaagggtttaagaatggattggatacaacagaatacaaaagtagtgaacttgaagacagagaaatagaaaatacccaaactgaagcacagagaaggaaaaatacataaataacagaacaaagtttaaaagacatatgggacacagaagttctaaaatatgtgtgactgaagttccagaaggaaaggagagaaacaaaaggacagaataacttcgcaaaactaataaaagaaagcaaacaacaaattcataaagtgcagtgaaccccaagcaggataaatacaagaaaatcacagctagatgtatgaatcaagcctccaaattataaagaaaaagtttcaaaagcaaccaagcaaggttgtttttatttttcaaggaacaacaataatgatattgacagtgacttgttaacagcaactgtgaactccaaagacaatggcatatttgaaaaagtgtggaaagaataaaacttgacagcatagaattctttatccaatgaagaaatattcttgaaaaattaaataggaataaaaattttttttagtatcctcacttccctgcaacagtaactgtggtgatgggtatgttaattaatttgattgtcataatcatttcacagtaaaaatgtaaatcaagtcattatgttgtacaccttgaatacatgcagtttttgtcaattgtacctcagtaaatctggaaaaaatcttttagtaaatcagatgagaagtagaaaaacgtacatttttttcaaacaaacaaaagctgaaataatttgtagctggcagacctgtgctactaagattcagtaaaggaagtttcttaggcagggggaaaattatccagattgaagcatggaactacaagaacaaaccaaaagcactggtaaggctaaatagatgggtgaggattaaaaagtgttgatgggtcaaaaagttggcaaaggatatgaatagacacttctcaaaagaagacatttatgcagccaacagacataggaaaaaatgctcattatccctggtcatcagagaaatgcaaatcaaaaccacaatgagataatatctcacgccagttagaatggcgatcactaaaaagtcaggaaacaacagatgctggagaggaggtggagaaataggaaggcttttacacagttggtgggactgtaaattagttcaaccagtgtggaagacagtgtggcgattcctcaaggatctagaacaagaaataccatttgacccagcaatcccattactgggtatatacccaaaggattgtaaatcatgtggctgggcgtggtggtgcacgcctgtaatcccagcactttgggaggccaaggcaggcggatcatgaggtcaggagatcgagaccatggtgaaaccccgtctctactaaaaatacaaaaaaaaaaaaaatcagctgggcgtggtggcaggcacctgtagttgcagctactcgggaggctgaggcaggagaatggcatgaacctggaaggcagagcttgctgtgagccgagatcgtgccactgcactccagcctgggtgacagagcaagactctgtctcaaaaaaaaaaaaatcatgctactataaagacacatgcacacgtatgtttattgtggcagtgttcacaatagcaaagacttggaaccaacccaaatgtccatcaataatagactgaataaagaaaatgtgaggccgggcgcggtggctcatgcctgtaatcccagcactttgggaggccgaggcgggcggatcacgaggtcaggagatcgagaccatcccggctaaaatggtgaaaccccgtctctactaaaaatacaaaaaattagctgggcgtagtggcgggcgcctgtagtcccagctatttgggaggctgaggcaggagaatggcatgaacccgggaggcggagcttgcagtgagccgagatcccaccactgcactccagcctgggcgacagagtgagactccgtctcaaaaaaaaaaaaaaaaaaaaaagaaaaaaaagaaaatgtggcacatatacaccatggaatactatgcagccataaaaaaggatgagttcatgtcctttgcagggacgtggatgaagctggaaaccatcattagcaaaccatcacaagaacagaaaactaaacaccgcatgttctcactcataagtgggagttgaaaaatgagaacacatggacacagggaggggaacatcacacactgggaccaatctgaggctggggggctgggggagggatagcgttaagagaaatacctaatgtatatgacgagttgatgcatgcagcaaaccaccatggcacgtgtatacctatgtagcaaacctgcacattgtgcacatgtaccctagaacttaaagtataataataataaaaaaattgatgggtaaacacaataataactttcttttagcatttatgaaatacataaaagtcaaatatataacaatagcatagagggtagtcaaggggtaaatggaattaaatttgtcgtaaggtactagcaatgcttgaaaaacagtaaaaagttctaatttaagagaagctaatattcaaagatgaacattgtagtattcagggggccaattaaaagaccagtagaaaaagatataactaaaaagcttataaggaggtaaaatggcatgattaaaaaaagcttgaataattcaaaagaatctgagaaaagaaaagcaaaaacagaagaaacacacaaaaaataaatagcagcatggtggattaaacacactttattacattaaatatacacctttggggtagaggaagggatctgactagagttgtcagtatattatctgaaatgtcaagttttcaacaaaaattggactttacgctccaattaaaagacaaagattaggctgggcactgtgactcacacttgtaatcccagcactttgggaggctcaggtgggtggatcacctgaggtcaggagtttgagaccagcctggccaacatggtgaaaccccatctctacaaaattcaaaaatacaaaatacaaaaattagccagacgtggtggtgggcgcctgtaatcccagctactcgggaggttgaggcacgagaatcgcttgaacccgggagacagagattgcggtgagccgagattgtgccactgcacttgagcctggacgacaaagcgagccttcgtctcaaaaaaaaaaaaaaaaaagtaatcttctgactgctcattggttgatgtccaaattatactgatccccccagggatgacttctaggaaaccatgcttaaaaatataatcaaaaacttaagagaaaaagctaacagaaaactgagtaactacacattgcaggagaaacagaaactacacaattagttcaggtaagtcactaaacaaattatcagaaagaagaaaacacaaagccagcaacataataaacctttggtgttggagggatctgatatcaaaactttacagtattttatgtaaaatgtacgattttcaagaaaaatatgtgaaacatgcaaagatacaagaaatttttgacatgtacccaaggaaaacgtaacccatagaaattatccctgaagtggattggattttagacttagtataaaacaaaactgtaacattgttttaataattataaagtaaggctacttttactcaatattggattagaggttctagccagggcaattaggtgagaaggaataaaaggaaaaagtaaaattgtatttgcagatggcatgagcttgtatatgtaaaatcctaagaaattcactgaaacctattatcaccaataaataagtttatcaatgtggcaggatatacaaaatcaattttatttctatatgctaacattaaggaatccaaaactcaagttacagaacgatttctgtttacagttagcattgaaaaaatctttgaaataaatttarcaaaatagtacaagacttttacaatggaaactataaaatattgttgaaattaaagaagacctaaatatattggaagacattccacgtttaaggatcagaagacttaatattattaagatggcaatattctttgaattgcactagattcgatacagtccttatcaaaatttcagctttgccaaaattgacagtctgatgctaaaattcgtatagaaacgcaagagtcccagaatagccaaaacagttctttaataaaaaagaagaaaaagtacgaggactcccactttcaaattttaaaacttactaccaggctacagtaatttagtatggtactggcatagagatatttctattcaatgaaattcaatttggcagtttctcaaattttaaacatgaagttaccatatgacccagaaattctacttcttgatatatatccaagagaagtgaaaccgtaggtccacacaaaaacttgtgcataaatgtgtatagcagcattattcataatagctaaaattagaaacaacctaaatggctatcaataaatggttaaacaaaacgtggcttaaccatacagtagaatattttttgtcacaaaagtgaaatggagtagtattcatatgccatgaatgaaccttgaaaacattatgctaagttaaataaggcagtcacaaaagactacaaattgtacaaatctactcatataaaatgtctaaaatggacagatctatagatagagaaagtatattagtggttgctatggttttaatgcttgtgtacttccaaaattcacatgttgaaacctaatccccaatgagacagtattaagagatggggccttttggagatgactaagcatgaggttggagcctttgtgaatgagattagtgctcttataaaagaggcctgaggaagctagctatcctgtcagccatgtgaggatacagtgaaaaaagtaccatctgtgaggcagaaactgagccctaatcagacatcaagactgctggcaccttggtcttggacttcccagcctccaaaaactgtgagcagccaagttctattgtttacaaattgcccagactaaagtatttttttttttttaggtggtatagatggaattttaatacagtgaaagaaaatagggagtactgagttaatggttttgggtcatctttataattatctggtagaagactgaatttccatcttacatattatatacacagaaatctacagattggctacaatttaggtgttcaaaatgggaattaaaagtattataaaagcatataagattcagaaagtttaaatagataaatattttctaataataaaaccattaaaagttgataacatttttttttcttttatttattattatactttaagttttagggtacatgtgcccaatgtacaggttagttacatatgtatacatgtgccatgctggtgcgctgcacccactaactcgtcatctagcattaggcatatctcccaatgctatccctcccccctccccccaccccacaacagtccccagagtgtgatgttccccttcctgtgtccatgtgttctcattgttcaattcccacctacaagtgagaatatgcagtgtttggttttttgttcttgcgatagtttactgagaatgatgatttccaatttcatccatgtccctacaaaggacatgaactcatccttttttatggctgcatagtattccatagtgtatatgtgccacattttcttcatccagtctatcattgttggacatttgggtcggttccaagtctttgctattgtgaataatgccgcaataaacatacgtgtgcatgtgtctttatagcagcatgatttatagtcctttgggtatatacccagtaatgggatggctgggtcaaatggtatttctagttctagatccctgaggaatcgccacactgacttccacaatggttgaactagtttacagtcccaccaacagtgtaaaagtgttcctatttctccacatcctctccagcacctgttgtttcctgactttttaatgactgccattctaactggtgtgagatggtatctcattgtggttttgatttgcatttctctgatggccagtgatgatgagcattttttcatgtgttttttggctgcataaatgtcttcttttgagaagtgtctgttcatgtcctttgcccacttgttgatggggttgtttgtttttttcttgtaaatttgtttgagttcatcatagattctggatattagccctttgtcagatgagtaggttgtgaaaattttctcccattttgtaggttgcctgttcactctgatggtagtttcttttgctgtgcagaagctcttgagtttaattagatcccatttgtcaattttggcttttgttgccattgcttttggtgttttagacatgaagtccttgcccatgcctatgtcctgaatggtaatgcctaggttttcttctagggtttttgtggttttaggtctaacgtttaagtctttaatccatcttgaattgatttttgtataaggtgtaaggaagggatccagtttcagctttgtacatatggctagcgagttttcccagcaccatattaaatagggaatcctttccccattgcttgtttttctcaggtttgtcaaagatcagatagttgtagatatgcggcgtgatttctgagggctctgttttggtaccagtaccatgctgttttggttactgtagccttgtagtatagtttgaagtcaggtagtgtgatgcctccagctttgttcttttggcttaggattggcttggcgatgtgggctcttttttggttccatatgaactttaaagtagttttttccaattctgtgaagaaagtcattggtagcttgatggggatggcattgaatctgtaaattaccttgggcagtatggccattttcacaatattgattcttcctacccatgagcatggaatgttcttccatttgtttgtatcctcttttatttccttgagcagtggtttgtagttctccttgaagaggtccctcacgtcccttgtaagttggattcctaggtattttattctctttgaagcaattgtgaatgggagttcactcatgatttggctctgtgtttgtctgttattggtgtataagaatgcttgtgatttttgtacattgattttgtatcctgagactttgctgaagttgcttatcagcttaaggagattttgggcttttttttatagcaagttgaatgaactaagacagtggtcccttgtgactatgggtaggagcgacaggaatagagaatgactgctaatgggtctatggtttctttttgagtttatggaaatattccagaattagatagtggtgatagttgcacaactctgtggatttctaaaattcagtgaattgtacaatttaaaatagtaaattgtatggtatatgaatgatatcttaaaaggctgtttaaaaaacacgtaagcatgttctgtcaccacagtggaattagatttgaaaacatctctcaatagatctgcagaaaatcctcaaattataaataacctatgggtcaaagaagaaaaagcaatgaaaatcagaaaatattttgagctgaataataatgaaaataggacttattaaaatgtcggaagaagctaaagcagtgctttcttgggaaatttatagcaaaaaaagagaaaaattaaaaatctgttaagcttacattttaagaagctataagtttcacagcaaagtaaaccaaaagaaagaagaaaacatgacactgatacaaaaagattacactgatacaaaaatgataaaaaatctgaagagtcatatatcttctaacgaaattaaacctgtagttaaaaaccttcttacaaataaaattgtaggtccagatgactttactggtaaattcttccctatatttaacgaaaatgttgttatgaaaggttatatccaatgccttagttttctatagctgcttgctgtaaactgcatattcatatctcctcacttacaccccaattcatgtgttgaaacctaatcctcagtgtgatggtatttggagctggggcctttggaatgtgattaggtcatgtgagtggactcttcatgaatgggatgagtgccttataaaagagacctcaaagagctctctaatcccttccgccatgtgaggacacgagaagatggccgtcagtgaaccaggaagtgggccatcatcagacaccacatctgccagtgccttgatcttgcacttcccagcctccagaactgtgagaataaatttctcttatttataaaatacctagtctatggtattttgttatagcaatccaaagggactaacacactactgtatcaaattaccatatgcttagtgacttaaataacacaaatttatacttataattctggaggtcagaagtttaaaattgatctcattgggcccaaagcaaggtgtcagcagggctatgtgtcttctggaggctttagggggtaatccattttctttgcattttccagtttccagaggccytcctagagcttgcctgcctggattcctggcccatggccccattactccatcttcattgccagcaatgtcagtctgaatcctgacgctgccatctctctggctcttttatgtctgcctctctcttttacttaggcataggacttagccgtgtgtgactcctgtaatgacaagaacccttgtcattacattgagcacaactacataatccaggataatctccccatctcaaggttagctgatcagcaaccttaaggccatttgcaatttaaatatccctttgccatgcaatctaacatataggttctgtggtttaggatatggacatctttgggggtgattattctgcttaccacagccaatcttacacaactctttcactgaaaagggaaagaggaaacaccagttttttatgaggccagcataaccctaatattgaaacctgacaaggatattacaagtaaattagaggccaacatctcttgtgaatatagatacaaaaatcctaaacaaaaagttacacatataattgagtaatatattaaaatgataataccataatgttcatgttgggaagtattattacaggaatataaagtctgtttaacctttgaaaattcactgcattaatagaataaaagagaatactcatatggtcatcttaattggtacagagaaagcttttcatgtatgttcatttgataaatttgataattatgataaaaaattataagcaaattgggaatagaggggacatttttaatctgataaagtatctatcaaaaatgtttttcaaacataatacataatgaaatactgaacatttttctcctgactttggaaacaagataaagatgttcactgtaaatacttgtctccaacattatcctgtaatttctagacaatgaatgaagacaagataaagaaaaggaataaatattggaaaggaagatataaacccttttatttatttgcagattaccattttgtatacatggaaaatctagaaggctctaaaaatatagtaatagaattaataagtaaattttgcaatattttaattgtacagaaaaattaattatattactctatactatcagaaaatggttaaaatgaaatttaaaacaccatttaccacagcatcaaaagccaccaattacgtagagataaatttaataaaaaatatgcaatgctgctacactccataacttcagggaaaaatttccgtaacaagacataaaaatacttaccatatgggattagatgaataaatttgactacatgaacattcataacctctttattgaaaaaagtcatataaaggccaggcatggtggctcacgcctgtaatctcagcacttagggaggctgaggctggtggatcatttgaggtcaggagttcgaggccagcctcgtcaacatggtaagaccccatctctactaaaaacacaaaaaaattagctgggcgtggtggcgggcacctgtagtcccagctacttgggaaagctgaggcaggagaatggcatgaacccgggaggtggagcttgcagtgagctgagatctgagatcacgccactgtactccagcctgggcaactgagtgagactccatctcaaaaaaagaaaaaaaaaaaaagctaggtgtagtggcgggtgcctgtaatcccagctatttgggaggctgaggcaggagaattgcttgaacccaacagatggaggctgcagtgagcccagagtgcaccactgtactccggcctgggcgatagagtgagactccatcaaaaaaaaaagtcatataaaaagaattgaaaatagtaacaacatctgagaaggaactagaattcagctgtataaagaactttgtcagtggaagaattatggacaactattcattttctattgctgcatatcagattacaacaaatgtagcagcttttgtgcaagagtccacacacagctgagtcctctgcttgaggtgtcataagtctcaaaacaagatgttggctctaccttgttctcatctggagaatcagctgggaatgaatcggctgccaagctcattcaggttgtcctcaggttgttcttcatttccgttggttgtggattcttgatggctctgggttctygatggctattggctgggggccacccacagttcgtagaggctgcccatagttttttgtcacatggkcttcctcagtatggctgcttacttcatggagctagcaagaagaatctctagagtgagtctctagcaagatggaattcrtaatgaaacataatcataggggtgacatcctgtcatctttcttttgataagaagctagtcacaggtgttttctacacaaagacatgaacaccagggggcaagggttaatgctaccttagagtgtgtccatcaccacaagccaatagaaaaattagcaaaagacttgaatgaggatttcagaaaaaaaactatacaaatagcatataaacatgaaatgtgcttaaccttattagtaatgaggaaattaaaaagtaaaggtacggtgctcttttatttatcatcagattggcaaaagataaagaacattatatttatacacacacacacacacacacacacacacacacgcagagaaagagagagaaagtttgttttaagggattggctcacacaactgtgtgggcttgcaaggcaagcaagtaggaagttttcaggacaggctggcaggctgaaaattccagcagggttaatgttgcagtcttgaacctgagacaaaattttttcctctttatgagacctcagtcttttctcataaggccctaagctaattggatgaggcccacccatgttatggaaattaatctgctttactcaaagtttattgatttaaatgttaatcacatctgaaaaatatcttcacaacaacatctatactagtgtttgaataaacaactgagcaccataaccaagttgacaccatcgcacacatctgtaagtgtttaccactatgcctgaaaatattgtagctccttaatgactgttacttgttttcctttctgaatgagactttacttgggtctttatttttcaaataaggttataaatctgcctgcatctttccagatatacccacactgctttagtttgaggcactcagcaaaggtttctggaataaatagacagaattatagactcatcttatgtgttcctgaagcactctgttttgttcccttattaagcacttagcacttgtttgtattcttcactacactctagcttcattgaatttcagggatggtatctttttcttcattgtgaaaaccagtatattttccagcatatagtaagctctaaatatttgttgaatgaatgaatgagctggaaatactttcatgtaatttttaaagcgatctgacattgcattaacatatgatgttattctcaacttgcttaaatgctattaagaattttagttcttacttttacactgttggtgggactataaactagttcaaccattgtggaagatagtgtggcaattcctcaaggatctagaactagaaataccttttgacccagccatcccattactgggtatatacccaaaggattataagtcatgctgctgtaaagacacatgcacacctgtgtttattgcggcactattcacagtagcaaagacttggaaccaacccaaatgtccatcagtgatagactggattaagaaaatgtggcacatacacaccatggaatactgtgcagccataaaaaaggatgagttcatgtcctttgcagggacatggatgaagctggaaaccatcattctgagcaagctatcgcaaggacagaaaaccaaacaccatatgtcctcactcataggtgggaatgaacaatgagaacacttggacacagggtggggaacatcacacactggggcctatagtggggtggggggacgggggatggatagcattaggagatatacctaatgtaaatgatgagttaatgggtgcagcacaccaacatggcacatgtatacatatgtaacaaacctgcacattgtgcacatgtaccttagaacttaaagtataattaaaaaagaaaaaaaaagaattttagttctttggccagatgcagtggcttaagcttgtaatcccagcattttgggaggctgaggcaggaggatgacttgagcccaggtgtttgagaccagcctgggcaacatcttgaaaccctgtctctacagaaaaataggtaaattagctgggcacggtggcctgtgcctgtagtctccaaggccagaggatcaattgaacccaggaggttgagtctgcagtgagccatgattgtgccactggaatccagcctgggcaatgaaatgagaccccatctcacagacaaaaaaagagaatttaaataaaatttaattttattgaattgaaaataattcaataaaatttggtagagatgctttgctcttgtggataatcaatctgatagggacacataggtgaaagttaaagaccaataggaattaggaaaatttctgccatacagtatgtatgttttagtcatactgttcacatttacctattataaatgtagatatttacccaacaaggggtgtttacccaacagccattgatcatgacaaatatggcaaatattgcataagtttctagaatattgtgaggccccatgcaggaatttataatttatttgtaaataatctgctttttttaaataaggaaaaaatccataaaaacacaaatatatttaataaacatacacacataaatacattcttatttatctatctcctttcttttaatttttaaaggtgttttgtccagtctgagtcctgtgaattcttccaaccatggaccagtgtctactggctctctaactaatcgatcacccatagaatttcctgatactgctgattttcttaataagccaagcgttatcttgcagagatctctgggcaatgcacctaatactccagatttttatcagcaacttagaaattctgatagcaatctgtgtaacaggtaagtttcccaactgtttattatttctgtttcaaaatgttgattacagttaagtcctcaacattttggataggttcttggaaactccagctttaagctaaatgaccatagtttttttcggtgttataatgaaatgacattattttaagatgtgctataagttgtttcacttaaaatgtcagttttcaaaaacttattgatgatattgaggactttactgtattttaataaagtattaccagttttctagttctatgttataactagatgatggattcagcctatattcttttccttatttatctagtagtttttattctaaataaatatcttctcattttagtggttattaattttttaaattaaatggtctccatctgagctaaaatataatggtattctacccatcctaagatcttagtaaatattaaagtattttagtatacactactttagtacctattcatagtacccagtaaatggtgtttgatcttatttctgctttactaatagtaagggtttacctcagatccaatgttgacttttcaaaaatattttgtttccttcaaggacacacagatactttctaggttaaagcctttgaactttatggagagattggaattttaggatgcgttgcagttgggatcttggttaaaaattaaacagattttctaattgtgttcaggtaaaaaacttgtacctcatttaccgtatatatttatctattttattctataagctgtggacatcaaatgctgaaatatgtttcaacatctgaatcagatggtacagattgctgcagtggaaaatcaggtgagattacaaaagtcatatgtatttgagttyaagagaaatttcttacaatgatttttagaatgggaaaatgaatgagtttaacttcagtttatccatctttaaaatgaagattattattttttacccacttcacagaggacttatttagaacaaattataagtaatagatggtgaaagtaattcaaagaataaaaatgtcccatacaaatgaatgtagtcttcttaggttatgtctattgtttataaatagtggaattatttatattaaacattgaaatttgtagtgcacaatctaaatccaaacggttttgcataaattttttatggcataaagaggggttgttttaaagtgtggttaattatatcattctgaaatattttgtatcctcatacaagacatattgtgttgatgaaattatagttgttttataaccttaaaatttgatgactcaaactaccagtagtagttaactaagtaactcagaccaacatttcccctgagggcagctagaaaaggtggatgaattatttttttwaaaaaaatctacttgaagccattgaagaactaaaaaaatcttatgaatcaccagtacaagatctgttggaagacagaactccaagaaagtgagcctggagtttggggctatcaaaagagtgtatgccaattccacagagaccaatgactgataggatgagcaattttattagcagcttcatggggctaggaagacagaggctagagttgaaggcttgccatggtttggataacttgataaactctaaagtgttgtatcctaagaaaaaagttaaaccaaaaatagataagccttttcagggattataggttcttctcaatccctttacataccataaaacttacccttttaaagtgtgcaatttaatagttttttgttttttacattttaaaggattgttaacaaataaaataaaataaaaagactaattcttcacaaactcttccaaaaaatagaagaggagggaacacttcccaactcattcttttttttttttttgtatatcattacaatggaattcagttcagcaattaaaggaataaacttctgatacatgctgcaacatagatgaacttcaaaacattattctaagtgaaagaagccaggcccaaaagatcatatattatatgattacatttatatgaaattcttgaaagacaaatttatagagacaataatcagaacagttgttgcataaagtgagaatagggattaactataaataggcatgaaggaacattttgggtgggggtgttgagaatgttctaaaattggattgtaatgattgttgataactgcaaatatactaaaattgttaaattgtacacttgtgggctggatgtttgtgttcctccaaaaattcatgtgtcgaaatcctataccctgatatgacggtattgggaggtaaggcctttgggaggtaattaggtcatgaaggtggatycttcatgaatgggattagttcccttataaaagaaccccagaaaactctctttcccaccctctttcccaccgtgtgaggatacaatgtgaaatcggtagtctgcaatactggaacttggccaggctggcaccctgatatcagacgtccagcttccctaactgtgagaaataaattcctatttttttataagccactcagtctgtagtatccaattatagcagcctgaactaaggcattttacaatgggtagattttaatggtatgtaatttatactcaataaagtttttaaaaagaacaataatttattaagtgtcatatttctttgggtggactagcctcaactgggagattctcacctgaggactttgatgagattgcagtcagtgcagtcagatattggttggggaagcagttatctgaaggattgattgggcagaatttccaagatgggttactcatgtgccttttggctattgaccagtccatctaaatatgacccctccatgggcttcttcagtttgttggcagcattccaagagagtaggaagtggaaactaccagttcagttaatggctgaactcagaacagagtgtcacttctgccatattctgttatcagagcagtcatgaggcctgttgagattccagagggttggtaaataaatgctctgtcttgatagaggagtgacaagaatacatttcagaaaagtgtttgggacaagagatagtgttgtagacatctttagaaagaaatgcttcatttacctcacctgtttttattattatctgtaagataatagttattaggagttcatatcattaaaaagtaaattatgtaatatacctcaagtgcaaacaacttttagattaacttctattttagaatatcattgtagttattgccttaccttaccaagaatactcgaatagtctaaatttaatttcttagactaattgtttttcatttggaaaaaataatattttctaaacagtaatacttccagatcatcatctaatcaattaatgattggtatattcattgtattaagttgagattatactgacatttattaatcacctattatgtataacatcttgtaagatgggtattattatccaaattttacaggggagaaagcttgccattattaagtacgaaaatcaggatttgaacctagttttctgaaactcaactccaatgattactcttaagaatttttttttttttttttgagacagagtcttactctgtcatccaggctagagagtacagtggcacaatcatggctcactgcagcttccaactcctgggctcaagcaatcttccctcctcagtcttctgagtagttgggactacagcaccatgcccggctaattaaaaaaatttttttttgtagagatgagaactcgctctgttgcccaggccagtcccaaacttttggcttcaagtgatcctcccgccttggcctcccaaagcactaggattataggtatgagctgttrtgcctggccaagatctctttttacaaaaaaacaaacaaaactctacatattgagcttatagcatgtaattatcatataatcagcacccagatccagaaacaaaataagaggctggccaaaatggccaactagaagcagctaatgtgcactgctgtcatggagagaaatagaaggggtgagtacatacagcaccttcaactgaaacatacatgtacacatgttgggattcatcaagaaaacaacccacagagaatgtagaaaagcaaggcaggatgactgcccacctgggagtgacacggagccaggggagcctccctcgcccagggaagcatgagtaagtgggcaaccctggggacccatgcttctcccataggtctttgcaacccttgggtcaggagaccctcctcgtaaacccactgcaccagggcttgcagtctgatatgcagagctctgtggcatcttggcagagtagctgctcaggcacatgtggagccccaggagctatagatacttgggtttctaggcaaaagcagctgcaacttggcaaagtaggaggttagacccccatacagacccctaagaagtagctgaattcaggggtctgagcagcaatggtcttcaggtcccatgtccacagcaccttgcaggataagaccactagcttggaactccagccagccactggtagcagtgttgatggagctcccagagggaggggtaggctaccatctttgctgttttgcagccttagccattgttgccttcagtgtaaccaccctacaaaaatgcagccagcttgcttttttatgtgggtccctgacctctcttctcctcactgggcaggacctcccaaccaaggtaaccagccactcttgccactgtttttcagctggcagtggttccgagcctccctgagatagtgctcccgggggagggacaggccgccatctttgctgtttcacagccttagccattgttgccttctggctctaggaagtccaaggtgactaggtactggagccgtctctcaccgcagcacagtagctctatgggaaagcagctagactgctttttcacatgggtcccagatcttatttcttttcactgggcagaatcctgtgaccaaggtctacaaccacccctgctagtgttttctgtccagcaacagtttcaaactttgctgggatggagttcccagagggaggggcaagctgccatctttgctgttttgcagccttaaccattgttgcctttgggatttggagagtccaaagtgactgggggctgcagcagaccccaaacacagcccaactgttatataaagaagtggccagactgcttttttacacaggtcctcaaccctatttctcctcactgggtgggacctcccaactagggtgtccagccatctctgctggtgttttctgaccagcagcagtttcaaacctccctgggatggagctcccagagggatagggggactgccatctttgctgttttacacccttcactgttgataccttcaggtgctagataaaccaaggtgactagggactggagtgtacccccagcatactgcagcagccctacagaaaagtaaccagattgtttgttacttgggtttccaatctcatatctcttcactgggcaggtcctcctggcctgggtctccagctcccctcacctccaggctatcaagccagtagcagctctggaactccctgggaaagaactcccagtgggaggggtgggttgctatctttgctttctcacagccttaggctttgctgtcttcaggctttggagaatctgtggggaccaggggctagctagtccatacccgagcacagagtatccacctcacagaaaagtggtcrgactgttctccacgtaggtcctggtcctcacttctcctctcaacctggtactctagcacaaacacgctgtccctgtcagaccacatcaatcagaggcagcccagcagttaaaggaagagccacatgcagagataagaaagaaccaatgcaagaactccagcaacctaaatggtcagtatcttatgacctccaaacaaccacactagttcttaaccaggctgagctggctgaaatgacagaaatagaattcagaatatggataggaacaaagataatcaagatcaggagaatggcaaaacccagttcaacaaaactaagaatcacaataaaatgatacaggagctgacagatgaaatagccagtatgaaaaggaacctaactgatctgatagagctgaaaaacacactacaagaattttgtaatgcaattccaagtacagcaaaagagaccaagctgaggaaagaatcttgaaacttgaagactgactctctgaaataagaaagtaagacaaaaattattttaaaaagaatgaaaaggaatgagcaaaacctctagaaatatgggattrtgtaaagaggccaaatctacacatcattgacatccctgacaggagaaagcaaacaacctggaaaacatatttcaggatatcatccatgaaaacttccccagccttgctagagaggccaacacccaaactcaggaaatacagagaactcgtgcaagattctactcaagaagatcatccccaagatgcataatcatcagattttccaagtttgaaatcaaggaaagaatgttaaaggcagctagaaagggcaggtcacctacgaagggaacctgatcaggctaacagtggacatctcagcagaaaccctacaagccagaagagcctgggctcctatattcaacattcttaaaaaaaaaaaaaatcttcaagaatttcatatccagccaaactaagcttcctcagtgaaggagaaataagatccttttcagataagcaaatgctgaggaagtttgttactaccatttgttactacgagacccacttaaaagagatcttgaaaagagcactaaatatgaaaggaagaaccattaccaggcaatacaaaaaaacacagttaagtacacagacccagtgatgtaaagstaccacacaagctggcttaataaccaggtaacagcacaatgacaggaacaaatccacacacatctatactaaccttgagtgtaaatgggctaaatgccccatttaaraggcatagagtggcaaactggattttaaaaaaagtaagacccaatgatacactgtcttcaagagacccatttcacaggcagcaacacccataggctcaaaayaaagggatggaggaaaatctaccaagcaagtggaaatcaggaaaaagcagaggttgcaatcctaatttcagacaaaacagactttaaaccaacaaagatcaaaaaaggcaaagaagggcattacataatggtaaagggttcaattcaataagacctaactattctaaatatgtattcacccaacacaggagtacccagatttataaagcaagttcttagagatctacaaagtgccttagactcccacacaataatagtgagagacttcaacactccactgacagtattaggtcactgaggcagaaaattaacaaagatattcaggacctgaactcaatatgggaccaaatggatctgatagacctctacagaactctccactcaaaaacaacagaatgtacatttttctcattgccacatggtacatattctaaaatccatcagacaaccctcagcaaatgtaaaagaactgaagtcatgccaaacatactcctggaccacagtgcaataaagatagaaatcaagactaaaaaaaatcactcaaaaccatgcaattacatggaaagtaaacaactggctcctgaatgacttttgggcaaatagtgaaattaaggcagaaatcaagaagttttttaatacgaatgagaacaaagatacaacctacaaaatctctgggacacagccaaggcagtgttaagagggaaatttatagcactaagcagccatatcaaaaatttagagagatcccaaattaacaacctaatatcaccactaaaataactagagaagagagagcaaaccaacccaaaagctgacagaaaacaagaaatagccaaaatcagagctgaactgaaggtgattgagacacaaaaacaccatccaaaagatgaatgaaaccaggagttgattttttgaaaaaattagtaagataaataggctgctagctagagaaatacagaagaaaagagagaagatccaaataaacacaattagaaatgacaaagggggtggtaccactgaccccacagaaatacaaccatcagagactactatgaacacctctttacacacaaactagaaaacctagaagagatggataaattcctgtacacataacccctcccaagactgaaccaggaagacatggattccctgaatagaccaataagaagctccaaaacggaatctgtaataaatagcccaccaaccaaaataaataaataaaaataaagcccaggaccagatggattcacagccacatcctaccagatgtacaaagaagagctggtactatttatactgaaagtagtattacaaaaaactgaagaggaaggactgaaagtattacaaaaaaatgaggaggaaggactcctccccaacccatactatgaggccagcatcattctgataccaaaacgtagcagagacacaagaaaaaaacaaaacctcaagccaatatccttgatgaaaattgatgcaaaaatcctcaacaaaatacttgcaaaccaaattcagcagcacatctaaaaggcaatccaccatgatcaaataggcttcatccctaggttgcaagtttggttcaacatatgcaaatcagtcaacctgattcatcacataaacagaactaaagacaaaagccacatgattatctcaatagatgcagaaaaaggcttttgataaaattcaacatcccttcatgttaaaaactcaataaactaggtattgaaggaacatacctcaaaataataagaaccatctaggagaaacccacagccaacatcacactgaatgggcaaaagctggaagcattccccttgaaaacgggcacaagacaaggatgccctctctcaccactcctatttaacatagtattggaagtcttgaccacagtaatcaggaaagagaaagaaataaagggcatccaaataggaagagaggaggtcaaactatccctgtttgcagacatgattctatatctagaaaaccccgaagtctcggcccgaaagctccttaagctaataagtaacttcagcagagtttcaggatacaaaatcaatgaacagaaataactagcattcctatacactaacacagccaaaacaagagccaaaccaggaacacaatcccatttacaattgccacaaaaagaataaaatacctaggaatatagctaatcagggaggttaaagacctctacaatgagaattacaaaacactgctcaaagaaagcagagatgacacaaacaaatggaaaaacattctgtgctcatggataggaagaatcaatatcattaaaatggtcatactgcccaaggcaatttatagattcagtgttattcctaacaaactaccaatgaaattcatcacaaaactagaaaaagctattttaaaattcatatggaaccaaaaaagagcctgagtagccaaggcaatcctaagcaaaaagaacaaagctggaggcatcatattacctgatttcaaagtatactgcagaactgcagtaacaaaatatcatggtactggtacaaaaacagacacatagaccaatgggacagaatagagagcccagaaataagaccacatgcctacaaccatttgatctttgacaaagccaacaaaaacaagcccattaatggggaaaggactccctattcaataaatggtggtgggataactggctagccatatgtagaagattaaaactggatcccttccttacaccatatacaaaaatcaactaaagatggtttaaagacttaaatgtaaaacccaaaactataaaaactctggaagacaactgagtcaataccattctggatatagatactggcaaagatttcatgacaaagatgccaaaagcaatcataacaaaagcaaaacttgacaaatgggatgtaattatactaaagagcttctgcacagcaaaataaactatcagcagagtaaacagacaacctatggaaagggagaaaatttttgcaaactatgcatctgataaaggcctaatatccagcacctacaaggaacttaaattgacaagaaaaaacaaacataaaaaagtgggcaaaggatatgaacagacaatttgcaaaagaagacatacatatgggcaacaatcatatgaaaaacagctcagcatcactgatcattagcgaaatgcaagtcaaaaccacaatgaaacaccatctaacaccagtcagaatggctgctgttaaaaaggcaaaaaataacagatgctggcgatgttggggagaaaaagaaacacttatacactgttggtgggagtgtaaattagttcggtcattgtggtagacagtgtggtgattcctcaaagacctaaaaatagaaataccatctgacccagcaatcccattactgggtatatatccaaaggaatataagtcattctcttataaagccacatgcgtgtgtatgtttattgcagcactatttacaatagcaaagacatagaatcaacctaaatatccaccaatgatagattggataaagaaaatatggtacatatacaccatggaatactatgcagccataaaaagaatgagattgtgtcctttgcagggacatggatggaactggagaccattatccttagccacaggaacagaaaaccaaatattgttatgttctcacttataagtgggagctaactgatgagaacacatgggcacatagaggggaacaacacacactggggcctgtcagagggtggagggtgggcggagggagaggatcagaaaaacaactaatgggtactaggcttaatacctgagtaatgaaataacctgtacaacaaacccctttgttacatgcttacctatgtaacaaacctgcacttgtaccactaaacttaaaaaataaataaatgaaaaaaaatcacagctagtgaagtagtgaggctaggactcatttctataagtagtatttagatttgaatccagattctattttactatatagtttgggctctatcttatatgtccatagtggaaaagtaataaatgattatcatagtttttctaagagaaaaggcaaagaaaagaagatgtagtatatatacatcatggaatactatgcagctataaaaaagactgaggtaatgttttttgcagagacatggatggagctggagtcaaactaacataggaacagaaaaccaaatactgtcacttataagtgggagatgaatgacgagaacacatggacataaagaggagaacaacagatactggggcctacctgatggtggagggtgggagaaggaagaaaatcagaaaaaaatagtaattgggtactaggcctagtacctgggtgatgaaataatctgtacaacaaactccatgacacaaatttacctatatgacaaacctgcacatgtacccctgaacctaagataaaagttgttttttaaaaaagaaacaaaatattacccacacctcaaaattacccatcatgaccccttccaatcatatgccccaaagataatgatctttttgtctttcatacgcttttgaacttttcttaaagagaatcagagagtatatacttttatgcctggcttccttcactaaacattatatttttaagtaccatccatattgtagttcattctctttgctctgtagtgatcaattgtgtaaatataccacaagttatttattctactgtcgataggttttgggtaatttccctgtttaagatattacaaatagaatgaatatgaatgttttttaacacgtgaatgaatgctatttagctatgaatactgctcttcttttccatgtgatttgagaaaagaaattattacattggtagagatataactcaccattaataatattatggtttaaggtttacatgtgatttaatcttattgatttgtaattatgattttagaatttttatctaaaactcagagatgttggaaattgtttatatcaaattggtaagaaaatttctattgataggaactttttctttttctcacttttataaagaatatccacttagcatccatgagtagatatgaaaggtgagtccaatacaggaagtgtctttgttgcctgagcataaggtatctaggcaaaatagcacaggaagatacaacttaatggtatcgtgaaataatttagattgarctccattatgattcattttatctaaatatttttaacaattatttttcatgtaaagctgtacatatagggcacattttactcctatatattactatatatwttttttgaaaggtgaagaagaaaacattttctcgaaagaatcattcaaacttatggaaactcaacaagaagaggaaacagagaagaaagacagcagaaaattatttcaggaaggtgataagtggctaacagaagaggcacagagtgaacagcaaacaaatgtaaaagataaactttcaatatgattatgttaaggtgaaatataatactgttagtactggtttcattacttttgcccagaacaagatttttaatatartagtattttttaatttttttacttataagtcactataactgaaatattgcttgggttacaaataatacagtaacttgttctaattctatcatcctaaagcaacaaactgcattcagttttaaatgaacatattttatttagttttatataaaatatattattttctattctgatattttcttttgcgtatgtgaaggtatagagaatatgtgcatgttactaaaaacaatgaaaacaatgtatttataatggcaatatagttttgttcttaaatttcaaaatttaggcttttarggaaaagaaacacctatttcttttgaaaaattatcctggtaataaatgccaatataaggatatggttttttttcctcttaccctttgatacctgtaactactaaaatgaaaataatagactttggatttgtgtagtaatttggaaatataatacttttattcataaaagtaatataagaagattaataagtcttacacccaggagttatgtttttagtttttgaagataacattctagaaagagaaattagaagggcagataagactatatttaagaataaccattatagaaaatagtactgacttttttaaatgtttaatcctaagtgttctcattgtaatatatattttacagtatttataaaagataaaataaagttgttgtttccctgtatgtacagattgaacaggaagtatcactggacctgattttagtagaagagtatgactcattaatagaaaagatgagcaactggaattttccaatttttgaacttgtagaaaagatgggagagaaatcaggaaggattctcagtcaggtttgctttcaaatatctactttttaactgtaaattaatttttcttaaatctttataaaaagcaaaatctaatatgtaatggtttaagcactagttcaacaatgacattgttcattatttttttcagaaaaaaataaatatatacataaaacaattatatataagatgtagatcatactattatatatatgacaagtagtttatttgaccatattaatgggatttaatttatgccaaagaaataataaagatttacattttcttgaatgtggaggttgaaaaggatatgaaaatatcatctagttctaaccattgcaatttaagcttcatttttttcacctgcactccctatactttacccaaggccggatgattcatttcatgctagaaccatgggaaagtactttgattttaccacccagactcagggttatacctgatgggtccgcataacagcatcagattaactgccccaaaatattactctcattaattactttcatatcttatttatgaaatgcaaaaacgtaaggataaattttgtgaaatatataagttcatttaattgaagttcttagggataaaaatgtgataaacttagtattgttttgaattttgtttttaatacccaggactagattagaatagaattcacatgaccttcagtaaattaggaataaaaagctaaggagaagaatggaaaaattaaaaattgggacatgatatgtatggtaagccttctttaattttcagtggctttagggtgacatcttccattctgatttttttgaaagaattaattgtaggcaagttttaaataaattattaaagacgtatattaatacatggttaacattccagaawacaaatcacaaaaacattatactcagctacaaatagaaattctgatttttaaagtaaactttattttaattgacatttaggttatgtataccttatttcaagacactggtttattggaaatatttaaaattcccactcaacaatttatgaactattttcgtgcattagaaaatggctatcgagacattccttgtaagtattaacatattttattatttaagttcaaataatatgggttttgaaactctttatcatctttctcttcagatggtcccttaaacacttttaaaactgcttgtttgaaattttcttttttttttttcttgagacaagagtcttgatcttgtcgtccaggctggagtgcaatggcgcgatcttggcccactgcaacctccgccccccacgttcaagtgattctcctgtcttggccctcgcaggtagctgggattacaggtgcccgccaccacacccagctaattttttatatttttagtagagatggggtttcaccatgttggccaggctggtgctgaactcctgacctctggtgatccacctgccttggcctcccaaagtgctgcgattatagacgtcagctgccgcgcctggcctgaaaaatttttaaatggagttttaaaaagaatatttgtattatactacctagatttaactgactactgttaacattttgtctgttttttgttaacattttggtatatattctccaagagttcttacataaatttattttttgtaaaggtggtcataatattgatacatatttatgatctgctttttcacctggttgttatacagtatacatctttctatttttaaaattaattgcctgtgtactttatctttttaaaagttagtcaagagtttcagaaaatcattcacttaaaaatgcttaaaattgatcatctaatttcagtttttaactgtgttctgatttatggaataatttaatggctattatatattatgtttgaatataatttgagtttcatattagaaaaagatggactgtctttatatattgtctacagtttccctccatgtggacacatttttgagaaattaattctataaatagtgaattattcttcaattggcataactcactaataatgtttaataatttaagatgagttacatatactataatttccacttatatattgtgcattcaaaaaagtggttggattttataaatggaatatagggatactttaagatggacttcaagggaaatggaacgaaaagaaagaggtggtaaggagtcttcactgtcagcttcagttaggatacattagttaagaaaatagtctctggacctaacttttctaaactttaaaaatttgtgaatgagaataacaatagtacctactccataggtagtactaatataagataattaatgtaaagcacgtatcagaattcatgacacttagtaaattgttagtaaaaggtggtgatttattaataataattaagttcccagtgtacgccatgtcatatctataggcaaaacaatattattttatctactaatgcatacatacacattaaatatttgttgaagtgttaaatttttattggatatcgacattaactgcaatcattagattcacataggttatcttattcaatcttttttggcaaagttgtattatctaacttttataggtgagaagtaaactcagaaggatctttcccaagattataaaactagataccaaagtagtgtttcagttttaggtctatctgagttctgaagcctatactctttacactatgccacattgccttttcacatagttgaatttcaggaaatagatgttttattgatcatatatgatgtgtcagacactgtgctggatgctttcacatatttagtatttaattcctgtggcaagcmtgagacatagtatttctgacctttttgtgggggacacaaatgtaagtaaccagaatttgtaactgttctgtgtacaaaactgttttgtgtgcaaacatgggtctctgtaatccagacactacatgatatttttgaaagccagaaaatagccaccttgagaacattttccaatgcctttcaatactccttggttatcctgccttttctttggcacctttactatgttttcatagtatatgggaaagtttttaaaagatawtttttttaatacatcaagagactttagatgaaataaaattcaattgtggggaattagtctgtcacatcttttttatgaggatatagtatgactaggaaattattgtactttttaaatgttgtgtgttaaacctaacagaaaaacgttttggtgactttagatcacaatcgtatacatgccacagatgtgctacatgcagtttggtatctgacaacacggccagttcctggcttacagcagatccacaatggttgtggaacaggaaatgaaacaggtacttccttctacaaatctcttaattattttgatcaggaatagtaaatcaagctttctcatttcattacctctgttcttttaagtttttcattaagtaaccgtttagtacatacgaaggactgtgtacgtttttttaaccacttatccccaagttctactgtgtaagttttgatgcataataatgacatgaaaaattttaaacctgatacccatcttaaagatagattaatattcagtactgctggatctatcatgtttccttctttcccccattcttttgttttcctcactgaggtagccactatcccgaatattatgataattagtcctttgtttttttaaaaaaawwtttttttttgtttcaagtacatcacatacatttaaaatacataacattcaaaaaccaaagagaacattttcaaaagccttgcaaagtatttcaatgatgacrttaaaaacttttataaacaaattttgcttccaaaaaagttaatgctattccttatcataaatataatagtttatataaatacaatgaatcataacatttatagttctcttattctagcttattaaaagggccaggcctggtgactcatgcctataatctagcacttctacaggcttaggcaagaggatcacttgaggccaggagtttgaaaccagcctaggcaacaaagcaagaccccatctctacaaaaaaatttttaaaaaatttagctggatgtggtgacacacacctgtcctagctactcagaaggctgaggtgggaggatctcttgagcccaggagttcaaggctgcagtgagccatgattatgtcattgcactgacatatatcaagacagaatttgctcagttaccaatacttgagaaataacattaccatactaaccagtgtaaatgtcatagactcaaccactgatattactttttacattttggtagttgagtctaaagtatgcattatttgtttaatggatttgctttatgtcactggttcatttttgtctgccatctgtatttattctttctagtgcccttcattccttccaccagtcctgtgcttttattagagataattttcttcaacttttttgttttagctgtcattttgtcttagaagaatatatttatattttagcatgtttgaaggtattattccataatcttgtgactttcacagtttttgctgacaagtcaagacttaggtcatattgagaaatataatatataaatataatatgttcctttttctctttcctattggtttttagcattttaactatgatgtactcatgtaatttttttttgtattaatcctgcctgatgtttagtgaaccttttgaatatgttgattggtagttttttactggtttctatcatgctcttcaaaattcagcctctccattgtctaattccaaagccgctcccacatttttaggtgtttgtcacatcagtacctcacttctaggtgccaaaagtctgtattagtttcctattgctgctgtaataagttaccagaaatttagtcactgaaaaccacacaaatttattatcttacagttctggaggtcagaagtccaaaaaaggcttcactggagtaaaatcaaggcatcaacagaactatttttctcctatatactctagaggagaatttgtttccttgcctcctccaattacactccttggctcatggccctttctttctttctttctttgtttattttggagacggtgtctcactcagtcacccaggccagagtacagtggcttgatctcggctcaccgcaacctccgcctcctaggcgggttcaagcaattctcctgcctcagtctcccaagcagctgggactacagacgcacgctgccatgcctggctaatttttcgtattttagtagagatggggtttcaccatgttgcccaggctggtctggaactcctgagctcaggcaatccgcccacctcagcctctcaaagtgttaggattacaggcgtgagccactgtgtctggccggcccattctttaaagacagcagcataacatcttcaaatttctttttgaccctgaccttttgatctttccaaggaactagtgaaaatcaatccagctctgcaaccttggctttctgtgcagaacacacttaactgacagtgactctcttaattttagtctctcttgtagtctggataggctgagaatttcctgaattatcaagtccttattcctctttgcttacgagttctcccccaatctttctttttcctctcatatttactataaacagtaagaaaccagactacaccttcaatgctttgcttggaaatttcctcaactaaatgtctaagttatcatttgtaagttttgtattccacataactgcaacacctaattcagccaaattttctgttactgtgtaacacggattcccttgcctctagtttccaataacatgtttctcatttccttctgagcattcattggcaatgaccttaatgaccatttttctatctccagtctgttctcaatgacttaggtatagtattctctaagacaatatatgttttctctctcatgctgcacacttccttctgagttcttactagcagtgttatgagttctcatacatagtgttatggagccaagtatctgtagaagaaaggaaaccaagtagctttgggaaaccaaatagctattgcaatggaaaattatgatgaaaactaagacaagaaggaccatgggatgtgctgtcctattctcactgcactggagaactaatggaaaataaatgacaagtttagggctgtaattaatggttggagaaccaggtagcatctctgactgacctaaaagaaacccttattttttttttaatttattttattttattttttttttgagacggagtctcactttgtcgccsaggctggagtgcagtggcgcgatctcggctcagtgcaagcgccgcctcctgggttcatgcgattctcctgcctcagcctcccgagtagctgggaccacaggcgccctgccaccatggccggctaattttttgtatttttagtggagacgggttttcaccgtgttagccaggatggtctcgatctcccgacctcgtgatttgcccgcctcggcctcccaaagtgctgggattataggtgtgagccactgtgcccggccaagaaacccttattttttatagtaataggatcataacttctgaaaataaaacccaatgtctgatcctgaagttgcttgaaatacaatgcaaatgagtttgtggcctcagtagacttcttatgttagaattaagatatcaaatgggaaataaaggatcctgataatcaaaaagagatcatttggatagatttaaataaatgttgccttgtattccccaaatcctgctgattcttcatgctgggaagcagtcatttctccttgtgttgattgcctgaaaaccctgtaattacctcacttgagattcttgatttatagggaaataattcacttctaaatccaactccactgtcactcatttctttgagatccataattaaacttaaatcctgcagatcttaggggaataagtattaagtctgaacaccagaataatttaccaattcatrttggtagaaacctgggggatatatgtctgaatagacttaagggtgttagaccagggagaaaggaagatgtacctaccagagattctggagtcagtgtattagcttgagcaactggcagtggctctaacagtttgcctcatgagttgtctaaagtataggcatcagatgaagtagaattgttgaaactccttgtatactgtagaggaaggaatccagaagctcacaatgttaagatgttgaaatggggtgatcatattcaattttatcacccatccctaattttatccccaagaagtatcctcctttatcacagtggtgagaaatatatttcagcattaattcctggagagtgaaatgctatgctggtcctacagccagagttaggggcctatggaatttaggtgataaaaggattttggcctgggttcatctcataatggtagttagcagaaccacacccattttctgaatgtatagtttgagtaaacatattcagcaactgtcagaatcccttcatcaattccttgatctttggaaagaggaccatcgttgtaggaaggatcaaatggaatctccaggaattgcctcattctggcaaaacagtgaaccaaaagcagtataccacattcctagatgagttgcagaaatcagtgctactagcaaatacttaatagatgcaggaatggtgatttccatcacattgctgttcaacttaattatatagcttttacacaggataagtagatcctggaaaatgatggtggattattctcaatgtaatcaggtggttactctagttgctacagctgttccagatgtggtctcttcttttaataagttaacctaacttgtgatatttggcacagagcaattgatctggagagttgtttttcctccataactcatagcaaaattcacaagaagacatatatttacatctggcaggcatcacaatacacttctattgtcttagttctgggctatgtcaagtctttcattctctgttataatctagtctgttcccgtaagttatcaaggtcagccattacattgatgagataatgatgaatagctccattgagcaagaagtaacagatatcctagatgccttcataagagtgccagaagatgagagatgagaaaaattgctaaaaaattcagagatctgtcatatcattgaagtatactagggatccagtggtctaggacatgttgagatatttcctccgagttgagggataactgakacatttgaaattctctacataaagggctctttggattctgaaggcaaattcatgacttctgagtactattgctccaaaatactactgtaaggctgtatgtgcaacccagagcaagagaagcatgtgaagcaatttctactcgttgtgcaaattactctgccatttttccatctgactgccaaaagaaaatgtcttttgcagatagagatcccctttggagtctctagaagaccactacaagataattacagtgtaaatacatggagttttgaaacaaaaccaggcagctttcctcaaataattattttcctttctgtaaaagcagctaaattgttgttgcactttggtagaatctgaatacttggccatgggcactagattaccatgttacctgcccataatgaatttggggccctctgatcctccagttcataaatttgtcatgtgcagtagttctcaatcatcaaggggaagaattacttacaagattagttttgagttgctcctaaaagcacagaatgtaagttcagacttccatgacatttattcctaatacaccaatacctcttccttaatccatagttacggctttgtggggaattccctatgaccagttgacttaaagagaaagaccagttgccctggtttataaatagttctgcccaatatgccagtacttcctcaaagtggatagctacagcattgtaggatcactcaaaggtatcttttgaaaggtaataaggtaaatccttccagtgagcaggtcaagcggtgaatcagttggtcaagaaagagacatggccagctgaaaggatctgtactgatttatgatcagtagctaagagcttccttggatgctttgggacttagaaggaaaaatattttaaaattggagtttttaattggacaaggtgttttagttagggggtttatggctaaccttcccagagtggaaggtggatatttgtttgcgatgtgaatgcttactatgatgcttaattttacatgtcagcttggctgggcagtagtacctacatatttggtcagacattaattttaatatttccttcagggtattttttggatgagattaacatttaaattgatggactttaagtaaagcagataaccctccataaggtcggtgggcctcatccagtcagttgaaggccttaatagaaacaaagagtgacctcctctgagcaaacaggaattccaccagtagacagccttcagacttgaactggaatatcagctcttccttgggtctttagccaatcagcccaccctgcagattttggatttgccagcctccttaatttcatgagcaagttccttaaaataaatctctctctctctctatatatatatatataaaatatatatatgaattatatatattcatatatatatatgaataaccctcactaatatataatatttgccaaaggccattcactgcaaagaaggctcttgatgatcaggtggacaaaatgatctcttatcttatagcgatcagtctctttccctatgaactccagttcttattccgtgggtttatgcacacaacagctaagtgtattagtctgttctgacattgctataaggaaatacctgagactgagtaatttgtgaaggaaagaggcttaattgagtcacaattctgcggctgtacaggaggcatggctggagaggcctcaggaaacttacaatcatggctaaaggtgaagggaaagaaaacaccttcttcacacgatggcagaaaggagaagtgcaagcaggggaaatgccagatgcttataaaaccatcagatcttgtgagactcactatcatgagaacagcctggagaaaactgcccccatgatccggttacctctacccttagtcccacccttgacatgtggggattatagggttacaattcaagatgagattttgggtgggaacacagccaaacaatatccctaagatggaaagaatagagatattatgtatgggctaaataccgtgggcttcttctctacagcccacctggctcaggcctctgctgtgtgccttgctctccagtaagagagaccaatcgtgagcccttaatatggcaccattccctgagggaatattcagacatttgggtggtggtaggttgattacattggaccctttcctttatggaagagacagcttttgttctcatttattctggatgtagatttaccttcattgtctatagcgcttcaccatcgccatccttgaacttacttactgccttatttaccatctggttattataggtagtattgcatctgatcaagaaactaattttttttgcaaattgtggcagtgggcttatgcccacagagtttactaatctttccatgaaccttatcagtctacatcagacctgagagaatggtagaatgacatctttaagactcagatggggttcctgctaggcgtaaatattttgtggagctaacctgtgggataggagtactatcccacaagatgcgatttgttctttgaactgatgaccattatgtggtattctcttccattggttcaaatacctgtttttgtgctggtaccatgctgttttttgtttgtttgtttgtttgttttttgagacagggtctggctctgtcactcaggctggagtgcagtggcatgatctcagctcactgaaacctctgcttcctgggctcaagccatccttccacctcagcctcctgagtaactgggactacaggtgcatgccatcatggctggctaattttgtgtgtgttttttatagagatggggtttcaccannnnnnnnnnnnnnnnnnnngtcaagaaagagacatggccagctgaaagtatctgtactgatttatgatcagtagctaagagcttccttggatgctttgggacttataaggaaaaatattttaaaattggagtttttaattggacaaggtgttttagttagggggtttatggctaaccttcccagagtggaaggtggatatttgtttgcgatgtgaatgcttactatgatgcttaattttacatgtcagcttggctgggcagtagtacctacatatttggtcagacattaattttaatatttccttcagggtattttttggatgagattaacatttaaattgatggactttaagtaaagcagataaccctccataaggtcggtgggcctcatccagtcagttgaaggccttaatagaaacaaagagtgacctcctctgagcaaacaggaattccaccagtagacagccttcagacttgaactggaatatcagctcttccttgggtctttagccaatcagcccaccctgcagattttggatttgccagcctccttaatttcatgagcaagttccttaaaataaatctctctctctctccctctctctctctctctatatatatatataaaatatatatatgaattatatatattcatatatatatatgaataaccctcactaatatataatatttgccaaaggccattcactgcaaagaaggctcttgatgatcaggtggacaaaatgatctcttatcttatagcgatcagtctctttccctatgaactccagttcttattccgtgggtttatgcacacaacagctaagtgtattagtctgttctgacattgctataaggaaatacctgagactgagtaatttgtgaaggaaagaggcttaattgagtcacaattctgcggctgtacaggaggcatggctggagaggcctcaggaaacttacaatcatggctaaaggtgaagggaaagaaaacaccatgtttctcaggctggtctagaactcctgagctcaagtgatccacctgcctcggcctcccaaagtggtgggattataggcatgagccaccgtgcctggcccatgctgttttgattactatcgctttgtaatagattttgaaatcaggtagtctgatgcctccagctttgttctttttgctcaagattgctttggctacttggaatgtttttgtggtgccatatgaatttttttttctatttctctaaaaatgtcattttttttgttgctaagtatgtagaaatgcaattgatttttgcatgtttatcttgttccctgctaacttgatgaactaatttattagttctaatagtttttcagtagatttcttgggatttcctacatatacgagattaggccatctgtgaataaagatagttttgcatcttcatttccaatctggatgtcttttactgaggcgtccttttaaatgtgtcagcaaatttttaaaatcacagttttctgaaacgaagtgaataaatgggattctaagtagttatgtttcattgcccttgccaactgtgttcttttttgtactgttatttttttggaaacatatataagctaatgttttaagatcctaatatataaattccaagtaattactgaatttaaaaggaaatattttgccatgtttgatttttaaaatatattttaaaattgtagggaaagtccagaatgtgtatcacataggaaaattcaaattattgactctgtattgatatttaaagtcttattagaaatttgagtgcttacatatatcattatgcatataatttaactgcctcatgtttgctttttataattatttaaaaaatagctctaagccggtgtagtggtacataactctagtccaagctactcaggtggctgagggcaggtcaattgagatgaggaattwgagggtgtagcgtactattacgattggacctatgaatagctagctgctgcactccaacctgggcatcatagcaagaccccatctctaaaaacataaattttaaaaaaatgctctagtgtgggctattccaaaacttaattttgatacaaattataaatagcatgaaaataatgagatatatttataattgtcactagtgtattaaagtcatgttaaaaaattcttgtgatggtgtattgagtcaactaaaataggattaaataattcttttggactttaacaagccagagcattatttctaggttcccccaatgaatacaaccaaggaaactttgtacctaatatctgtggttttatgtgtctactttaaatatagtttctttttccttcttatactttttaaaggtttcttttgcaaaaataatagaatgatcatctagatagataaagccaccaaaaaagaagaaatcaatggtaagatattaagacaccagaagcacagtgtggatagtgaacatattgtttctaagaagaggataaaaatagagttatgttgactgagatgttccccagttttccatgccttttcattttccactattttttattccgttatattatatggagcttcatgaaagaaaacaaaagggagataaggagttgtagttagggctacaaatgaaatgtaatctttccggatgagatttgaaaagcatctatgtagagaagcttagtttggtaagatattaaattcctaaatctttgtaatgttttcatcaaattttattctctagtattgcctttttctgttatatcatatatcctggccattgtatctatctagtcattaaacagcaaatatttagaaaatcagaggtttttaaaattattatttgcctgagtaagcatcaaacttgtgtgagaatcctatcacgtcttgtaaagtaagcaacttcagggtcagatttaacactgttcctctctactaacatgttaaattgggaataatatactcttttaagttcatagattttagttcttacttaaatcagcaaataaaataagtaagcatattacctatgagaatcccctccatagcaaaattgtgaggaatttatgtgctaatgctggtttattttgctatttattgtttctcagattctgatggtagaattaaccatgggcgaattgcttatatttcttcgaagagctgctctaatcctgatgagagttatggctgcctgtcttcaaacattcctgcattagaattgatggctctatacgtggcagctgccatgcatgattatgatcacccagggaggacaaatgcatttctagtggctacaaatgcccctcaggtaggaaatatttttaagaacctttaaagagtaattctgaaattttcagtcatgctgtgtatccctttataaatcattcagttgaatcatatgkccaatccatctgactttaataccctacattttaattaattggataacacatggcattaatgtgatgtgtgctaggaaattaggggaagaatcaacttcttgaactagaaaataatagacagtttttgaaacaactcattgttttgtgaaattctagagtccttgctgtcaatatttttgtctttaatcaaaccagcaaaactctgactgtatttaagatttctgttccgctggagccaagatggccgaataggaacagctctggtctacagctcccagcgtgagtgacgcagaagacgggtgatttctgcatttccatcggaggtaccaggttcatctcactagggagtgccagacagtgggcacaggacagtgggtgcagygcaccgtgcgcgagccgaagcagggcgaggcattgcctcactcgggaagcacaaggggtcagggagttccctttcctagtcaaagaaaggggtgacagacagcacctggaaaatcaggtcactcccaccccagtactacgcttttccgacgggcttaaaaaacggcgcaccaggagattacatcccgcacctggctcggagggtcctatggccacggagtctcgctgattgctagcacagcagtctgagatcaaactgcaaggcagcagcaaggctggggaaagggcgcccgccattgcccaggcttgcttaggtaaacaaagcagctgggaagctcgaactgggtggagccaaccacagcccaaggaggcctgcctgcctctgtaggctccacctctgggggcagggcacagacaaacaaaaagacagcagtaacctctgcagacttaaatgtccccgtctgacagctttgaagagagcagtggttctcccagcacgcagctggagatctgagaacgggcagactgcctcctcaagtgggtccctgacccctgacccccgagcagcctaactgggaggcaccccctagtaggggcagactgacacctcacacggctgggtactcctccgagacaaaacttccagaggaacgatcagacagcagcgttcacggttcacgaaaatctgctgttctgcagccaccgctgctggtacccaggcaaacagggtctggagtgcacctctagcaaactccaacagacctgcagctgagggtcctgtctgttagaaggaaaactaacaaacagaaaggacatccacaccaaaaacccatctgtacatcaccatcatcaaagaccaaaagtagataaaaccacaaagatggggaaaaaacagagcagaaaaactggaaactctaaaaagcagaacgcctctcctcctccaaaggaactcagctcctcaccagcaatggaacaaagctggacggagaatgactttgacgagttgagagaagaaggcttcagacgatcaaattactctgagctacaggaggaaattcaaaccaaaggcaaagaagttgaaaactttgaaaaaaatttagaagaatgtataactagaataaccaatacagagaagtgcttaaaggagctgatggagctgaaagccaaggctcgaaaactacgtgaagaatgcagaagcctcaggagccgatgtgatcaaccggaagaaagggtttcggtgatggaagatgaaacgaatgaaatgaagcaagaagggaagtttagagaacaaagaataaaaagaaacaaacaaagcctccaagaaatatgggactatgtgaaaagaccaaatctatgtctgactggtatacctgaaagtgagggggagaatggaaccaagatggaaaacactctgtaggatattatccaggagaacttccccaatctagcaaggcaggccaacattcagattcaggaaatacagagaacgccacaaagatactcctcgagaagagcaactccaagactcataactgtcagattcaccaaagttgaaatgaaggaaaaaaatgttaagggcagccagagagaaagattgggttaccacaaagggaagcccatcagactaacagcggatctctcagcagaaactctacaagccagaagagagtgggggccaatattcaacattcttaaagaaaagaattttcaacccagaatttcatatccagccaaactaagcttcataagtaaaggagaaataaaatactttacagacaagcaaatgctgagagattttgtcaccaccaggcctgccctaaaagagctcctgaaggaagcactaaacatggaaaggaacaactggtaccagccactgcaaaatcatgccaaattgtaaagaccatcgaggctaggaagaaactgcatcaactaatgagcaaaataactagctaacatcataatgacaggatcaaattcacacataacaatattaactttaaatgtaaatggactaaatgctccaattaaaagatacagactggcaaattggataaagagtcaagacccatcagtgtgctgtattcaggaaacccatctcatgtgcagagacacacataggctcaaaataaaaggatggaggaagatctaccaagcaaatgaaaaacaaaaaaaggcaggggttgcaattctagtctctgataaaacagactttaaaccaacaaagatcaaaagagacaaagaaggccattacataatggtaaagggatcaattcaacaagaagagctaactatcctaaatatatatgcacccaatacaggagcacccagattcataaagcaagtcctgagtaacctacaaagagacttagactcccacacaataataatgggggactttaacaccccactgtcaacattagacagatcaatgagacagaaagttaacaaggatacccaggaattgaactcagctctgcaccaagcggacctaatagacatctacagaactctccaccccaaatcaacagaatatacatttttttcagcaccagaccactcctattccaaaattgaccatatagttggaagtaaagctctcctcagcaaatgtaaaagatcagaaattatggcaaactgtctctcagaccacagtgcaatcaaactggaactcaggattaagacactcactcaaaaccgctcaactacatggaaactgaacaacctgctcctgaatgactactgggtacataatgaaatgaaggcagaaataaagatgttctttgaaaccaacgagaacaaagacacaacataccagaatctctgggacacattcaaagcagtgtgtagagggaaatttatagcactaaatgcccacaagagaaagcaggaaagatccagaattgacaccctaacatcacaattaaaagaactagaaaagcaagagcaaacacattcaaaagctagcagaaggcaagaaataactaaaatcagagcagaactgaaggaaatagagacacaaaaaacccttcaaaaaatcaatgaatccaggagctggttttttgaaaggatcaacaaaattgatagaccgctagcaagactaataaagaaaagagagaagaatcaaatagacgcaataaaaaatgataaaggggatatcaccaccgatcccacagaaatacaaactgccatcagagaatagtacaaacagctctaagcaaataaactagaaaatctagaagaaatggatacattcctcgacacatacaccctcccaagactaaaccaggaagaagttgactctctgaacagaccaataacaggctctgaaattgtggcaataatcaatagcttaccaaccaaaaagagtccaggaccagatggattcacagccgaattctaccagaggtacaaggaggaactggtaccattccttctgaaactattccaatcaatagaaaaagagggattcctccccaactcattttatgaggccagcatcatcctgataccaaagcctggcagagacacaaccaaaaaagagaattttagaccaatatccttgatgaacattgatgcaaaaatcctcaataaaatactggcaaaccgaatccagcagcacatcaaaaagcttatccaccatgatcaagtgggcttcatccctgggatgcaaggctggttcaatatatgcaaatcaataaatgtaatccagcatataaacagaaccaaagacaaaaaccacatgattatctcaatagatgcagaaaaggcctttgacaaaattcaacaacccttcatgctaaaaactctcaataaattaggtattgatgggacgtatctcaaaataataagagctatctatgacaaacccacagccaatatcatactgaatgggcaaaaactggaagcattccctttgaaaactggcacaagacagggatgccctctctcaccactcctattcaacatagtgttggaagttcgggccagggcaattaggcaggagaaggaaataaagggcattcaattaggaaaagaggaagtcaaattgtccctgtttgcagatgacatgattgtatatctagaaaaccccattgtctcagcccaaaatctccttaagctgataagcaacttcagcaaagtctgaggacacaaaatcaatgtacagaaatcacaagcattcttatacaccaataacagacaaacacagagccaaatcatgagtgaactcccattcacaattgctacaaagaggataaaatacctagcaatccaacttacaagggatgtgaaggacctcttcaaggagaactacaaaccactgctcaatgaaataaaagaggatacaaacaaatggaagaacattccatgctcatgggtaggaagaatcagtatgaaaatggccttactgcccaaggtaatttatagattcaatgccatccccatcaagctaccaatgactttcttcccagaattggaaaaaactactttaaagttcatatggaaccaaaaaagagcctgcatcgccaagtcaatcctaagccaaaagaacaaagctggaggcatcacgctacctgacttcaaactatactacaaggctacactaaccaaaacagcatggtactggtaccaaaacagagatatagatcaatggaacagaacagagccctcagaaataacgctgcatatctacaactatctgatctttgacaaacctgagaaaaacaagcaatggggaaaggattccctgtttaataaatggtgctgggaaaactggctagccatatgtagaaagctgaaactggatcccttccttacaccttatacaaaaattaattcaagatggattaaagacttaaacgttagacctaaaaccataaaaaccctagaagaaaacctaggcattaccattcaggagataggcatgggcaaggacttcatgtctaaaacaccagaagcaatggcaacaaaagccaaaattgacaaatgggatctaattaaactcaagagcttctgcacagcaaaagaaactaccatcagagtgaacaggcaacctacaaaatgggagaaaattttcgcaacctactcatctgacaaaggattaatatccagaatctacaatgaactcaaacaaatttacaagaaaaaaacacacaaccccatcaacaagtgggcgaaggacatgaacagacacttctcaaaagaagacatttatgcagccaaaaaacacgtgaaaaaatgctcaccatcactggccatccgagaaatgcaaatcagaaccacagtgagataccatctcacaccagttagaatggcaatcattaaaaagtcaggaaacaacaggtgctggagaggatgtggagaaataggaacacttttacactgttggtgggactgtaaactagttcaaccattgtggaagtcagtgtggcgattcctcagggatctagaactagaaataccatttgacctagccatcccattactgggtatatacccaaaggactataaatcatgctgctataaagacacatgcacacgtatgtttattgcggcattattcacaatagcaaagacttggaaccgacccaaatgtccaacaatgatagactggatgaagaaaatgtggcacatatacaccatggaatactatgcagccataaaaaaggatgagttcatgtcctttgtagggacatggatgaaattggaaatcatcattctcagtaaactatcgcaagaacaaaaaaccaaacaccgcatattctcagtcataggtaggaattgaacaatgagaacacatggacacaggaaggggaacatcacactctggggactgttgtagggtgggggaaggggggagggatagctttaggagatatacctaatgctaaatgacaagttaatgggtgcagcacaccagcatggcacatgtatacatatgtaactaacctgcacattgtgcacatgtaccctaaaacttaaagtataataataataaaattaaaaaaaaaagatttctgctcctcctatttaggcccattgtatggctagaaagctataatggttgagaactattaatcttttttgttgttctcttttttcccttaagatttgccttaataccagagctaaaatctcttacttctgaatatattagtgtatgtaaaaattcttctggtatattatttttgtacctagtatagctggtaaaatataaaattcctttaaggtcacaatttgcatgaaagaggcaagagttctcaacaaatagatactgtaattgcaatagctttaaacattaggacttggwactaaatatgtgttgtgttttgctttgttttgttttttgagacggagtcctgctctgtcacccaggctggagtgcagtggggcattctcggcttactgcaagctccgccccccaggttcatgccattatcctgcctcagtctttggagtagctgggactaccacacccagctatttttttttttttttttttttttagtagagacggggtttcrctgtgttagccgggatggtctcgatctcttgacctcgtgatccgtctgccttggcctcccaaagtgctgggattacaggcgtgagccaccacgcctggccctaaatacgtggttttaagtagaatttagtgtggttgtggtttaagcagatttttgtgtggtagctgggtttgtttatgctggggattcctgaaatgtgatctgtgtgtttctaattggatgctttatgaagagtaggtgctcagtgatagttgctgaattcatctcacttcccacttctttattctatgtttaaaccttggctctgatcctttcattttctgtagccattttctgtttttcttttttttcttcaatctctttcatatactccaacttttttaaaaataggagatatattctcttgaattgtgagcatgtgtgttggggtcgggggaaggcatgtagggaactatgaatatgtatatgtgtaaatgggtataatggggtgtgtgtgtgtgtgtgtgtgtgtgttaatgggttaaaagggccatgtgattcatttatccaatgagactttattaatagctcatgatttccagaggtaactttctgattaatttaaatctagttactagtagttgcccactttctaagtattatttttttaaaaaagtaccttctaagtggcacatattttcttatttgcaataccattctgtaagaatcagatgcccattctctcaaacctagcacatcataatctttgaaaatcctagtcctttggtgaatcatagacctgaggattaatggcatagtggaaaaagcactggacgagattaaaagtcctgtcttagatttctgattgcccacttattagctgtatgacctcaaataaaggtttattcctctgaacctaaaaatagttatctgatatgattaaggaggtaacatatggaaggttttatactgtttctgatggcatgagaagctcctgaatcagaaatcacataggtagaagttacttactgttctagtccactctgctgttttgttttgctttgttttgttttgagacagagtcttgctgtgttgcccaggctggagtgcagtgacgtgatcttggcccactgcaacctccatctcctggattcaagtgattctcctgcctcagcctcccaagtagctgggattacaggtgcctgccaccatgcccggctaattttttatttgtagtagagacagggtttcaccatgttgaccaggctggtctcaaactactgacctcatgtgatctgtccgcctcagcctcccaaagtgctgggattacaggcatgagctaccatgccggcctactctatgtttttattacagctttcattttcgtaaagtatatcttccctcaaggatgttagaaatgagtgaattccaatgttaactgtctcacatgaagataatttaaaacaatgttatatgaacaacttatacaagttgcatactcaattgttgtcctaatcaaaatacagttgtgaagtctgaacatgatatcaataatcacgttatttctaacttctcattgttacgaattgccattagatgaagccataggaagtgctagaatggaaaggagatggattagagagttcagctgtgaaaatgcatagcctcttacctagtctccttgcttgttgtctgctctccttcagtctgttctcaacatgtcagccagaatgtgaccctgtttcagtgtgttgcatcactctgttccagactcttttgccaggcgctgtggctcacacctgtaatctcagtgctttgggtggctgagacatgaggattgcttgagcctaggagtttgagaccaatctgggcaacatttgagaccctgtttcaaaaaaataaaaacaaaatagtaaactctccaatggcattcaccttacccctagtaaatgacaatcataaaatgttctgcaaggccctacattattggtcccattaagtctctctctcttttttttttttttttaacttactcaagtctagtctcactggcttccttgctaataccatctctgtccctttctgagagtgtttgcactttctgttctccctgcccagagggcttttcctttagatatccgtatacgcattttgtcacctccttccatctaaaatttcaaaatccccttctttataccattatgctccttctctgctttttttccattgcagtgatcatttaggatactatatattttgtttatgtactttgttttttatatgtatcttctcaatggaatataaagttccacaagggcagggatttttgtcttttattccataatacctagaatagtgcttgacatacaaaaagcatttagtaaatatttgttgaatgttgaaggatgtctgaattctttgctctgtwgtactcctaggttttctgaaaaatgttctgtgcttcccaaagtaacgaagtttatgaggccttcttcaactagcacctgtgagataaggacccttgtaaaaatctagggcttaatgtggttaagtaacaaagtaggttctttcatctttggaaactcagtgggtctagtcaggccatarttaatgaaagatattatagtttcagtgtaatatagacagtagcatataataccaccagctgggtcaagcattcttcttcattctcatggtaaggaatgtgtgctagaaagatacaggaggattcttgccacgaaagaaggtgatacatatagtcaggtatatcctggaggaatgtcagtattaataagattctaagagatttctgagctatttccaaatgagaagttggctgaaagatgcaggttagtgcttgagatagtaaaatttctggaatatttttatgagactgggtaaaaggaaacaaaattttaagttgagatttttaaatgttttgtcttccaaaatatggattaagatgactaaacacatgaatctgttaccccttcttcctgagaatgcattaaaataatagtaagwtatgaagttcattacaacagagagcagtaagaggaggatgggtattatcaccagcagataaaagttttttttataacatttctggaaaatgaaaaatggatgaatattgacagataaaacaaaagtacccagcacagctggaaccccagagactcctgttaccatttgctcctgcttgctctccctgtgcatacacacacctttatgcagagtgactaaaaccctatgtttacctccaggcagaaaactcatctcttagatattgaaggaactgcctggagagagtaacagttcctggagtgggtattagtagtctaaagtaaatttctctcattctagacatctaatagctggcacccattattctaaagcaaaacttgctaggtaacaaaccctatccacatttacatagttcccactcactcatcccaaggggagagactccacaataaaacatacataacagcagagagattacaactgaaatctagaattttttttttttttttgtgagacagggtctcactctgttgccaggctggagtgcagtggcacgatcttggctcactgcaacctctgcctccagggttcaagagattctcctgcttcagcttccgagtagctgagactacaggggcatgccaccacgcccagctaatttttgtatttttagtagagatggggtttcaccatgttggccaggatggtctcgatctcttgacctcgtgatctgcccacttcagccacccaaagtgctgggattacaggcgtgagccaccgcacccagtttaaaattcatttttctatatacacagaaaaccaaggatcatcagccatggcattaatcagaagcttggaaagaaaaggctaagatggaaagaataactgwcacagggagaatctagggaatagagaagcatctaattattttttttwaaatgtattctcagaatttgaaaaatattgcatccataaagtaagaacaggaaactataataaaggaacatcagaaaacaagttaggctcttagaaactaaaaatattactgcaggaaattttaaaaattcaatataagcattggaagtagaagtccaggtagtctgtcccaggacatagaccaggaagataaaaagagaatatagggaaggagaagataagatataggggactaggtcaagatgtgactagtggaagttctaaaaagaagggagtctttggattgaaggggctcactaagtgccaggaaagttgaatagagaaaaaaattcaaacaccacacatagcacatcatggaaaaatttcagaacaccagagattttgtttaaaaaaaaaaagaattcccgagaagatgaaaacaatacatctataaaagaacaaaaattcaactgtcattgtattttagcaacaatagatgctagacaatactggaatgaagtctctaaaattctaggggaatttattcatttatttatttgttcaagtatttattgggtgcatattgtgggataggcactatttaggcattgttatattaaataaaacatgggaaaaaatcttgcccctcatcgaacttacattctagtacagcaagaaaataaatacataaataatgtgtgtgagcaagagagagagagagagacagagacagagcaagagaaagagagaccaagagagacagacagagagagaaagagaagattatgacttaagagctaggaaataagtaaaatgagaggagataggaagtgctggcataagagtattattttcaagttagagttctatattcagctaagctaccattttacatgagagcaaaataatgagattctcagatatgcagtgattttaaacagtcatatcttgaccatcctcagaaagttattttaaaatgtatttcagcagaagaagggtggtaactaagataaaggaagataagggattattagaaatttttgaactgatacggtttgtctctgtgtcctcacccaaatctcatctcaaattgtaatcctcacatgtcaagggcagggccctggtgtgaggtgattagaccatgggggcaggttctcccatgctgttcttatgatagtgagggagttgtcatgagatctgatggtttaaaagtggtagtctcccctgtgtgtgctctctctccctctcctgctgtcttgtgaagaaggtgcctgcctctccattgccttccactgtgactgtaagtttcctgaggcttccccacccatgtggaactgtgattcaattaaacctcttttgtttataaattacctagtctcaggtagtatctctatagcagtgtaaacacagaaaagaacaaaccgagaacagtgtaaaagaatcctgagataacagctgttygtcaagactatttctttaccctataaaaaaacaacaaaactagctgctttgtgttctgtggcaccttatttatctgctatctctctactgaatttttttttgagttgggaatattattttttaaatgaacaatctttcttaatctttttcacttgaagtgccttcttagttggccaggtgtggtggctcacgcctgtaatcccagcactttgggagtctgagaagggcagatcacgaggtcaggagatagagactatcctggtaacatggtgaaaccccgactctactaaaaaacacagaaaattagctgggcgtggtggcgggcacccgtagtcccagctactcgggaggctgaggcaggagaacggcttgaacccaggaggcagagcttgcagtgagctgagatcgcgccactgcactctagcctgggcaacagaacgagagtccatctcaaaaaaaaaaaaaaaagtgccttcttagtcatgagataatggstatgacctagatttttgttaatgtttcctcctgtttcttatgttttaaaaggggacatttgttcagattagtcagacttatcctttgtatgatctaagtccttcttatgtctgaagggttttctctttttgttcttatttaagtgttactatttgctaagattctgtcagtttgtattaaaccccttctcagatctttccaactcagagggtgaaaagtaagatttatgaccaactaatttgttttgccaaagtattgatgtatttgctgtagagagaaggatctatagctagaaaaagcaggtaacaagatgctttagcacaaagtcaaaggatgttagtttattgcagctccaaatgagctgggaccctgtcttttttctctgcttctaagagcccgcagtaagagctgaggcttcattatctgtttgcttgaaatgtttttcttatttggtttaagcttggtctgctgctctgtgtgctaccttcaagtattcttctaaagtagcattgacatttgcttcctacttactgcttcatgattctttcttgcctcccactcatctttgagcttgtgagtctactggggatcagcagggaaccccttccacttactcttcatataggctttttccttcttatgcagtgacttggttagcttttctcaatccattctcattttcaccatgtctttgaagtttccagtatggtcattatatctagattctaatactgattcagaccttcccccctccgcccattttatatttctttggcaatttcaaagggtaatttgaatggtgaaagaattccgaacttgctcatttttttaaaaaactgatcttgctatctgtaagtttattaagtcagctagcttcacagggcattcattgtacattgtgttgtattgagcccagaatcagattacttcctcctgaacagacagagctgttctcatagttaagtccttgtcacatttgagcatgaattagtcaaatcattattaaatgtaaatgaccccttagggagttttcgaagcttactctttctgtttggtatttataatgtttagaagttgtattacaggtggtatgaaatgcctttatatggctcattgcaaagtttaaatcataccattgcttttataaaaccaaatagcttaaaaaataatcacttagtgttatgcatctgtgcttaaatctaggctatagctaattttcacaaataagtagagctattcaattaagctctcagaatatgtatcctacctgagatctcattccgtccttctttctcattacacagtaggctccatgaaaacagggatagggttttaatttttatccctggcctttaacacaacttggctgtagaagttttttttaataattactatgcttatttaataatttaaagaattgcttaatttgtagaggtggaagaggctttagaaattctatactccactgattttaagtctgtattccaaagtcctagagtactgaggaggcacctcagggtcttctgctggagtgaagtgtagaaaaagtgagtagttccacaccatttgaaccagaggatttgtgtttttatctgttacatagttctgttttactcccaggccctgtgtgaggatgggaatccaggatatgtccatctcagacaggcaggtctcttacttaccctggacagtactgcttcctcttctttagtcaccatcaccattgactccagaatgactaaacaacagaaatgtattctgaaacctgctctagatccctaatgactttattcacagaagtttatctgagaaggttttctgattaaatgaaatagacctcaaagtatcaactttacatctcttgggaggcagcacggtgtctgcaaagataaactttaaagatatataaccctttcacttactagagctatgtatgttggaaggaaaggtgtatcttaacctctttgtacttcagtctactcatttataaaattatcacaacctattttcacaggtactaaaatacctggtaaaatgcctagtatatagtaggtattcattgtttgtatacttccaacctgatattaaagatattaaactttaatatctttgaggtgtctgcctcatttttctatatttctttttaggcagttttatacaatgacagatctgttctggaaaatcatcatgctgcgtcagcttggaatctatatctttctcgcccagaatacaacttccttcttcatcttgatcatgtggaattcaagcgctttcgttttttagtcattgaagcaatccttgctacggatcttaaaaagcattttgattttctcgcagaattcaatgccaaggtttgttatgaaaattagtgcctgatttaaaaaatctttattgtcagtgttactgataaaatatgttttttaatgttaagttagaattattactacttaggaagtaacaataaatagttgatataaaataatatatatgcctatatttttaaaaataaacatttttattgttatggtaacatttcctaaaatattattgcttgttatattttctttygacacataaacttatactattgtgactttatttcacatatttttcacatagaaacaaaccagttattagaaacaaaccagttatttcaaatgagtttaaagagagatttgacaaagccatgctcagtgtcaagtaaggcattatataaaattaactttatgtgtttcttaagaatccagttaattatgtctacctcactgcacctgttataccttctttatattagtgattctttagctggctagtgtagggaaaaggaagcaccctcttctacttgagaataattcattcattcaacaagtatttattgggattgcccactatgtacagacattgtactaggccaaagaactcatattcaccaggggatcaagaatcactgccccagtatgacggtggtactcatgggactatgctttatccctcagacatttgaggtgaaaaaagttgagaaccactgctttagattcccaccctggcttgcaggaagctgctattttcttgatgacttttgtgacctaaaagaagctgtacctgcagggtagagaaactggtaacaaaggagtactagattagacctgctggaaggagacccttatatatgttgctgtcatgacattaatgaaatgcttataaaaatcagtgagaagtaagggtacctttaaaattatttcatagttgtatagtcttattcactttaatttttaaataaaattcatttaagtgcttaagtcaccttttataggtaaaagattatctaayacaatactttgaatgtgtattccttaaagacttctattttgaagtctctcaaaaaaatgccatatgaatggggctctagacttcctattaagtttcaatcaaaagagctcttctctcaagtgttttctatggtggtgttctacatatatattttkttttttctgaaagagtttggtgccaaaaagcaaccatcacactgaagttcaaaagctatgatgtggctcattcttttcattttttacaaaatgaaattttagttcttgaaaggctttttttcagctaataattatcatttatttaaataacaatatttaacattttccgtgaacaaggcattttttcatttattaatcctcatagcagcatggctagattggtactacttttcctacttcatagatgaagaaagttagattcgaataggttaagcagttttttcactgttacacactgaatttttgattcagaatacaacttgctgattcatgacattctgagtcaggatttaaaactatagggccagcttctcagacttgtgttcagttcactatatcatgttgcctttcacagcaagggcaaacttctctagcttcttaagtgttcttttttgaggtagaaataagtagttataattcttatatgattttttgatattgtgtatgtactatacttaataaatacatatatatatatatayacacacacacacacatataattcatgattctttgtggtaatcacaaatattgaaacccatggttagttatatgttttgctagaaagcattttttagaaaggaaatttaaccaatagaggtccatattatggaataagctgattttaaaaagaactatttgctgaaatttctttctgtcatttagacaggaaacagttttaagataatttggtaaaagcaaacaaaacaacaagttttaaaaatgccttcagaacctaaaatgatgttgtttttccaaaataggcaaatgatgtaaatagtaatggcatagaatggagtaatgaaaatgatcgcctcttggtatgccaggtgtgcatcaaactggcagatataaatggcccagcaaaagttcgagacttgcatttgaaatggacagaaggcattgtcaatgaattttatgagcaggtaagttgaaacctgagcttggtgggatttttaagagctgtcatgagaagacactactctttgggttttggatagctttattaagtgtttgaaatctgagttgctttgactgggaagggttaaaaattgttgcatttgctttggttcttagtattttctgtgttctgtttgcctttgctgttaaaattttaaaaaataacttattccctatcttgactgagctgaatatactcatgagtctacaggtaaggctgttagcagccgcaaatccgagtttgcagcaacctcaattcttgccccctcagaagaaagaattcaactgaggggcataaggcagagggagagactgaaccaagttttagatcagaagtgaaagtttatttaaaagctttagagcaagaatgaaaggaagtaaagtacacttggaagaaggccaggcgggcaacctaagagatcaagtgcatggtttgacctttgacttggagtcttatacattggcatgcttccagggttgtgttacttctcccaattcatcctttgaggtggctgtcacatgtgcagtgacctgccagcacttgggaggggccacatacacagtgtgtttactgaaattgtactcatgctcacttgaggcatttttcccttaccagcccagtgttcatggaagaaggtcatataccaattaaactccaccattttgcctcttagtgcacatgcttgagcccactcacccacctcctgagatcttaccaggaagctgctgatcaccagtttctgttgggtgactgcctttccctggtgccagctgtgaccaattattattttagagagacagcttaacctatcacctgatggtcacctgacatttctgatggggttgggggtgggccctctcctgctctgcccatgtctgcctgactactttctataacaagtctagactacattatgattccaaggtctctttcaaccctgagattctgtaacctagaagaatttatttccagatgaagtggtttttaagttattcagggtgtgctcagaatatatttaaagaatatcaatccattttcaattctgctataaaaagactaactccctgcagtaggaacatcaactgggaagaaatccggacagagggctacaaaatggagagaatagacacttagtggttctcaaggattcaaagatataagcaggctcttttgttcttaaatctttttttgagacagaggctttctctgttgcccaggctgtagtgcagtggcgcgatctcggctcactgcaacctctgccacctgggttcaagcaattctcttgcttcagcctcctgagtagctgggattacaggtgcacgccaccatgcctggctaatttttgtatttttagtagagatggggtttcaccatgttggtcaggctggtctcgaactcctgaccttgtgatccgcccacctcggcctcccaaagtgttgggattacagacataagccactgtgcccggctgttcttaaatctttaatttttttttaaattattctttaagttctgggacacatgtgcagaaggtgcagttttgttatataggtatacacgtgccatggtggtttgctgcacccatcaacctgtcatctacattaggtatttctcctaatgctatccctcctctagccccctaccccctaacaggcccccatgtgtgatattcccctccctgtgtccacgtgttctcattgttcaactcccacttatgagtgagaacatgcggtatttggttttctgtttctgtttttgctgagaatgatggtttccagcttcatctatgttcctgcaaaggacatgaactcatccttttttataactgcatagtattccatgrtatatatgtgccacattttctttatccagtctatcattaatgggcatttgggttagttccaagtctttgaaaagcattcctatttctccacatcctctccagcatctgttgtttcctgacgttctaatgatcgccattccaactggcataagaggttatcccattgtggtttttatttgcatttctctaatgactactgatgatgagcttttttcatatgtttgttggctacataaatgtcccacgatgcataatcattggattccccagggttgaaatgaaggaaaaaatgttaagggcagccagagagaaaggttgggttactcacaaagggaagcccatcagactaccagtggatctctctgcagaaaccctacaagccagaagagagtgggggccaayattcaacattcttaaggaaaagaattctcaacccagaatttcatgtccagccaaattaagcttcataagcgaaagagaaataaaatcctttacacgcaagcaaatactgagagattttgtcaccaccaggcctgccttacaagaactcctgaaggacacactaaatatggaaaggaaaaaccgataacagccacctcaaaaacataccaaattgtaaagaccatggacactatgaagaaaccacatcaactaacgggcaaaattaacctgctagcatcataatgacaggatcaaattcatacataacagtattagccttaaatgtaaatgggctaaatgccccaattaaaaggcacagactggcaaattggataaagagttaagacccatcagtgtgctgtattcaggagacccatctcacgtgcagacacacataggctcaaaataaagggatggagaaagatttacccagcaaatggaaagcgaaaaaaaagcaggggttgcaatcctagtctctgatgaaacagactttaaaccaacacagacagaaaaagaccaagaagggcattaaataatggtaaagagatcaatgcatcaagaacagctaactatcctaaatatatatgcacccaatacaggagcacccagattcataaagcaagtttttagagacctacaaggagactcagactcccacaaaataatagtgggagattttaacaccccactgtcaatattagacagatcaagacagaaaattaacaaggatattcaggacttgaactcagctctggaccaagtggacctaatagacatctacagaactctccaccccaaatcaacagaatatacattcttctcagcaccacatcgcacttgttctaaaattgaccacataattggaagtaaaacactcctcagcaaatgtaaaagaatggaaatcataaacagtctctcagaccacagtgcaatcaaattagaactcaggattaggaaactcactcaaaactgcacaatgacatggaaactgaacaacttgctcctgaatgactactgggtaaataacgaaattaaggcacaatgacatggaaacggaacaacctgctcctgaatgactaccaggtaaataatgaaattaaggcagaaataaatagacacaatgtaccagaatctctgggacacagctaaagcagtgtttagagggaaatttatagcactaaaatgcccacaggagaaagcaggaaagatctaaaatcgacaccctaacgtcacaattaaaagaactagagaagcaagagcaaacaaattcaaaagctagcagaagacaagaaataactaagatcagagcagaactgaaggagatagagacacagaaaacccttcaaaaaaatcaatgaatccaggagctggttttttgaaaagattaacaaaatagaccactagctagactaataaagaaaagagagaagaatcaaatagacacaataaaaaatgataaaggggaaatcaccactgatcccacagaaatacaaactactatcagagaatactataaaatttttggcattaaaataatctttccactttgctgaatctgccattttttggggtcccgttttgaggcttcctacaatgtaggagtgcactgatttcctgacatgcctaacattttgttatctccaaaatagcaactacacctttttggctttggaattacattccttaggaatccttgttggccctaattatcaggaaaggtcaacatatctactaggtgagggctttcttaacatgagtggaaagtgggagtaattgagcctatataaccatgcacctggtatactttgttacttccagattgtattgaaaatgtgcaatgttttacacccaccagctaaacatcccaacacaataatgtatactctgctgtttataagttacaaaatgccgtactgtataatcatggaaagattattaatattttactattatctatttaaattatatttaatttcgggtagtaaatggctatatttacctaatttgtaagattatactatgcagtttgcatattctcattctcagtgataattgaaacttgctttagagctcgcccatggatctcatgtttacaaaagaggaattttatgctagggaaaatgttatctttatattatatgtacaaatgggtaataaaaaataatagtgtatgtaaattttagaaaattcactagttcagtgagagaacattagaaatattcatttaggtcccgcatatcattttaaaagcatatagaattaatacttattaagcaaacctggaagccatgcctgaggttgaatcctggcttctcttccttatctccaatacgaccttggttgggtaagttasttaacctctctgtgccagtttcctcattgataaaataggaatgatggtacctacctcataaggtttctgtgaggattaaatgaactaatatatgtagacttcttagaatagtttctgatacataagtgctcaataaatgttaactattataatttcatatatatcactaaaaacaatatgttatctcagagagtttcacttaatctaagtgtcattattcaatatcaaagcaggaaaatgtcatcygatatcctcccacttatgaaagttttaatcatccctcatcagaactaaacttctttctcattctggttatgctattaaactttcttcagatattgatgtaaaattctaaccatgcccaactttttttttattatactaattatactgtctttagatgcctacagccatttaactgccatggacttagaaaagccaaactcctgggttatatctgtgaaattacagagtcctatagataaacccaactgtttttggaaaaatatcaattgttttcttcctcatagacaataatctcgtaaaagatttctaatcatgggacagttaatcacggggacagtttctggttgtttcctcagagttatgttggctcattacagaacagacactccttacctgcagaatttgtacattgtggggagtaatttatcccaaaccagttcagacactaggactaaaatgttaatagtaccatttggagaatgctcagtacttgctaaacactttatattaatatttcctttaacctcatcatagcatccctattaggtagattattattcagattttacacacagtgcatttgtacatagagcttgcccaacaccacacaggtagtagtctgatctcaaattaagccctagaagccacagtgggagagtaccagaaggcaggccgttggggatctagccccaggatcctcacctcaatcgtggtagctctactttatttgtttttcatattaggttttctgattttgaatcattagagagttctgctgttaaaaaaaaaaaaaargggggtggaggtagtgttattgaaaagcacttgcaaaattcagctctgtacatttgagatataactacaacaaaaatgtttctattatgcttttgcccctagataaagagaatccataattgacactatggaattttgcagtttgtcagtaaaatatctgatacttattttaatagatctgtatgtttcttattaactgagtatcagccatattggttgatgtgaacagaatgtgagaataaagttttgtttaggatttctcaatgttaaattcttacagttgaaatgatagattgatgcttattcataaaaaatattttgatatagattgtttattttaaaaaaactcaagataattttaacagcaaagctcagtggtggttctttcaccagttaaaaatgtacttttctttttaaaatatgcagggagatgaagaagcaaatcttggtctgcccatcagtccattcatggatcgttcttctcctcaactagcaaaactccaagaatcttttatcacccacatagtgggtcccctgtgtaactcctatgatgctgctggtttgctaccaggtcagtggttagaagcagaagaggataatgatactgaaagtggtgatgatgaagacggtgaagaattagatacagaagatgaagaaatggaaaacaatctaaatccaagtaagaatatagggacattataatttatttaatgttataggttgagtattccaagtctgaaaatctgaaatatgaaatgctccaaaatccaaaattttttgagtgccagcatggtgctcaaaggaaatattcattgggacacttggatttcagatttttcaattaggggtgctaaatataatgcaaatattccaaaatcagaaacccctctggtctcaagcattttgaatagggatattcaacctttaataactgcatatatccatttaacttagatttggaactttgtttstcagatacagattcagcagtcattacattgagtaaccactatctaaatgttcagattcaacagtcatgttttgagtaacttctatatgccgggtactgggtgaatactgtcatacaacaagcattcttattcttatttaattaaagtaacatctcttgaggtgttgtcctccagccagtactcttcacagtacctgtgcatgcacgatagggccatcaccacatctgaacatatgtgaggtggatcctcatggcaagtcctccttcatgtcactccttttcacacatctcacccccaatcccactaggcagctgaggagcacaacttccatagcagcctactaatctgctgttcacatagacttgagaagtagatcaaaacagtgggggggaggggggaaggaaaacatacattccctggctgtagagggagagccaattttgtggcattatgaatttgagttaccaaactgtaatgacatactttcctgtataagacaattagtataaatggaaaatgaaatgaaaattatcactttgtaattgtgaatgaaatcagttatttgctcattttaaagtagaatttaaattatacctacataagtattgttttgattttcaagcatgcaataaatcagaccagacaggaaaactacaaagaacctcccactgcaacacacacatgccttgtatttaggattagcatggcaaatcctattaaaatgtatttaaaattctttttttwaaaaaatggcattagcatctgaaggttgactgacttctaaaaattatactcccccatctctactaaaaatacaaaaatatgctggaaatggtggcaggcgcctgtagtcccagctactagggaggctgaggcaggagaatggagtgaacccatgaggcggaggttccagtgagctgagatcgtgccactgcactccagcctgggcgacagagcaagactccgtctcaaaaaaaaaaaaattgtactcatcaaaatgttggtaattgtgtttaattcaatacataagaatgcccttaaaggttggtttttaactttgggttattttcatttgaaatttcagcacgcttcttccctctccaccatacccagccagttttccctaaacctcttctctattttgtttttatccgtaacaataccatctaacatattcctgttttgcttctttctgttttcctagctctttccactagaatctgaacaccataacgcagggattatttttatagtactatttcattatattatttttattatactattattttatagtactgtttacttttatactcccagtgcttagatacctagaataggcacttaatatttgttgaatgattaaatcatattgctatgattagaatatatttattttaaatttcacagaaccaccaagaaggaaaagcagacggcgaatattttgtcagctaatgcaccacctcactgaaaaccacaagatatggaaggaaatcgtagaggaagaagaaaaatgtaaagctgatgggaataaactgcaggtgsagaattcctccttacctcaagcagatgagattcaggtaattgaagaggcagatgaagaggaatagcgacagtttgagtaaaagaaaagtcatattgaagaagcccagagggttgtgcccaggggcagaaatcattgcctagtgttcaccggctgactctcaactgaccattcccatgtggacaggccttaatactgtgagaggatccttgctctgctggcagtttcccactcctatgcactttcacaggaactagaaaactattcttaaaccaaaaataccatccgtgttgacccatgttgcagagcccttacttaaatccttcactggtgtatgaatactttgtcataatgctgctttgctgggtagtgagctcttatttttcactgggggtcagctataactaaaaactcaagtgacatatttcagttaccaaagtggccaggaactttttgcttttatgaaaatagattcatattgtatttcccagtgtgtcttttatgtctttgaatgttwtggagaaaagtctatgcctgtctaaaaatgaatccagtgttgcctttctgagggatttctgctcaatgcaatacactgttcagtgctattctcccagctaggtttatccatgaaggactgagtgacctttgttgtatttaacaaaatccaggtgcatcaatttctgatgctttttactattgtgtattatctactatgtgtgttttatttctgctgagagtattcaggtttgccatggacatcagaagtttgaattccagtcttatcttatgttccatggctgaattttaaagctgtttaggtttaacaatgaagggatttattctttagtcaaaattgttgtttttactctagctcaggattcgtatttttaaagatttagttaatatraacacagcacagatttgtyagaagaaaaaaaatttgctgtaataccaaaactaacctcatcaaagatacagaaaaaaagaaatatagtgagccctaaaggacacatacattgaataaataattggaacatgtggttatctttagatccacatcttagctgtcatttgttcactctaaaactgatgttcatctttctgttaatttccctctgcctaaagactacatgacagaaatgacctatcactacttattatttctgaagcctaactgcaagactgatttctgagaacaagtaaagaactggaatacttatttttcatataaaaatctaaatgtgttaataaatcatttcatacaaaagtacattattaaataaccacattattaaaataattgcaagaaaatggaccatatttacaatgttttgtaaacttgctagtgtgtggatatgtaccctacttgtgaaatacatttgaagatataaagagcagccaaaatgatggcaaaatggtaggctaatattttctattattattggagaacatatcatattttggaatcatgcaattttgcacacagtgaaaccattaattttccaaggtaattcctttagaatatggtattggcatgcagtttcttacttatctagaatatttggcttatctgaaagatatcaatttaagatctctggaagtgttagaatttttgatccttcacagtgtcaatatttaatgaatcactaagctttatttattagacgtgttgagtgagtgctgagttccttgctgccacttttgttaccattgtcacacactatgtgtaaaccagtcccaccasttattactaataaaattttgactgataatttatatttgcacttacaatatatatatcctgtccttatatttctctagagtacattttccatcatgtttaagtgtatttctgctattatttcctctcctgcagaatacatacaagtgtatgtgtataaagtcatacatgtacaagcatgcatattgagattgaatcacatttccatactgtctgttattttattgggttttatattgggtttctttagtttatgttgttttctcaaaagcagcattttaaattacgaatactggacttattggatttaattataaatccaattactactggaaactcatttttacataatatagtccttaaattatttaacccttgctaagtaattgacatatgtaacaataactagcctaaagaaacccaaaaaagtatctctcccgagctgaaacttaaaaattcgtaagtgtaagaaagaatgtgagaatatattaaatgcacactgtaccattagatgaaatcttacttgagaaattgccataagccatattacagatcttactttgttactgaatcagattaatttcttgttataataattttcatcataaattttctatttttaaagccgctggtactagaaatattcttttaatgctatatctatgtacctactgacacatttttctccataaaagtacttttaaaaattacttcatgatttgaaagctgtttcctgctattatttcattacttactttgttggtgctattggctttttctacttatttttacaagaaacctggagattctggcttacttatcagaaattctctgtatctagattgcatcatctcatagaaacacacttcacaaaagagatgaatagatacaactctggttccttcattatagttgccagattaatataagctgctctagagtgtgtaggggataggagtggcaggtggagcagaaatgaatcacttctcaaaggaaggtgacttttaaactcagaactgaagaattaaagacttagctcagaaatgattgcttgtagagagagaataacagcatgtacagaggccagaagagaaagcatccccacactggataagccaaaagagatttagggtggctggaagatagagcacaagaagagggagtggtagagagatggtggttaatgaagggccttgtaaaacatgacatgccacttaaactttattcctaaaggaaatgggaaccaatggaaaactttcaatctggaagaataacacgattagatttacattttatgaggatcaaatagcatacttcagttgtcccttgttataygtgggggattggttctaggacctcctcagctataaaaatcttcacatattcaattcccacagtcaaccctatggaacctgcagatacaaaaagttggccctctctatacaagggttacgcatcccacaaatactatattttcatctgcatttggttgcggatgcagaacctgccaatgcagagccaactaaatttactgaaaaactccacatataagtggacccatggagttcgaacccatgttgttcaagggtcagctgtattttgaatggtttaaaactattgttttggactgagttcctgcacctaggccccagtagaccagaccaaagcaaaatggagtcactcatactaaatgccacacaatcaaactgaaactttaaggaaataggtagatccccagactagtttttcctcaaaacaggagattccactctatctgagcataatcaaggaagtcccctctgctttaaactgtacaaagaagatgtaatctgaagtaacctaatgataaccaatcagtttttatttttctattattctttgttcccatccttacaaaacccactgttctgccattacccagtgggaacttcattctattttgtagaatgaaagttacctgatacatgaatctagaataaaagccaattagatctgtaactaatttgttgttaattttgtcttttgacagaacggcagagcaagatttagacatagggagtgcttggtgatattgactggaatagattgtggaccacagggacatgtacagagttatggtttaagatagatagagttggtatgggggtaagaaagataataagggtggctcccagatttctgatttagacagctgtcaatatcattcactgagatagggtatatcagaggagttgattttggatgtgttaagagagtgaagagatgaattcagattagagcaaagtgagattaaggggcttgagacaaccaaatgtatttcaatgtaggtatggaactcagaaaagtgataggggctacaagtatggatttgggagtcaacagcaaatagttggaagtctactttgagtatcaagctttccttttctcaaaaactgtgtgtcatagtattggcttctggtacattggacaatgagccctttttgcttgctaacactgctgcattctgtatctattatttatcctggacatctcgccatatcactacacagaaaaattccttattcttggctgggtgtggtggttcacgctgcaatcccagcactttgggaggccgaggagggtggatctcttaagctcaggagttcgagaccagcctgggtaacatggctctcagtattaaggtacttctacctatttctttttgcatgtcttgtaatttatgctttatgaaagttgttacttggtgtggtattgtaactattataaagtccttatgaattatagtatttagaattacaaagtgcacttttttgtcttatgttttctggcttgaattctgccttgttttattaagatcatgactcatgctttctttttatttgtatttcctggcatgcctttaaccatccttttatttttaacctttaacctatgttttaagtatctcttctgtacaacaacaatatagcattggatttagcctgaaatcaaatccaatgctatattatatgaacacctttttgataggtgagataagcccatttatatttattcatgtgactgtaaggacttaattcttcatattatttgctcttttcttaaaaactcattattttaattacaacatttaagaaagtgtgtatctttgattcagtggctatagttatactatctttggaccccatttctttatagtatctgcttctcatctataaattaaaaatttagcttgtacatattcttatttcccactacccaatttaaggcaatattatcctttactcttgtaaattgtactattaaatattcttaaacttctactacttgtcacttttaaactgtatcttttgaattctaactatacaaagcaaagagcttattctgtgttctaccatttctcctcttctcattttttgttagatgcattatttttatcagagtataaaacatttagatagtattgtcacatttatgccaccattgtcttagttctataattaaatgtattcagtgctcaaggctagtccttttgttgatgtttcctcagtcatcacttggttcactgaaacttgtcctcatacctgtttaacagtttaggcgctagagaacttaccgttcaaaatcagacgaaattagggagccctcaatctagggcactaatcccaggtaggagcaccaccatctccttggcataggaacccaatttatttatacttatttcagcacttgggggcaagttctacagctgcacaaacagaaggagaaaatgagatggggcaaattgttcagctgtttatcccagtaaatctgcttgatttctttccacttttagaaaaagttctccttacctacttctctccttatgtaccgattttctccatagctatcccgtgaagaatgggctcccatctccacctgtggcttcgtctatgcatgattttatttgtggttttctatatttttccattcaccttccatctcctaaaatttcaaagtatctgatccactaacattgccctcaacccgtattctcaatgcctttattccttttcctatccttaatggttatttcagtgatacatgagaaaaaacaagtgtgctcacttgttgaataagaaattagatttctaacatttgagttagtagcttagcactgactgatgagagagaaggcatccctattgcgtagatccaatgtatctgttacaatgtaatttcaaaaaatagatttttccaatatggcttactaattcatgctaatttatatttttccaaaagtgcagcattttatttttaccacagctaactggttccaaataattgagttgaaagcataatgaaaaacagccttataaatagtaaagcataagataaattattgggtgtgaataaaaggaatatggaatgaaataaggcatgcctctgctgtgatctagagaattcacttcccctgtgtaaacctctatttccttggctataaaatgagcacattaagtgaagttaaggcccttctacctttaaaagtttatgaatctacatcttttataatttgtcaggcttacattaacctgattaaggaaaaatgcaaacttggaagcaaggcaatgaaaatagcatgatcttcattctgcatagatttatggagttcctaaattgtactagcagcagtagtggtgtactcaaaagcaaaagaaagcctcctcaacttttattatagtctacttcagttcactaagttgttttgcctagtaaaactaccttaaagttcaacttaggctcttagagcagatatgacactaagtaggaggccctgggatgagagatttgctgtatcaaagaaagaacaaagactaaggagcaacttgaatatgtttgtcaagattcaggaaggttggggcaggatgtgacggctcacacctgtaatcccagtactttgggaagctgagcttggagaactgcttgagcccaggagttcaagaccagcctggacaactatctctgaaaaaataaaataaaataattaaagaaagattcaagaaggtaggttggaaagttgcttggcttagcaagtgaggcagacactatagttggtcttctgactcttcataattatccctagttttgtttagataactacaccacccatatgtagcacatgtattttgggagaagccaactccatcactacttctagtagtcaggcatatgttcaggctaagtgaaccataattacactcacaaagcatagttttaaattaatggatgggcacataactcagaacctacaggacacaaaaaacagttttctgggggcatctgaaaaattccctcgctctcccagaaacgatctaagcttgctttctctgtatggaggtgagcaaagcacatgtgctccatgagctagccttaagataaagctggtatcatctggaaggcaaaattcagaggtggaaagacacaggatctttgattacaccatgtaacatctaagccatacggaccctaaaacttccacccttcctccaaattccccttttattgcttaagtgaacttgcaaggattttctttcccttgcaactggaaacatctgaatatatccaagatgcaaactcctgatgtataacacacaaacttgaaactgttcaacaactaagtccaaactaaggttaaatccatattcttaatagaagtcattgtgtgcactgactctgaggctgcaactattcatgagccatgttacaagagcatgtacctgtaatataacaactttagaagaaatgatgatgtaaaaatagctataaatgggtcaatatacattccagtttgtttagggcagtcataatttacccttgttgtcctgacataattatgaataggaccccattcactctcaagtgtcccagtttacacagttaccctgtctctaaagcatgtttttggatttgaatataattatctttagaaaaataacactaacccatggaaatgcctagagacctctaaaagatataagtgaattcgatctttaatccttgtgattggttttagaaagaagtggtgccagggaaaatgtgccaacaaagattcaatagccatttatcattttaaattttaaatatattattg

SEQ ID NO: 95163 - DNA, 81338 bp, Homo sapiens
cgtgggtgacagagcaataccctatcttgaacaacaacaacgacaaaaacaggagtggcacggtggctcatgccagtaatcccaatacgttgggaggccaagatgggaggattcgttgagttcaggagttcaagaccagcctgggcaacatggcaagaccccaaccccatctctaaaataaaataaagaaagaaacagaaataattatacctacttgatagcgttgttaggataattaaataattttaatatatacatgaggtgggcggggtacagtggctcatgcctgcaatcctagcactttgggaggccaagggtggatcacctgaggtcaggagttcaagaccagcctggccaacatggcaaaaccctgtctctactaaaattacaataattagctaggtgtggtgtcacacacctgtaatcccagctactcaggaggatgaggcagaagaattgcttgaacctgggaggcagaggttgcagtgagccaagatcataccactgcactccagcctgggcaatagagcaagaccctgtctcagaaaaaaaaaagtaaaaataaataaaatacactaggtgccttagagcaacgcttagcaaatagtaagtactcaatgaatggtaattattatttatcaaacatcatctatatgccaggcagacagmctgcatgagaatactttgcatctgtatccttttaatattcacaaaactcttgcatattttgtgtctcattcctcttttcaatgccctttgagatacatagggaaagtttaattgtgtccacctaaccggagaaaaagacatccagcctcttattaagacagtgtgagagctagccctagaattcaagtattccacactcccaaagtgtgctttttccttcgatgtaaataagtaaatgaacaaaataaaacaaaagcaaaaagaaaaaatttgaagaactgaggcatttgtccagataattttcaaacatcccctccatgccttccactcccaccccataggaatccaaacaaccttccttctatcattccctgattatctataattgggatgtctaatttatggataacttatactctgcttggagttatatttcttgctcagccatagttctagtcaaaaattgtcaggttttatcttcatttactggagagaccctgcatttagaagagattctttccttctctcaaggattatccagaaagtgattgagccatgtttagccttaaatcctaccctcacatttttgtgaaaaagcccatatttgtataaatcaactctaattgggttttctgttgttgggagctaaaaatcatttctaacagttactgttaaaatgcacaaaaatcttgttcctgtcgtaatatcttcatttatatttcctcctttagaatagctcattaactcttattaggtcaaattgaggatgtcaagtataaactactagtagtagattagtaataatagtagtaaggataatcatagtactgttttgattctgtgtgccctgacctactatatattagaccttaacattcatttttaaaaactctatacttgaaaaataactacacacttacattatttctggagacctatggatgtatataattccccttggtcttttaactgatgagacatcttagtgtctcactataactattactggatcaaagtagctttttttttttggagacagggtctcactctgtcacctaggctggagtgcagggatgcgacctcagctcagtgcaacctccgcctcctgggctcaagtgatcctcccacctcagcctcccaagtagctaagactacaggcatgccccatcaggcctggctaattttttttttttttttttgtaaagatgaggtttcaccatattgcccaggctggtctcaaactcctgtgctcaagcaatccacccaccttggcctcctagagtgctgggattacaggagtgagccacctcactcagcccaaaatagtatcatttaaagatgaaatagctcaattcaagcaagaatgctggacagataggggataaaaggtaaatgcaagaaagcacagtatttttcaaagcttaagatgatcatgcagaaaattcacaaccagttgcagagtaatgactactttatttaacccaggagttatatccgccagtgtaattcttgcctgtagaaaccagcagagggaaatttcagaaggtttagacactatgtttctactaatgattactcatgttttccaattacatgtgtctttttcctgccttttcactgctcagatcccaatatatgtaatatgtcactcagcagctgttacatgaaaggaacatgttaggttgctgtattaacttttccagcatgcatgtgtgtgcactggagaagaacccaggctcttctactcctctgacatccttagagtgcaggccttcattctcttgtttgtcatcttatggcccaatgatgggtgccatgccactacacatctgtggcaaaaagtgagatgaagcaaaacagccaaagacacatgccagttgaatctgttcttttttttaaaaaaggctttccagaagccccggccgtcagcttccttgtatgtgtttctaacagggtcaccttagacccrcatgatccaactgaaatagagtgcaagccacaaataggaattacgtatataattttaaattttctgtagccacatttaaaaagtaaaagaggtttaaaaaataactttaataatatgttgcatgaaccgaaaatatacagaatattatttcaacatgtgatcaatattttaaaaattaagatatttccattctttacatgtttttgcactgtctgcaaatccaatgtatatctcaacttaaaatagccacattgcaagtactcaatagccatatgtcactatattgtaaaggaaaagaagcctgtgacattgtgatagaataggaatgtatatttggtctctgccctggttcctgagaaaaagcttctaaatcccttggaatttcctgagtgacaggggcatcttttgttctaatgaggcaactcttggtgggctcctagatagcctcaggatgggggctggttgccaggggaaccaaccatgtgattagaggattggaacttttagctccatcctctgccccctgacctcctgggaaggaagaggagataagggttgagttgatctccaatggtcaatgatgtaatcaatcacacctatgtaaggaagcctccataaaactccagaaggacagggttcaaagagcttcctgattgctgaacacgtgaaggcatatggagggtggtaagccaagagagggcatggaagctccacaccccttgccacatactgtgccccatgcatctcttccatctggctgttcatctgtgtcctttatgacatcctttgtaacgtacgtaaagtgtttccttgagttttgtgagctatcctagcaaattaatataacccagtgacagggtaatggcaacctgggacttgtgactggcatctgaagtgggggacactcttgtgagactgagccctcaacctgtgcgatgcgacactatctcctggtagatagcatcagaattgagttaaatgataggacacccaccaggtcacagctgaagaactggttgttggtgaagagcaacccacacacattttggtgactaaaggtgaagtattgtgttctgtggtgactgtgtgtgcacagtagcagaaaaagttagttctgttttctttttcttttctttttttttttgagatggagtctccctctgtcgcccaggctggagtgcagtggcgtgatctcagctcactgcaagctccgcctcctgggttcacgccattctccttcctcagcctcccgagaagctgggactacaggcggccgccaccaagcccggctaattttttgtatttttagtagagacggggtttcactgagttagccaggatggaattctgttttcattaggaagcctttgaccaatcactgtaagtggctaaggggaaagaaattgttgtcagagcagaccagaaaacagcagtttctacctccttgacagtagcgggtatttaataaggaataaattgacttcaatgtaagcaaaataagttccctccatgatagctctctacaactttcaatctgggattattcgaatgtaggacaaactgtccttaaattctttaaattgacaaacaattgtatataattatggtcgggcgcgggtgactcatgtctgtaatcccagcactttgggaggccgaagcaagcagatcacttgaggccagaaattcgagactagcctgggaaacatggtgagaaaccccggctctactaaaaacacaaaaatcagctaggcatggtggcgggtgcctgtaatcccagctacttgggaggctaagtcaaaagaatcgcttgaacctgcaaggcggaggtttcggtgagtcaagatcacgccaccgcactccagcctgggcgacagagcaagactccatctcgaaagaaaaaaaatgtatatactttaatgcaatgggatacaatgtaatgtttcaatacattgtggaatgatcaaattaggctaatatatccatcaccttacatgcttatttctttttggtgagaatattttaaatctactctttcagccattgcgaaatatacattatgaactatagtcaccatgctgtgcgatatttctaaaacttactcctgaaactttttaccctttgaccaacatctccccattccccatctaccccccaacacccccacaactgtctttcaaagacaaaagaatttcacctctactaatgaagcatttatgtagaaagacactggtaatgtttagtttccttcatccaacctgctgcatcttgtaagttcctggcaagcagagttactttaggtcattcatatttataacctctccttgcctgcggtggttattatagcaaccacacctatggattatcacctaactggagtttcctcctcacaggccccacccttcaatgttcagagaggggcgattgccccagattttatttaattgtcagagtttaggagggagcaattcactcttccctacttccactccatcttctcaatcctacatttccatcacttttaattttattctgccttgcctctttttttatattttacatcttatttttgaaattgtcattaccatgccttgttttaagagtacacaagctcattatagtaaagagttttgggtgataacattttctgaaataagggtgaagaaatatcctcccatgtcacaaccgttgggagggcgggggtagggatgttggaaggcacggtccctgcggctttcaaggacaagacaattaagtgttccggtgcttttctgaggcagaacattgagcatctatttatggtgactgtgacagtggaggtgattggtaaattcaccgcaggccaataaccttgccagcagccatgaggagtggcaaagaattctgcagaagagcaagtcctatgcacacaaaacagctcggaaagtgaaagcgtcgctgaagtgcggaagcctcgcatttcctgggtcctcttcttccttcctttgccgtctcctgccctcccgttctcccccttcctctgtggctcaggcaggacagaccccaactcccagcttccctggcctccgcgggttcggagactgggacccccgggccaggagtgctgggggcgcggtcggccagccccggcttccttcatggagcggcggagctccacctcctcctccgcactgcacttctcacatcctcagcatcgcgtccacgaggccgcccgccccgcctcagaaccgtaacctccaggagctgggttgaggaaggcgcggaggacaggaaccccagcgccggcagctaagcctccagacggagcccgcccctccggccggttcctgcctccaattggcccgcgagcccgtccgtctccaccgtgggccacgccttccgggccccgcggctggccggctcctcgcgycstcccctcwctcggccgctcttcgggccgcctctgcgtgtggggccgcccgcgccagtgtgagcctgagctgacggcggctccgggaggctcgcagaaggggagggccgggcggcgcgggagctgagcatcgccagggcgggcggcagggcgcggcctctccgccgggtgtaccacctgtcgcggcgcgagacctctggtaaggcccggcgcggtggggcccgggcgggggtccgggagaggagcgggcgccggcctcccctggcccggccccgagagcccagcgctgccgcgcctccggcctccgcgcgtgcggcccccgccgttcccggcctggcggtgggggctgggggaagggaagcggtctgcggagtccgggctgagggcgagggaccggctacatcgcggcgacccaggttccagcggccgcggctctacccggcgcgcgatttccaggttcctccgccggctggtgcctgggcgccccgctctcgcccgggagcgaggccctgggcctccaaacgccagcatctctttctcgctctttctgcacccctccacaaaaggacttctgtggctggaaaccctttggcaagcctatctcctttattcagtcgggccgagttaacggcaggagttaggctgtgtgtgtggctcctccctttaaaaaaagacttgctgcgggctggagagttctgagattggaccgattccgtctattattaaatgccatctgtggaccgggattggcaggtgtttctttcacgctggcgataactatctctgcatgtggtgttacctaggtggtcctaggtttcgactttcttttttggttccagagataattctagaaaatttacgttgcttgtggtgagaagcgtgatcaaattaacacgtgctttcttacaaaacgttttatcatcttctgtctgtggatttaccttcctgatgcttgtggctatcacctctaagcaaagaggttaatagcattgctatttctgttagtgttgcagttgataacgataacaatagtagcatgtattaattgctagtgacaggcagagcgctagtttctacacggattatctcaaaataaccctttgaggttgatactgttactgcctccactttacaaaccaggaaactaaggtttaggtaggttaagtaacttgcctaagaccacagttttaacgtgacaaagcctagattcaaactcaagtggtctaacttcatagctgcatcctccacccccactcccttaaacgtgtatactccttaagcattgctcatgttgttaagctaattgcgatgttgtacccataattttgattttcaatttacaaatactctgtaaattagatgagagaaacagttgtttttaaaaacatacatataggccgttcgcggtggctcacgcatgtaattccagcacttctgggaggccgacgtgggtggatcacctgagggcagctaatttttgtaattttaatagagacgggggcttcgccgtattggccaggctggtctcgaactcctgacctcaagtgatctacccaccttgaccttccaaagtgctgggattacaggcgttagcgaccgcgcctagctcctaatatgacttttatcatgcattaataggaaatgttgggctatgcttctgtagaaatattctcttgagaataatatatttatgcttagtagctatttctgagaactgcttatgggtgacacccttagagggtgtttatatgtttttgtcttttaatatatttatgaaaacaaaatattcataaaggaaaaaacccatttaccatttgggaacttcttttgtaaaattaaaaacttayagctatgtatgtataatctgtatattaagttaaaaactctaattgattttggtgaatttcagacaaactagacatattttattctctttaagacggagttttgctcttgttgcccaggctggagtgcagtgttgcgatctccactcactgcaacttctgccttccgcgttcaagcgcttcttctgcctcagccttctgagtagctgggactacaggcatgcaccaccatgcccggctaatttgtgtgtgtgtgtattttgagtagagacagggtttcaccatgtttttcaggctggtctcgaactgctgacctcaagtgctccacytccttcggcctcccaaagtgctgggattacaggagtgagccaccatgcccggtgaactagccgtattttaaaacacaaataacattaaaacctatatttactaaggattaatattacaggacaaaattcacactaaataaaaattacattgactttataaaaagataacttttattagaaattaactattttatttgaaagttacgattttgattttatggtggcatattgtacctcctttgatcaatatgtacaaatttcaaaagtgataaaaaatatattctgtatatacttgtttaggatgacatttgatgttgcctgtatttgtataccatccagattctcattcttgactttgagatttgatttgaaatattttgaataaatgttaatcatgattatccttatagcctcttatattaatttgatcattaaaagatgttgatgcagaaacaagcaggcatttagaaggcaccttgtgaccaccttagtctacaactactaatagtaatgcttatgataactagcctttctagagcacctagagggcattgtgataagcatcttaatgaattatctaatttaaatcttaaaatagcctattaaataggtcttgtagtttaacgttcccawtttactgatgagaaaatgcaaattggggaggttgtgatttactcagcatcacagagctagcaaatggcaaagccaggatttattttgttttgtttttgtttttgagagagggtmtcacttttacctaggctagagtgcagtggtgctgttatggttcactgcaacctcaacctcccatgctcaagccatcctcctgcctcagcctctgaagtagccaggactgcaggtgtgtgccactacccccagctagtttttaaattttttgtagagatggggttttgtcatgttgcccgggctgacctggaactcttgagctcaagcaacccacccaccttggcctcccaaagtgctggggattacaggtgttcgccacgggatttaaatccaggcagtttgactccagaacttgccctttgaccactctgctagactatttcgtatgggttttttaaagcaaactttgaaatcaagtagtcaagctctttatagtgatgctattgtaaagctctaaaggcttgacactattaataatatgtatatatcaacattactacacagaattctgcaagtttcccctcccccactttattgatgagaaaaatgaaacatctaagtcaatggcttccagacttttggactttgccaacaagtaaaaaactgttatgtgtgggggacaattgggaccagacgtaagatctccaacttttatttctgtcaaggttgagaatcttcttaaacactactgcaatctggtcaggcacattggttcatgtctgtaatcccagcactttgggagccagaggtggatggatcacttgaggtcaggagttcgagaccagcctgcccaacatggtgaaaccccgtctctactaaaaatacaaaaatttgctgggcatggtagcacacacctataatcccagctactcagtaggctgaggcaggagaatcgcttgaacctggaagtcagaggttgcagtgagctgagatcacaccactgtactccagcctgggcgacagtgatttttgagactctatctcaaaaaaacaaacaaaaaaactactgcaatctactgtcctgatcctttccttaaaaaagggacatttttaccaccacaaaggtaggaaggtcatagttacaacataaaaacagaataaatttaatattatgaaaaactatattacattgtgttagtttttcctcctttggtcatagaccagtcaaaaacatgtcctaaactaacaccaattcagagatcattcaggaatgcctgggtgacacaactgattctgaactggtaattagctgagtccagtccagattcactctccagtctgtctgacagcaaagcctgtgcttgttgccctgtcatgagctctttctagtgaacagtgtctagggttttggtctcmtgtgaacagtctttctcaggtgttgactatttccttctccctccaggtagggggccagggagaatagtctccagcagccaatgtcttaacagctttagtcccagtccagtttgtaaataccacccagagggtgagttccactgcttccctgtttgaggtagttcttttgtctgtgcttactcatggaaggggcaaggcagtgaccataccagggcaagaaaccacgggcatattccagtattcaagaaactctcctgctgggtgtggtggctcacacctgtaatcccagcactttgggaggccgaggcgggyggatcacctgagatcaggagtttgagaccagcctggccaatatggtgaaaccccatctctactaaaaatacaaaaaagtaaacgggcatggtggtgggcacctgtagtgctagctactcgggaggctgaggcaggagaattgcttgacctaggaggtggaggttgcagtgagccaagattgtgccattacactccagcctgggtgacagagcaagactctgtctaaaaaacaaaaaaagaaactctccagtaaatagcttgattttacttagtcattcaaaattcgaatccccaccttcttttatttcctgtttttacttcactcactcctatagttctccttctgtcatctttgtgtaacataaggagttaggtgtgtgttttcctcgttctgtcttgtctccagcagatattaagcccacctgtctgtttctgtctgtaagtgttctaagttccaatttcggcaaagattgtttttttccttaagtttttttttaattatgcctactaaagacactattaaaattacttttatattttattttactctatcacttgctaataaaattatctaatagtttgaataatatatgttttatctttaattataatactcttttgcatatattctctcatttaatcatcacagttttctatgaggtagatttgagaggtggtgttatctttatatacaagccaaattcattattttatttatttgtttattttgagacagagcctcattctgtcataaggctagagtgcagtggcgtgatctcagctcactgcaacctctgcctcctgagttcaagcaattctcctgcttcagcctcccgagtagctgggactacaggcacgcaccaccatgcccggctaatttttgtacttttagtagagactgggtttcaccatgttgatcaggatagctttgaaatcttgacgtcatgttccacctgcctcggcctcccaaagggctgggattacaggcgtgagccactgcgccaggcccaaattcattatttgataggagcaagattttaactaggagttgaaaatagaagatttcgtatatcagcaacctgatcttaactactgattccaaaatgtattttttggggattgcctttgattcaaaataaaatgtattccataccattttagatttgcctaccttgcagtactaatcaccaaagtttgtgtgtgtttgtgtgtgtgtgtgtgtgtgtgtctgaaacggagtttcgctcttgttgcccaggctgcagtgcagtggtgcaatctcggctcactgcagccgccgcctctcgggttcaagcrattctcccacctcagtctcccgagtagctgggattgcaggcgccggtcaccacacccagctaattttttgtgtttttagtagagacagggttttgccatgttggccagtctgatcccgaactcctggtctcaggtgatctgcctgcctcagcctcccaaagtgctgggatttcaggcatgagccaccacgccaggcccaaagttttaactgtagtaaataatgctrtctctcctggaagagccacataaacatatgatgaattcttttagaacttctttttagctgggtgtgatggctcatgcctctaatcccagcaactcacaggctgagatcggacgattgcttgaggccaagagttcaagaccagcctgggcaacatagcaaacgccagctgtacaaaatattaaaattagccgggcacagtggcttgtacctgtagtctcaactacttgggaggctaaagcaggtgaatcacttgagcccaggagttcaagactgcagttagctgtgattatacaactgtattccagcctgagtgacagagtgagatactgtctctaaaaaaaaaaatatataaaactttttttaaatgacaatttataaaatttaaatggttttttttcatcacttagcagagtatcaaccatcccaattttgttaataatacttttgtcaccatgttggggattctggggagaaagctacttggtatatatatatatttttaacactgtgctgctataattaacattattattcatatgatactgattaataatttttaaaagtgtagaaacatgtatatataatttgtacttttagagccaactgctggtactttctgcagtataataataaatggaaataaagtgacatggagcttttatgcaagataatcctgaaaagatgtataaaagtcaaatttgagtaacttaaaatttaaaaatagcctgaaaaatcttgctatttaaagaagtccagtgaagaattctcttatatagcaaattctctctcttaaaaataaaatcaatggagtttgctcaaagcaggctctaccactgtttcttcttttagattgtacacatttaatagatatccattattagattcagatagtgaagacaattcataagtacacaatgctggttctatatatgtgtgtgtgtgtatatatttatactatatacccacacaaatttaaaatttaaaaaaaaaggraaacttgggragcctatacaggtatgtgtctattttttaatttaaaattgagaaagggtaagttagatttttttttttttttgagatggagtctcactccgttgcccaggctggagtgcagtggcatgatctcggctcactgtaaccttcacctcccaggttcaagagattctcatgcctcagcctcctgagtagctgggattacaagcacgtaccaccctgcccagctaatttttgtatttttaggagagatggggtttcaccatgttggctaggctggtcttgaactcctgacctcaagtgatccgctcacctcagcctcccaaagtgttgggattacaggcgtgagccactgcacctggccaagttctttttcttggttttgttcatgttcatatttcttttaaaaagcacaaaggagagctttatttaggactttataacttactggtaatagaacattaagagaatactgcatggtggtgatttaatagattctgtttaatgcttttgatgtttacctagagaaaaccaaatctggctggatgcagtggctcacacctgtaatctcagcactttgggaggccaagactgacagatcaattgaggccaggagtttgagaccagcctgggcaacatagagagaccccgtctctaccaaaaatacaaaaaattagccgggcatggtggtgcatgcctatagtcccagctactcaggaggctgaggcaggagaatcactgaatccaggagacggaggctgcagtgagcygagatcgtgccactgcactccagcctgtgtgacggcaagactctgtcgcaaaaagaaaaaagaaaaccaaatctgatggtgtaagtttcacagcagctaaaaagacatggattcctgtagtgttaagtaagaatatgagagcaatactaaccctaggcctcattccggccctgacgtaggtgctcaatagatgagtaaataagtataatatatgtttaaactgaatcaacttccagtttaaagtgatcgattagtcacatgttgaaatctccctttcttgctctaaaaacacagagatggtaagtaaaattgaaacaacacagagccaagtttgaaagcaagagagaaatctccacatgcaggagtgaagaaagaacctatagcagtgagcttgattgaagacaaatgttccatgggtagacagggaacaaacacagtacatgaatactacttaggatctgaagtgtttattgcttgccaggagacggaaactgagttcccaaggcctgttcaaccttcagaatcaaaactagacatattttgggaagctgagaatggggaaacacttttctctccataaatgaagactgtatcctcactgaggttgagacgagaattaaaccatccatcccacaccataagtagaatcctaaacctcaacttgtttgaatttggctttggaattctacctgaggtatgtaaccatctaacacagaaactaatgtagaaactagttttagcttgtaaactctcaggatctcatatagaggcaaacttaaaactgcctccaagggttggtttccacaacacacaacgtgtatgggaccaccatcaaagattgcaaagtgagcttatagacaaaaattatgccatgaaagagactgaaaatttatatccaggcactaaagacattagmaaagatctttaaaataaatatttaatgaagccagaatttaaagttatgaagcatgaactggtgaccataaaacagaaccaaatagaaatatagacrtaaaataattgaagtgaaaagatggaatatcagaaatagataactaaagagctatataagaagttaggtggtrgataaattgcttaattaagaaatgaggccaggctcagtggctcacgcctgtaatcataacactttgggaggttgaggctggcagatcacttgagcccagaagttggagaccaccctgtgcaaaatggtgaaactctttctctacaaaaaaaactacaaaaattagctgggcatgatggcacatgcctgtcatcccagctacttgagaggctgaggtgggaggattgcttgagcccccgaggtcgaggctgcagtgagctgtgatcatgccactgcactctagcctaggcaacagagyaagaccctgtctcaaaaaaaaaaaaaaatgaaaatatacgaaatgaaattttgtcttgaaaaatgggatttagaaaggaatgggagggaatacatttatgaaacaaaaacaacagaaccaaaggcttagaggctgaaaattttggaacaggaagggaaaacaaaataaaaaccctggactacgactrgtaagctgagtgatattggacatgtccatttctgtytctgggctttatttttttttcatttaaattaagatatttaaactaggtgatgtctaagactcgtgataactataattgtgattcaaggaaaatctaagtgtgtacatctaattagaataaagcactatttaggtttatgtacttggtaatatgatacatactctaatgctttaggaaggaagctctataaagggtatcagggtcataacaatgtattaaatagtgtggtattatactaaatatattgatcttcctgattctgtcacagagctcctcaaacccttggatttcctgaatgataagagtgtctttaaaaaaawttttttttwaactgatgcataatagatgtacatagtttcagggtacgtgtgataatttaatatattcatataatttgtaaagatcaagccagtgtattctggatatccatcactttcaatatttgtatttatactagaaacattccagttcttctcttttagctatttttaaatgtacagtagattgttataaactatattcaccttactgatctaacactaggtcttattccttctgtcaagttgtatatttttatccattaattccctcccccccatgataggagtgttttttgtcataatgatccccttttgatcacacctgagtgtatgctagtcacctgaggtgacttagggtagagcccctaggcagcctcagggtatggctgatcactagaaagaccaagtgattagagggttagaactttcagccctatccatgagctttggggaagggggtgctggacattaagctctataaaacttttgaacgacaagatttgctgagcttctgggttgctgaacacatggtgctggcagagtggcctgtccagagagggcatggaaaccctgcatccccttgcccccaatgccttgccctctacatctctttatctggctcttcatctgtatcctttataataaagggggattttttgaagacatattagaataaagcaatttattgtggataagaagacttaaaaatgggccatggttaaagacttgttaagcgttcctaataatgatacatttgacaaggaaatttagttatttctgtgacatataacaatttaacattagaattatgactgacaacatttcctaagacgtatcagatttctaggaatctcatgcagttttggaacacatattaacctgttcatgttaatgggattctaggaaatggttaaacattattcttatttggcaatgcttcccatataatttaacatgcccaataagcctaatatgtttcgcttggacttccacaggcccttttggaatgtccaagagttagtttaaggtcaaaaagatgtaatttagaatttgaaatttgatttggggaagcctgttaattatgtcaaaggtttaaaacacttgatcaaaaatagtatcaaaggtcactgtgatgaaatgaaataatattcatttagctgaagtgatttcaaaaatcaagagatttcaaaaatcaagaatcctcactctttgatagaaaagcaaccccattttccaaaaaaaaatcaaaaggcctaataaagacagcatgatgcaaacagaatgtttcttctattttgcagcttactcaaaaggcaaactataatattttgttattttttattaatactacacaaaaatcttcagaagagaaaaccaaattcaatatattattattattttctttttttgtactttttgtagagacaaggtcttactatgttgcccaggctagtctcgaactcctgagctcaagtgatccacccatctcagcctcccaaagtggtgggattccaggcatgcaccactgtgcagggcctcaatgtattattattaaagtgaattttaataaaaccttataaacaaattcaatctcagtcagctttgaccacacaacataagatttcygtaaattttttacaactacttacaaaattatttcaggtttttttcttccccaacttgttttatccatttagttttmtctatatcattttttccttcattatgaaacctttaaataacctctaaactagacagaattccttttttcaacaaaaaacacatcttttgtctttcttataaccttcctcaccaaaaagcatcctgcctttcttgtaaaagcattgtttttctttatatctagttgttttaattacatatattacaattttgactcttactaatttccagtataaaacctagtaggaagcaattttaattgctatgtaccaggtacagagttctggacagagctattacgactacgtctggaggacccaaccccttctagcatggccaggaggcactgctggaccaggagggcagggccatattgagcctggctctgccctgcagctggtggcccaggtactgaagataaacgtatgtacctgggcctcaccatggtcacctgtgtagactgcagaatttaaaggctcaaaaccaaaaacataagctcagacaaatcaaacaaatattaaaaatatctcaggagcaatagtttgatgaccttaaaatacgtagaagaaactgtgtaaatctaaccagtagacccaaggcaaaaatgtctgaattatatttaatattgacaattttgagacattcctattttaccaacaatttttaaactagcttatttcaaatagagagaatttaagctttttcaagagggagtttgaatatgtcagaggagacaccgaggaaggttaatctgaactaccagactacaaggtggagtggccttctttataaatcccacaggggatccaaagcaggcagtttgagcatacaaaggagttttactttgttttaaatctgaattctgcttgctctgttccttttgtgtcttttcataggtctctgaaaagatgagaggtctctgcaaaattttctcataaatacagccaattaatttattccataagcacctaagccaataagcctttttcatggaaagtcccagaggtagctttgcaggtttagaataccatagacatgagtggmattttttaaatggcacagaattggttccgcatgatccccaaaagaattcactcccacaaagaggctaagatagcagaagactcttgttgccatagacagtgaaggatggtgtgtatgtatggtgtctctagtatcacacaaatttgtggggggcattggtcacagacccattactccatgacaccaggacgcccacctggaattggacttataatttttttttttttttttgagatggggtctcactctgtcatccaggctggagtgcaatggcacagtctcggctcactgcagctctgcctcgcagactcatccagtcttcccaacttagctagtaccacaggtgtacaccaccacacccagctaattttatttttgtgtgtgtgggttttttttttttggtagagatggagtttcaccatattgaccatgctggtctcgaactgctgaactcaaacaatctgcctgcctcggcctcccaaagtgctgggattacaggggtgagccactgcacccggcctggacttgtaattctttatagttgctttactttttgaaaaaatgttaatatctttaatctgtttgaaaggttttgctaactgtagtrgcaaatccttctacctattctttttcaaaatttcttggattttctcacatgtgctctttcaaatatatatttaagctgagtctaaagctccataaagttcaaggctgcagtgagctatgattgtgccactgcactctagcctgagctcagaatgagatcttgtctctaaaaaaataaaaatgtaagctctgtaaatattcttggaatttttgttggaattgccttagaactgtggattgtttgaggggaaactgaaatgtttactgttgactattcccatccagaaatgggtatttctatccatatatttaggacttctttatgtctgttagtttctgtgttggtgtattcctaggtattttataatttgtattagtattgtaaatagaatcttttatcctattacatatcttaacttattattgctgatataatcagccactttgctgaagtcttcttattagttctagtatttttttcagttgattgtctcagattttctaggtggcagttatatcatctgcagctttagaccttcgttgtaaatgggcccaaaataatgctgcttttttattctaagaaaaacaattcagtggagtcatgaagtgaaaagtatagcaaaaaattactctttaagggcaggtgcagtggctcacgcctgtaatcccaacactttgggaggccgaggtgggcggatcacaaggtcaggagttcgagaccagcctggccaacatggtgaaaccctgtctctactaaagatacaaaaaatcagctgggtatggtggcgcacacctgtaatcccagctactcgggaggctggggcaggagaatcacttgaaaccgggaggcagaggttgtagcgagccaagatcgtgccattgcactccagcctgggcaactgggtaagactctatctcaaaaaaaaaaaaaaaaaaaaaaaaaaaacacctttaaatttgcttcaatacttattataaaataataagcataaatatacagaataatagtaataaagagtgtatatgcaaaattgtaattttatggtattttgaacttaaagcatcaagatggtagcataaattaatttctaaaaagaaacctgaacacttacttttcatcatggttatttctgctacactattacggctatgataaaaatccagcaatgaaaaaggatgaggataatgatgtagcacctgcttaatgaataagaccattcagatgagcaaaatacataatttcaatatgttgtgttacctttcccctgaaaaggccatcaggaatttgttagagtttgatgcctccccagtagttagccttggtaactgaggaagtaattggcttgtgtttgactcaaaaagtttgtgtaggctcagctactggttatttttctgtcttactgtcttttgaacagctcagatatttcttaaaagggtctcaaatctcctacgtgtgattttgtagttttgttctactgacagaacatattcagaaattaaatcatttttttaacaatacattgaagattttctactgctgccttttcctcttactctttctgctcttcccattttctacattctttgtcagtgttttcttaaggcccacaattaattcttaaatttcttctttgaagctgtgaacaaaaccatccctactatcttggcctggctacctgtacagtgttttccacttttttgacaaagaacaggaaaccttttaaatcattcagacattcttttcatttatgtccttcatgctttaattatttacagtttaattacatctatgactatttaatatgagtgaaacattcttggcaatgttgaaggtcttctaaccctgactgcgtcatatttaatatcaggcttaccatccatacatggatgtgttgatgaaactctaagcctcatacaagtggtcttgaaacatcaaatcacacttgatttcaaaggttgatggatggaagtggtatgggaggcagaaaacaacttcagcaaagttacttgcaaactggagtgtttcagtgtccaggaataaatgatcaagcaacacatttaaaacatccctttttggccgggcgcggtggcccacgcctgtaatctcagcactttgggaggccgaggcaggtggatcacctgaggtcaggagttcaagaccagcctggccaacatggtgaaaccctgtctctacaaaaatacagaaaaaaaattagctgggcatgatggcgggttcctgtaatcccagctactcagaaggctaaggcaggagaatagcttgaatccgggaggcagaggttgcagtgagccgtgatcgcgccgttgcactccagcctgggtgacagaaagagactccatctcaaaaaaaaaatccctattttggccgggaacggtggctcacgcctgtaatcccagcactttgggaggccgaggcaggcagatcacgaggtcaggagatcgagaccatcctggacaacacagtgaaaccccttatatactaaaaataaaaatacaaaaaaattagctgggcgtggtggcgggcgcctgtagtcccagctactcgggaggctgaggcaggagaatggcgtgaacccgggaggtggagcttgcagtgagctgagatcatgccactgcactccagcctgggcaacagagcgagactccatctcaaaaaaaaaaaaaaaatttttttgaaatgcctctgaattgttcagtttaaaatggttacttttatgatatatgagcttcaaaaaaaaaaaaaatccttatgtaaatggttttgctgccccttcacacatatcatggatttctccacaaatagaaatccattttaaaaaacttcacagcataataattacaatgatttgtaatgtttaaagaaataaataagcatttcaaattctgatttttggtgagataattggtaagtagaagactattatcactaaatattttagatttaatgtatagttttctctttaaaaatgtccatgtttatgatggatgcaattattttatacattattttatataaagtaattacaattactttatatgttttctagccaatttatatgatttgtttatattaaataacaggttttctaagacaaaaaattctagtacrttaaatttaaacattaaacatartccattaaaattctaggtctagattaagaatcaggatagtttttcttcctctgtgtctctgctttcttattatttacttttccaccttcaagctaaactctcactcattaaaatggaactcactttgctatttactatgttacctcttaatgtgtttctgttacaagtgggagatgcataccttgccacacttgtgtgactagaaagaggttaaatgttttttgyagtgtctgatacatagtaggtggtacttaaagagtagcagtgattatttcccaagaacataagagtgttatcagaaaaagtaagttttcaccttcgcctcttgttacctttttaaaactgttgcagcctgtggaaacataaatgtgttttgaaaactgatacccgatggacatgaaggcctataatatgattctcttcagtggtttatttgctttgtttttctcaggtgaaagaaaagatgttgtcccggttaagagtagtttccaccacttgtactttggcatgtcgacatttgcacataaaagaaaaaggcaagccacttatgctgaacccaagaacaaacaaggttagtaacattaatatcaatgtacattttctctcttcttattaaagtttgatayatttaagactgataaggtgtgacatatttttgtagctttatgctaaggttgttcagagatagttgtttacatgaaattttcacgcttctccacatggcaaaatcgtggttgctttatacctcctcaatttcatcctcatgacttttaccaccagaaaaggattgactttgattcctagttctagctttaaaaaataaaaaataaaaaatcycagaatagtgctttggccaggactttgggccacatgtgagatatttacatttccccagctcatatcaggtactcaccctgagctaatcagttaggcccttggaaagtagggtcaaaattgtgaaatgaacctttatgtaaagtccacatcaccccacctccacttatctttttggacacaaaccattgcacacaaaaaattgtgcccattaattagaatgattagatgactgcttcaaaatagagagactcctggctctttattgtactcttgtgacaaaagtgacgtgcaatattgagatccagtcattacttcatccttcatctatgtttggwtcggtggacaagtgcctgcctgttttttagtggcaatattaaatagtaagtaaaagttctgggaagagattttttttacaagaagmttgcaagaggatacattgagtttattgcaatatatgaaatttaccttttggggaaaggtaaattcaaatgaaaagtgtgacttattttaaaagaacagtcataaaaaacttgccagtcccgtttgtttcccactatcagggaaaatagttaattgttaattgttatcctatgataagttttgaggggtttcaggcctacaaaggggaatttgaccatgggtcacacagagcacctcacctttgtattcttggtacatgacacagaatgagttcagcaagcagttagtgtgttaaatgaagcttaatgaaggatattctgatcttctcttgtttgtgcctgacctctccaaatctcatttgctctttaagatgcacctcatttcaaatccagttctcctgtagaacctttttacaccaccatggactggagtaattactcccttctctgaaaccccatagcagtttcttcctgttcctgtggcaagtaatcaataggtgttgctttgtgcttcttttcatggtttaagctgttattgaagtcattgatggtagttacattttcctgagtttatatcttcttgactatatttcgggttccttttgggcagggaccattcaaatacttctgtgtatcttttacagtgctatgggcgcatttgataaatatattggttttatattttatacttatggaaataatttatttaaaacctactctggggacttagagattataagaaatttataaagtacattgagtgtcaaacaagtttgcagatggagcatagtctaagtgcattaccatacttccctaaagaaaataatgtcggccaggcacagtggctcactcctgtaatcccagcaccttgggaggctgaggcaggcggatcacctgaggtcaggagttcaagaccagcctgaccaacatggagaaacttcgtctctactaaaaatacaaaattaggccggacatggtggcttatgcctgtaatcccagcactttgggaggctgaggtgggcggatcacctgaggttgggagttcgagaccagcctgaccaacacggagaaaccccatctctactaaaaatacataattagctgagtgtggtggagcatgcctataaacccagctacttgggaggctgaggcaggagaatcgtttgaacccggaagtggagagtgcggtgagccgagatcgtgccattgcatgccatcctgggcaagaagagcgaaactccatctcaaaaaaaaaaagaaaaagaaaaagaaaaaaaagaatgtctaacattctggccttctgaaatccctaagattgaatagcatctatatggtcacatcattgaaggaccacttctggaaaccccttaaacatcaggaagagtttatttttgtttaaagaacatagaccagtgattcccaattcatgggttatagactcctcaggaacttaccatgtaaagaaatctcrtttgtgcttcaaatattgtatacttaataacttttcacatttttgtaaatattatctttaaggatatgttgctgctgtaattaataaaatagtaattaaaggcagtattgaattctgaatcttcttaaatgtatgtctgtaatcactgtatactcaaggtatacctgctctttgtttataaaacttttttattgtggtaaaggaagcataatataaaattgacaattttaactatttaaaagtatacaattcagtgacattaaatttatttagtgttgtgcaaccatcaccactatctagttccagaacttttttattatcccaagtagaaacctagtattatttcattttattttatttttttgagacaggttctcactctgttgcccaggctggagtgcaatgacactatcatggcttactgcagccttgacctccccgggctcaggtgattttcccatctcaccttcccgagtagctgagactacaggcacgtgccactacacctggctactttttgtatttttttgtagagaygaggtcttgccatgttgtctatgctggttttgaactcctgggctcargtgatccrcctgccttggcctcctaaactgttgggattacaggcatgagccaccacacctggccaaaatttcttacactttaaaaggtgggacaccattatgctaggttataagcaggagtttaggtgctaatttgggctttaccatttactagccatgaaactttggcaaacccttcaacttctctaggccttagttttyttcatgtaaatwatataggtaatagcatttggaaacatttaaagggctatacaagtataaaattggatttctccttttctccccatgctcatttggctaacttttctcataattttctgaaattcagctctgcatcctttcccacacagcagaaggtgagcagtggttgagcaagtgaatcttcatctgtatttacagccactcctcatggcttgcattaccgcctgtgctctgcctcctgtcagaggagtgcaaaccctattgtgaactgcgcatgcaagggatctaggttgcacactaattatgagaatctaatgcctgatgatctgaggtggcacagtttcatcctgaaaccattccctaccccctgaaatagagtcaacaagataaaaactcatgaaaatgtaactatcatcaatgacttcaataacaactaagacatgaaaagaaaaattgtcttcagctggctgtggtggctcacacctgtagtcccagcactttgggaggctgaggtggattgcttggggtcaagagtttgagaccagcctggcctggtctctaccagcctgaactcgtctctaccaaaaatataaaaaaattagccaagcactgtggtgcatgcctatagtttcagctactcaggaggctgaggtgggaggatcacttgagcccaggaggtggaggttgcagtgagatcgtgccactgcactgcagcttgggtggcagagtgagcccctgtctcaaaaaaaattgtcttccatgaaactggtcactggtgccaaagaggatggggaccactgctctaggaagttttcagtgaccctttttcctaattcctcaccacactgggtgagttactcccctgtcctttgagcattcttgtgctcacttctgtcaataccatgtatcatactcagttggaattatctcattcctccattgaggacaatgaccatatcttagtctgtatcctcattatcttaccccacagtacttagcacacacagagcctcagtacatgctgggtagatggatgaatgcataaacagatgagcaaataggaaaacaaaatctgacrtgattggtgctcggagtttcacagataattaaacataggttttgtttccagaaaataagtttggattagataggagttttgttacctactcttgtaaaacaagttaggaaatacccctattcacacctcttttccccatgtactgatttatgtgttttcttatcattttttgagcaagtgaagcttcatctgtatttacagccactcctcatggcttgcattacaaagcccatttcatcttacaaagtcttaaaaattgagtgatgcagtttttttttttaaataagaatagggggaggaagaaggaaaaaagtaagaataattttwtttatttatttatttatttatttatttatttattgagatggagtctcgctctgttgcccaggctggagtgcagtggcgtgatctcggctcactgcaagctctgccttctgggttcatgccatgctcctscctcagcctccctagtagctgggagtacaggcgcctgccaccatgctcagctaattttttgtatttttagtagagatggtgtttcactgtggtcgcgatctgctgacctcgtgatctgcccacctcagcctcccaaagtgctgggattacaggcgtgagccactacgcccagccaagaacaattttaaattacattaaaaagttttcagttgagtgatatgatttggctctgcatcaccacccaaatctcatcttgaattttaataattaccacgtgtcaaaggtaggaccaggtggaggtaactgaatcgtgggggtggtttcccccatgctgttcttgtgatagtgagtgagttctcacaagatctggtggctttataagggacttcccccttcgctcagcactcattctctctcctgccaccctgggtagaggggccttctaccataattgtaagtttcctgaggtctccccagccatgtggaactgtgagtcagttaaacctcttttcttataaattactcagtcttggtatttcgtcatagcagcatgagaatgggctaatacaatgagtatattttatttcaaatttatgtattaacacctaatttctgtaccaaaacaacataagccatagaacatgtgatgtgaataattgtggatttgtgatgaacagagcttgccacttagttataatttgcccttttagtgcaatttcatctcaattaacacattttcagaagtctaaacaagcatttgagtgctagtgaggcactggctacatagcgcctatccgtattgaggttaagggaatgcattttatctcctgcttataaatgtgtgtaaatggattctatctcctgaatcgtttgccttctatcttacatttctcattacaaacgtaaatcagtattaaagagtctgatttgtattaaagagttgttttagtcttagattatttctgttactctcaggatatgtcttatattagattgtacaaggcttaaagatacagataaaatgtgctttaaagtatgaaatgagtaccagaaaataaatatttggttgaatcagagagatgagaaaatatataacaaatgaattggctattcatttttagtgtggatttaaagcttttagaggtagatataagtgatactttcttttacactgtaataatgcttccatagggtagagtgctcaaacaagaaatttgggaaggattcaggctgaggtctattatgattacaacagtaaaagtgtacaattgtttgattacaaggtgagccaactctaaactatgtacatagcctccgaccctcaattttgtttttcacttttgttcttcctgcctctgtgttggctgccttagcaagagagatgccaacatttttattgatgacccagtgggctaaaggtataggagtccttctgaaatttttttaaaaaaacacctgaacactattgatataacctagtaattctcaagtaactcctgctatctacgtttttttctttttctagttcctcccgtaatactactaaacatctcttttaaaccaagtattcttttcaagatgtaagattgtgaagagattttactacagattcttaatttatttcagccaaattcaaatatcctaatggactctatttagaataatgaaccatagattgccagaactaaaagagctaagtacatagtaaatacctatgcaaaccattaacttaattcgagaaggagtgttaaagaagagaatcaataactcctttattttgtagattccatccctaagatttaaggacatgctcaagctttgtatctggaactctggttttctggttattagttctctgagggttttgttaatttatttgtttatattttaacttctcccggctagttctttaataaatttagaattttcttctggttatttacacaaataatatgactaataaaagatttaaaaatcacattgctattattctatcaccttttttggtgagacagagatttactcttgttgcccaggctggagtgcaatagtgcgattttggctcaccacatcctccgctcccaggttcaagcgattctcctgcctcagcatcccaagtagctgggattacaggcatgtgccaccacgcctggctaattttgtatttttggtagagayggggtttcagcgtgttgtccaggctgatctcgaactcctgacctcaggtgatccactcgcctcagcctcccaaagtgctgggattacaggcgtgagccactgtgcctggcctctatcatctatttttatttggccatgattctcttaaaagtatacttacttttaagattataacatatacttttatatgcarttttaccactgggaaaagtatactataaatatatctctaaaatgtttgataagctgtataataaatatatgggtgcataatagtgtagtagcctttggatttggaattccagtggctgatgagactcccagctttgcacctttactggccccctagcatgtttacctgaatgttcaagtgtctgtttaagagatttgtgtcaatattgactcgtggagaaactgcatgtgcctaaagtaaaatagttcagggtctttcaggatcagctggaggaagtacacctctgctatgtaaattgggagggagggaattgctgttgcatagatgagaaaaagggagacttgggaraagtggcaaagggagatggagaaagtaggagaagagtagataagaggatgatcatttctgcttaatactaaactaaccaggccattcattttaaactaatgtcatcawcacaggcttgcttcacttattaacaccagcctagcaaatttaagaacttaatcaactgttaacataaatatctatacataaaattatttaatcattttattttttactctgcattataaataaatcacttttgagtgtcccttaaatctaaataggaaataggcagtgcagccttgtgtagtcaactccatttatctttggcaataaggataggcaaagcatacttttttttttgagacaggatcttactttgtcacccaggcagaagtatagtggcacagtcatggctccctgcagcctcgaccttccaggcttaggagatcctcccacctcagcctctgagtacctggtactacaggcatgtgccaccacacctggctaatttttgtatttttgtagagatgaggtttcaccatgctgccctagctggtctcaaactcctgggctcaagcaatctatccgygctggcatcccaaaatgcttggattacaggcatgaaccactgtgcctggcccaaagcacttctaaatgaactgcatagttcatttaaacatacgttttagccttttcctttacccttttgctagagttggaaaaaaagacgcaagagtgacagttttggttttaccttctttgtatttcccagccttcaataaaatcatacaaggagaaacatgagacacatgtttattattgtctagcgtctcctccattattgaaagtgggtattaaagtctccaacttgttgaattgtctttcttcaattctgttagctctgcttcatgtattctggacctctgttgttaggtatgtctatatttataatagttatatcttcataatagattcaccctttcatcattgtaaaatgtcctctgtagtagcagcattcattttaaagtctgttttgtctattgttagtatagccactctagctctcttttggttacaatttgtgtggtatatctttttccatccttttactttccacttatttgtgtcccttacagacagcatataattggattatgttttctttcttctgtttttttttttttttctgggacagagtctcactctgtcagccaggctggagtgcagtggtgcaatctcggctcactgcaacctccacctcctgggttgaagctattctcctgcctcagcttcccaagtagctgggactacaggcacccaccaccacacctggcttattttttttttgtatttttagtagagatggggtttcaccatattggccaggctggtctcagaactcctgaccttgtgatccgcctgcctccgcctcccacagtgttgggattacaggcgtgagccaccacgcccagcctaattttatatttttagtagagatgaagtttctccatgttggtcaggctggtctcaaactcctgacctcaggtgatccacctgcttcagcctcccaaagtgctgggattacaggcatgagccactgcgcctggccgacattatttctttagagaagtatggtaatgcatttagactatgctccatctgcaaacttgtttttctctttgtctaggtgtagatctcttttgagtttataatacttggagttgttgagcttactggatgtgtggattaatgtttctcatatttgggaagttttggggcattatctcttgaaatattattctgcttctttctctcctctcctcaaacttcattatgcatatgttggcatacttgatggtgtcttacagatctctgagattctgttcatcttttttttgagacggaatctccctctgtcaccaggctggagtgcggtggcacgatcttggctcactgcagcctccgcctcccgggttcaagcaattctcctgcctcagcctctcgagtagctgggactacaggcacatgccaccacactcagctaatttttgtatttttagtagagatggggttttaccatgttggccaggatggtcttgatcttttgacctcatgaaccacccacctaaggctcccaaagtgctgggattagaggcgtgagccaccgcacctggcagttcatatttctttattcttttttctttctatcttagactagataatcttgggtgacctatttttaagtttgctgattctttcccacttgctcaaatctactgttgaacccctctggtaaatttttcattttcatttattgtactgttgatgaaaagattaaaactctgtaaaatatttgaagagatttattctgagccaaatatgagtgaccatggcctgtgaaacaaccccaggagatcctgaaaatatgtaccccaggttgtgggggcacagcttggttttgtacattttagagacacatgagacatcaaatacatttaagatacacattggttcagtccagaaaggtgggacaactcgaagtgggggcttccaggttataggcaggtttaaattttttcttattggcagttggttgagttattatcaatagaaataaatgtctggattatgataggaggctttggagaccagagtttcttcatgcagatgaagcctccaggtaacaggcttcagagagaatagattgtaaatgtttcttatcaggcttaaggtctgtgttgatgttaatgctggaggagtatagtgaggcatgtccgaccccccatgccatcataacctaaaccagccttttcaggttaaatgttaagagtgccctggccaaggaggaagtccattcaggtggttgggagaccttagaattttatttttggtttgcagtactttcattcccagaatttccatttaatttctttgttggtagtctcaatttggtgggacattattctcatactttcctttagttctttagacatggtgtcttttaagtctttgaatgtattcaaagatgtgaatgtaaagtctttatctagtaagtacaatgtttaggcttcctcaaggacagtttcatgattttttgttgaaaactggacattttaaataaggtagcagttcaggaaatcaaatactcctcccagggtttgttgtattgctgctacttttgcttgtttagtgatatttccaaactaattcttttctttttttgagatggagtattgctcttttgcctaggctggagtacaggggcatgatcttggctcactgcaacttccacctcccaggttcaagtgattctcctgtctcagccccccgagtagctgggaccacaggcacatgccaccacgcccggctaatttttgtacktttagtagagacagggtttcaccatgttggccaagctggtctcgaattcctgacctcaggtgatccgcccaccttggcctcccaaagtgctgggattacaggcatgagccaccgtgcctggcctccaaactattctttataaagtctgtattcttgtacatgcccactgaagtctctgattggttagttttgtggtcagctgataattagacaaagacttaaatgcttggaactagtaaatttcccattttttgccaagtggctctgtgtgcatgttgcggcatacctccagcactgaaccaggcagtttacaactacccagaagccttcacttccttcttgcacagagccttaaggttagccagaggtgtgagctaggatcttttcaggtctttcctggatgtgtccacagctcatgtatgtgaccttctagagtcccggtaatacctcatggcttttgaaagctccaaccccatggtcatctcattctttagcttttccttgtgagctttttgttaccctgttgtttttctcaactgttatccactgctttgggcagctgctatgctaaattattgcctctgattgtttccaacaagcacttctggggaaatggcttttcagatggggtgagcgccaagttaggtcaaatgaagatagccttgcaagtggggtcttccagggaaccaccagacaggtcaaataatgacattttcctggaatrgggcttagaagaatctccagccccttcttcctgccctggtggcttccaggctgctgattttcatagtaattgtgaggtgttagttttcgatttaaaactcacaaagcttgttgcttactgaaatccagccatttttcctgaataactgctccctgattgctgcatttctttggtaaatttccagaatgttgaagaagttgcttctggttatttgtccagtgttcttgttgcttttatggaggaaaagattttccaaaggccttgctccagcattttcattgacattgctttgatacgaagaatttaacccatagtcaaatgccagaaattgaaaaagattttcttatgacatagattaattttttcttaagcatcatttcttctatccccttttaatggtatttcatggtatgaatataccataggatgcttaactctttcgtagttaatgggctttttgttagcttgtaatatccaagagaactagaaacaatgctacaactaaactttttgtatatgcctttgtrtgccattaagaatgtttctctagaatggctccctggaagtcagattgcttgatgaataatatgtatataaaaaatttaagaatactttaaaactgtcttccaaaggcctaaactagtttatattcccagcagtggtttgtgagaataactattttccacaccctgaccratactgacatcagtcttacaaagttttgaaagcctgggcaaaaataatatgtcattgatttttcaaatttgcatttaaattatattttgaagaacaatgtcattgctaccccagtaagtaataatttttaatccttttatttctcctctttagggaatggcatttactttacaagaacgacaaatgcttggtcttcaaggacttctacctcccaaaatagagacacaagatattcaagccttacgatttcatagaaacttgaagaaaatgactagccctttggaaaagtaagagttgcttagatgtttctttttttattggtattctgattagaaaacttatgagcattatggttattatggcatgagaaatacacaatcttatataagtttgtgttttgtcagttaactacttttataaagattgtgtttctttcacttcggtgaatacttcacaagtattcactattgtaaaacttaacaaattagtttttatgcttacagtcagagcaattcaggtttgaatggaatattagaagcaaaggataccatctaatttgcactcattttattcaaaaacttttattgatcacctgctttgtgtttgacactgtaccagccactgaggctataaagtgggtaatagataggatgaccatatattatatcacctaatctaggatactttggagaataaaaaagaggtgtacccaaagctacccctggcaaactttttttgtttctttttttgagatggagtctcgctctgttgcccaggctggagtgcagtggtgcgatctcagcttactgcagtctccgcctcccaagttcaagcagttctcctgcttcagcctcctgagtagttgggattacaggcgcccaccaccatgcctggctaatttttttatttgtagtagagatggagtttcaccatgttggccaggctggtgtcaaattcctgacctcaggtgatccgcccgcctcagcctcccaaagtgctgggattataggcatgagccactgcgcctggactttttcttttcttttctttttttttttttttgagacagggtctcactctgttgcccaggctggagtgcagtggcacaatttcagctcactgcaacctctgcctcccgggctcaagcagttctcctacctcagcctctcaagtagctgggattacaggagtgcaccaccacacccggctaatttttgtagtttttagtagagacagggtttaaccatattgcccatattgcccaggctggttttgaactcctggactcaagcaatctgcccgccttggcctcccaaagtgctgggattacaggcttgagccactgcaccaggcagcaaacttaatatatatgaccaacccagtaactcatagccctgtcttctaaaagtcatcaacagacagttatgctatgattgttattggtctctagaccacaatgtacagtacaatgagaaaaaggtacaagcagatatattctgagagcatgcagagggcatctagctcaacttggggaatcagataaaagcttcctgaagggagtgatgcctaagctgaattgtaaacaggatgttacaggtagcaggcaaagtattctgggtagagggatcggtctgcatatagaactaagcatatcaattgagtttgttaagtataggagattattggtgactggtaagagtggtttctttgatgtgatagagcaaaagagatactgtgatagattgaaaaatgaatggagggggaggaaatgtaaactacccttacaagaagttcaggtaaggagggaaggaagatattaaataataagtaaagtaagacttgggattaagtatgtttcaagctggaagaaaatttaatgtttcatcgtagttaggaggaatgagcccaggagaaaggataattgttagagcaaggtctagggaaaggaaaaaggcatagggtcaaatgcggagatagagtggctggtcttgagcaagaacaaagaacagctcattctccgaagctggaataaacataaatacagatagtaaggataagtatggagatgtttgagcagaagtagtgaactctcaatcttaactgatgatcttgctttcttttatgacatagaatatgaaagtcatcgctcagatttagaagggccagggttgagtagagttggtgaggagagtgagaaatgcttggaagagccatgtggctataagataaagctgaacaaaagctaggcttggtggctcatgcctgtaatcccagcattttgggaggtcaaggtgggaggatcacttgagcccaggagttccagaccagcctgggcaacagagtgggaccctgtttctacaaaaaaaaaaaaaaaaaaaaaaaagccaggcatggtgtcgcatacctatagttgcagcagctcagaagactgacgcaggaggataacttaagcccaggaggtcaaggctgcagtgagccatgattgcaccactgcactccagcctgggtgacagagtgagaccctgtctcagaaaaaaaaaaaaaaaaagaaaaaggctaaacaagagcaggttaaaggggtgagagcagaccctgatggcctggtggcaagatcttgtttgtattggtgccattctgcacagcaatgttatttttccatagaaaaaatgaaatgtaacactgattcaggcttggagtttgctgggctggcaaaggcaggtgttacataaattcattcagttaatattcaggactgctaatgtgcctggcattgttctaagctttgaaactccacaaatgaaaacactcagcccttctcttcagagagttcactatctctggtggaaaggcagacactgtggaagggtagtacagtgataaatcatgtggggattcctaaacagtaatgacagggagagatttgctcagagtgagagatttgatcctgggattcagagcaggaaataaagaggatcctgaagggagcccatagaattggaagaaaatgaagcagtcaaagagctagagatccctctgaaggatgacgaagtgagggcatcatatggctacccaaaatggtagaggattgtgatccaagagtggataagggcattcaccattgctgagctataatgatcctaggtgagtgctgcccatcactgaggcacacagaagactgactaaagtgaaataasgattgaaagtggtaacattgaggagatccatgacttgtagagcttccctctatcacatgcctcataggtcatctgttctttccttaacattacttccatctcacaaagccatccattccattttagcagcccagtttgtttacttccctatactgcagagaagtcttcttccctttaatttctatctgttgataccatttcttccactattagctatgtagaaaataaaattgaagggatcacgtctcctcatttattcaccaaatatttgcacaccagttatatgccacatattgctattaatagttcctggaactatagaagtatatgaggtgatcatttctaacttatggtattgtctagactggaggaagccagaaagtcaaggagtggagtgagagttaacagagggaagtaggctatcatgggacctgaaaacaggaaagtctaaagcgtgtatgtatacatgataggggaggggagtggacagaaaagggcccccagagagcacgccacctgagctgcatttggagcgcacatgtataggactatacctggagagagtgcaggcaaatggtgcatcaaacgcagcaagtccaggttgagttgtgatgcatttgaggagctgaagtaagtcaacatgaagaagatgaggctgaaaagtaggcagaggttttgttaactattttaggagcttgagccttattttacgatgatttatttggaagcgacttaaggagaacagaaatgatcacagttaggtttttaagagaagaatgaattggagcgtaggaggaaattgtatttataaagactggtaagaaggcttttgaggtaaatcagctgagaaatgatggtagcttgtactgtgcaagggtggagggagctaatggatatatttgaaagctacttagcaggtagactctgtaggacttggtgatttataggattggtgttggggagggtaggagaggaataaatcaagaatggaatctgggtttcgcatttggtcacgtgatagcagaagaaacaaggtcaggggaaagataagtctgctttagacatatttaattcaagatgattactgactttcaagctttcaagctgatatttccctgttctctaaatttaaaaacaagttatttatatatttattgacatcaattgacaattgccttttttgtgctgcttctgcactctgtgtagaccttataatacttctaacgctcctgggttataaactccttgaaaatagaggtaacttcttatatccctggagaatagtgccaggcatatagtgttaagcaaatgtttgaattaatgccactttattttgcttccttgtttatatgtcagtctccttgaagactgattctttaagcgtaaggacctcatggtgatctttgcatttccagtgccttctacagagcctgacccacagttagggttcagtaaacattgtttctattgttatttcatcgtcatcatcatctactatttaagtaccctcatatttttgttaatttttagtcctgggtgttaaatagtaataatctaaggttttgggttttttttagaatgtgatgtgagaatggggctcaatttcaattttagacatttaggtttaactttcataagccaagacttttaatgtaatgcaggctgacttagacattatttactgtgcttcatttcagatatatctacataatgggaatacaagaaagaaatgagaaattgttttatagaatactgcaagatgacattgagagtttaatgccaattgtatatacaccgacggttggtcttgcctgctcccagtatggacacatctttagaagacctaagtaaggcttgtttaaaaaaaagcttgtaaatgattattgaataaggaaaatatcattccataacacccattacatttctattttatgtttgttagccaaatcacatttcccacctcagaaaaacgtaattttgattaaaagagattaacaaaatcccaacatattcataacttttatctttgtaaaaatagcataattcatttctaatcttctttaaattattgtgattgttagaggaattacatacatacttctggaacctgctcccccaccaaaaaaagtcttaattctggtgggagattatccagaattatcattaaaatttttgtcaataaagtcaaattaagagatttttttttctcattttttaatcagttttaatttgtttttgtttttgagacagagtctcactttgtcacccaggctggagtggagtgcagcagtatgatcttggctcactgcaacctctgcctcccaggttcaagtwattcttgtgcctcaacctccctagtagctggaattacaggtgcacgccaccatgcctgctaatttttgtatttttagtagagatgggatttcaccatgttggctgggctggtcttgaactcctgactccaagtgatcagcctgcctcagcctcccaaagtgctgggatttacaggcgtgagccactgcatctggcctgttctcctttttttaatgaattttcattccaaatagttgtagcacctacaaacattataagtgggaagagtactgaaatggcaaggactgactcaagttcttgaatgagtcgcgtgatccccatgaatgtgtttcctcatgtgtaaaatgggaatagcaggacctatcaaagagctattggagaaaccaatgtgacagttctttggaaaattatcagcaatattatayacacacacacacacacacacacacacacacacacacacacacatatgctgttttcacttaatctgagttttcttattcctctaatccattattatttttctcaatccttataatattttccccatgcccaattaacacattcttccacgtgtagaaattcagtctcctgtcgccttgtctagtggctttcaaactttaatgtgtgtaagaaatacctgtgggacttactcaaaatgttgatctctgccaactttcctctcctccccatccccaagatttctgatgaaaaagaaaaaaggtctggaggtccggattttagtgagcaccctcagtgattgtgttgcaggtgttccctggaagacactgagaaacagactgttctaacctagatgctgccaacaattactgtaactaaaacatttctgtgacataaccatgctgttcagctattttatagtttcttattagaatgattaaaagatagagagaaacttagaaatactgatgcctgagccccacccccagagattcagattcagttagtctagacttaggagtttcacaaaagagcctggtgtaattctgatgtatacccagagttgagaactgacttgaaacatgaagagcatggcttatgtgtgagggcaaatactgtatattgtttatgcaatgcattgtgctatgggttttttttgttgttcattttgtttttgtagatggtcattaaatcttgattggttggttgattgatctaaactttaagctaattaaatcagaatctttggaggtgggaccctggcattttaaagcttatcagatgattccattatatagccagattgagaaattgctgaactaaactgatttgaactgtaatagtagtgccaaatttaagataccaatgagaaagttaaacctaagatcagtttgacagcaatgaggatccactggccctcatgtctgcctgacctgtgttctagaacctgcgtttcttctttttttcctccttctctcccttccttctttgctttctcttttgaaatctggattgattatctgaattaggtaacaatatactgtgtctaaaatgactttttgttagccattccacaatttatacatayttcaaaacatgttgtacatgataaatacagttgacccttgaacaacacaggtgtgaaggtccatttatactcagattttcctgtgcttctgccacccctgagacaggaagaccaacccctcctcctcctcctcctcctcctcctctttatgattttgttaataacattttcttttttctagattactttattgtaagaatacagtatagaattcatatggcatacaaaatagtgttagtcagccaggcacagtgactcatacctttaatcctaacactttgggaggctgaagcgggtggatcacttgaggtcaggagttcgagaccagcctggccaacatggcgaaaccctatctctactaaaaatacaaaaactagccaggcatggtggcgggcatgtaaaatcccatctactctggaggctgaggcaggagaattgcttgaaccctcggtggaggggcagaggttgcagcgagccgagatcgtaccacttcactgcagcatgggtgaaagagcaaaactccaagtcaaaaaagaaaaaaaattgttagtcaatctgtgtgttactggtaaggcttctggtcagtaataggccattagtagttaagtttttggaaaatcatatgtaaatttttgatttgattttctaacacccacattgttcaagggtcaactgtatatccaatttttgccaattaaaaaataatattaaataagtaaaagtaacttcactttttcctgatgcttcaggtgtctcatcttttgtgtgattttactgtaattttcttctctcccttcctgctccytcaaatttcaaattttcagtttcagtaagtcttaacaatagtttagttggccttgtactgctctcctgcattggtggcttgctttagattttttttttttttcctggtggtgtattgagtttatttgaacatgagatgtggttacatttcttcttgggtaaaatgactgtatcatttaacaataatcttkgtkgcatctgctatgaacagtaattacagttkgaagtacttgaaaatgtttgaaaataamccagtgtgacttagctaaatctgcttggaaattataccatgtcttgatattttattaaaatatcaaaatatttcaattatgaacaaaaacttagaaacaaagctgttgtgaaatgcaaaggtgtttttgttctgttgcaggggattatttatttcgatctcagacagaggtcatgttagatcaattgtggataactggccagaaaatcatgttaaggtactaatagcacaaccctccttttcacaatgttttctcttttcttgtaaattacctctaaatctccaagaacagtttttcattgttgctctcatttattttgcacttatatacatgcagatttagtgctttgcagctgaagtgatgataatagtagtagttataaaatgggctactggtataaagtttgactctgagaaagaaattagagctagaatacaaggtgagccctctcggtatcagcaccactggtgtctcctgccttctcaatctccttttctatttcactaatattattctaggtaaagaaaatacattaaaatgccataaaaacttttgtttatgaatggtgttagagaagtttggttatgcctttttttcttttaaatctaagatttagaaccttagcaaatataaaaatgttaaatatagcaaatataagccctggcctatttagttatctttcataaaataaaatgtaataacttatttcaagatctttgggtaggcttttgtaaattttattgtaggcaataatcttacctgcctttatactcctttccaaaataaacattgaatgatcgttggtttgaatactctagcaaaaatttggtcaaataattaaactcacagtatcatcttaagaccttccttataagtaggtattttttttgttctagacctttttctttttcacagttgctaaggttttttttgtttggcctaggttattgtgttggagtaccatgctgtttatttctaaactcttatttttctcttatggtaatctctccatcagaatcttgttcatctctgccatatttaatctttctgaagatatttaagttggtcctctagtcagaagaattctattcctaaaccgaagtcagagggaaatcaaatctagttaatgtctcataatactcagaagtcctagaattttaagtatgctttgttggtttacattggaaattagccaagaaacaattttatttttaagagcaaagagtaaatatatatgaagtgaatcaatcttttaaaaaatgcttttctttagtgccccatttttgacaacttttaatttgcatttttttgtgattaaggctgttgtagtgactgatggagagagaattctgggtcttggagatctgggtgtctatggaatgggaattccagtaggaaaactttgtttgtatacagcttgtgcaggaatacggcctgatagatgcctgccagtgtgtattgatgtgggaactgataatatcgtgagtaacatcattttccccctttatcttcctcctgtattttttaaaatgtgtacaatattccttttttgaaaatgataatttaagaagggaaagttttatgattagatttttttttcttaaactccacttttaatatttatataaataatagtaaattaagtctattaaaagtttcttggtccgggcatggtggctcatacctgtaatcccaggacattggaaggccgaggcaggcagatcaccaaaagtcaggagttcgagaccagcctggccaacatggtgaaacccagactctactaaaaatacaaaaaaaattagctgggcgtggtggcacatgcttgtaatcccagctacaaggctgaggcaagagaattgcttgaatgcaaaagacagaggttgcagtgagccgagatcacaccattgcactcyagcctgggtgacaagagtgagactgtctcaaaaaagaaaaaataaagtttcttgtagggcaatacatttaaaaaattgtattagtaattttttattttgcaatttttattgtatgtgtttaaactgattatataaattattttatttttacatttggtttattttgtaggcactcttaaaagacccattttacatgggcttgtaccagaaacgagatcgcacacaacagtatgatgacctgattgatgagtttatgaaagctattactgacaggtattttttaaaagtttgagtatatgaaagcacctttaatggggtgggtggggtaagaaccaaagttttgttttgttttcctttatttctttcctgtgtagataagcaggaggcgattaaatttttgagaactttgttctgcctggctgtttctgcctgattagatgtgccgatatgaggtggtacccatggtctgccttgctttcttgagttacctgasattttgagggaagtctgccctcactgcttccatcaaacgcttactgctcagtacctttttcagccttgaccttcaggctcacgcccaccattccactgaagctcttgtgcagcttttgtattttaagttctctgaccattgggtcctcccacttctctacctctttgcaccgtcaactcaggttttcccacttctatgtccttgaaactctctcttctcttgactgctaaacagcttcctcctaacttggtctttctcccacctttctcttttttttttttttttgtcatcttcacaggttcttgctgtctcttactaaatgtggataactacctagtcctcttctctttcagccatgtcaactatgacctttatgcatgttactactaaacccataaaaacccatctgtagttccactgctcttgtgaggcctgcatttctaatartcagaatcttccatctggrtattctgttatgagtgcatattcatatcccacactgaactcctttcctttccaaacaacctatcttctgtattcccagcttctattattggcagtaacattcatcctgttgccaaaactttgatcttagtgttatctttgactcttctgccttctccgtcagtctcccrtgmwktcagatattcctcaaattcagtgggtactaccacttaaatgtctcctgttttccattgccrcaatcttgctctctccttatctctcttctggagttttctaattcttcctccagtttctctcctctccagttcgtctccaccttaataccagattaattgttttgaaacgtgtgcttcattwtgtcattcttttgcttgaaatctctgattggtttcctattgccataggataaagtcaaactcttttaccttaatgatctaaccctggcctacctttaaaattgctggcacgtagaagatatttaaacattaattccttttcagagtcaaagtcaacaagtctaaagctgaactttacatcttcycagaaattgccatctctccttcttcctctcactttcctatcttggacaaccaaatagtaccttcttagttaccccattaccttcacattgtaacagcttcttcctcatttcccagttgatccttatcaatttctattcatcctaatagttcatagttactccttttgcttcctgcatcttctgcttcagatctcttgtcttcgtatcatagtagcctcctagttgcttctgccactcccgtctccccacaccaatatgagctacgtatcactggcaggtttatccttcctaaagggagtcatatgtgaatattttcctttctctgcagccttcactgtttctacatgggatgcagaagaaagtccctcttctctaatttagcattcgagatcctcccttatttggttccaacctgcattaaccaatttctcccttatctcttaatgtaaaccatgaaatatatagccagactgttgaaaattcagggtcaccctaataacagcctgcttttcttcctagctctttactttttgttctttcagggcccacctccttttcaagccttcccttactacttgagctcacctagacgattaacatcttctttttctgaatgtcagtgaactcaaatagcaattatttttcaatttcttatttaatatatactttcttgtgttgctgtttaactattaatgtaatgagaatatacatatcaaatatatattttttgaggttcagagtcaaaggaagtgtcctcctggacacttgaaaatagtttacatagattgatakcccatgggtttatcattgtgccacattctttttaaacacctcatactttttttattgaataatttctacattttggatctagtctttcacaggctctgaaatttttcagatggccttaattgaactaacataatacattatttttgaatgctatcatagggaatattaggtggaaagctgtttaatagtgttattttcaacacaactattgtgggttttgctgtttttagatatggccggaacacactcattcagttcgaagactttggaaatcataatgcattcaggttcttgagaaagtaccgagaaaaatattgtactttcaatgatgatattcaaggtaaagcaaaaaaacttyagggttttgattcctactttttaaacatttttaatgtgcccattttttatttgtaaaaatctttgtttttcttacagggacagctgcagtagctctagcaggtcttcttgcagcacaaaaagttattagtaaaccaatctccgaacacaaaatcttattccttggagcaggagaggtaagttttgaaggctttttgaaacttaagcctatcctctcttatagaattagaaaatgggcagaatattgatgtttatgaaagagcatagtgagcctgtaattttgttgaggtagaggatatgaaatcaagagttctgctgtaaaacatgtaatttaaaatatgtttcgagagaatatcacgaagaatttttgtttgatttgtaagggaaaaataaaccaaatatttcttatggcatataatcttcatatataaagtaattcaagcattgcatcgtactctagtatatattaaaatttatgttttgttgaacaggctgctcttggaattgcaaatcttatagttatgtctatggtagaaaatggcctgtcagaacaagaggcacaaaagaaaatctggatgtttgacaagtatggtttattagttaaggtaaggyatttaaaatttggagaagcaaaagagtgtattatatttttagttggatttttaaaatattattccttaaaatcttgtttctcattggagtctccaaattataccaattgggaccttccactctcttttcaacagatgtccctagtcttgttgtcttttacaaagacttctgcttcatattgaattaataatctctatgttggcatcagacttactctttcttgctttgttgtcttgctcttaagagatcaaatggccattgtacaagtatgatcgtgtttgacactcctaaaactaggtttttagtaggaactgagaacttcctaattaaattgcagtattgcagtagttttgatatttgagcagaaattcttttaattttattattatttattttttttgagatgaagtctctctctgtcacccaggctggagtgcagtggtgcgatgtcacctcgctgcaacttctgcctcctgggttcaagcaattctcctgcctgagcctcccgaggctaccgtgcctggccgtgagcagaaattcttaaccctttggagatcataatcccctgaagaaatctaataaaaatctgtggaccctatccccaggaaaaaagcatgtgctcctgaaaccaatttatggataataaagagcttatctcccagattaacttagtacctttgggcctgactacctttgttagcattgattaccattttcactagcttaagaatgtcatatatcttctgtgtaacacattgaatataagtaaactgttccatagttaaaccaatccagtacacaatgctgttatatttttgtatgtacacattaaaatataatggtatagctgtcgcttggcatttatgtctgtggagcaagctatctaaatgtactttgttccagttctaaaatcttttcttgttaattagaaccagtattctattagtacaaaaaataaaatgaaaagttaaagtatgtgaatgaaaaatcttgagtgctcaaactacatgtaatttaaaatgtaatagtagttatataccagacattgttataagactttacatgtattatctcctttaatcatctcaaaaaatcctgtgaagttttacaaatgaagaaacagtttaaaaggtcgagggagttttccaaagtcatcagcttataagtgacggaggtaggattcaaaaccaagtatcctgactgcgaagcctgtgctctgaataattaaactgtgctgcctcccaaagaggctgtaactaccatatttactagtatgtaaggcacaaggataaaacatcacatatttagaaggctattgggggatgtatgttttgactagtacacagttagtttggtacttctttttgtaatgttggttttcatcaaatatgttgtgattctttagcatattggtaggtcaggtctaacacagtattggtagctacaatgtgtttacttagcacaaagtgagaaccctgtccatctccatattcatcatcagattatatatttcttttccagtgtgcaggtagcttggcctatgggcattaggcttccagtgtctcctggtgatcctaaacactgcccttcattttgaaactttgaaaacagtggcttcttaygtcactgtttgctcagcctggttttctcagccgattgatgatagtgtcctgctttactaacccctgcagtttcttatctggagttatcttggagttctgatggaaatacactttttcagaagtcttcttttttaccaaaataagaatatgagttctcagttggtttttgcattcagtatgtttttgtctgccttaaatctttgagaaattcttcattgttctagtctgtcagtggtatctcttctggctttgtggcattactacaaatttaacttttatggtttttgacctgggatttggaaaggaaagcatgtttcttcattcagccatctttaaccagaattccctgttcctcttgtttctgaactcttggtagtgcaagtccatggtgtctgtctgcaattctgaaatcctaaaggctttgaaattccaaaattttttccaaaatttatttttgtgaccaatctgattgccttgaatttacctagaagcgaaacctgactcaaactaataagaagctctttgtaatcttaaccttttgtacttgatgtgactattcataagtttgttcagttgtggagtatctgttgggagggagaatatgtaatatttgatatacgccatattgtatttctaaaatatgaaaaattctcagccaggagtggtggctcatgcatgtggtggctcagcttcccactttgggaagctgaggtggacggatcacttgagcccaggagtttgagaccagcctgggcaagatggcaaaaccccatctctacaaaaaaatcatccgggcatggtggtgtgtgcccatagttccagctactctggaggctgaggtgggaggatcacctgagccyggggaggtagaggctgccactgcactcaagtctgggcgacagagtgataccccatttcaaaataaataaatcaaattaaattaaatatgaaaatttcttaattccaaaactcatctaccccagataaaggactgtaggcttttgtgccacattggacttaggaagacctcatagtgtaaatgcatttttgagaggaactagaaagtttctaggaataatggtagatttgatttttgttttatatttgagtttatggacatgatgaagatagagttggaaggtatgggttgaagaggaaagtaaatgaaaatgaaaagacatttctattgtagaaacaatgtgtaactcataatgatgtctttttatttcatctttaatatgcattgactaaaaaaatactgtattttatctcaaaatttagggacggaaagcaaaaatagatagttatcaggaaccatttactcactcagccccagagagcatacctgatacttttgaagatgcagtgaatatactgaagccttcaactataattggtaggtaaagtttttctgataaataattttactccctaactgtatgttgccagtcatcattaccatgtaggattactaaaaatgaattggcagttttacctagctttcagcatgtacaatgttttctgtgataactttttggttaccatgcatgaaattcagttaccagatgttgctttatacttttaggtcctagacactgtgtagtcgatcatgatttgcttttagagttggtatgactgttggactcaaaacatgaaaaaaaccaaagccatttgcagattttaccaggaaaattctatgcagactcaaagttttcgtggrcaacaaagctgaaaactttgagtgtgttttgaatcaggcattgcatagatgccatcagactatgtcatcatggcattacattctcagcagaaaatgtaaaagtgtttaaaagaggagctatttaatttgctgtatagctgtaagtttttttgttttcttgttttttgtttttttttttgagacagagtctcactctgtcactcaagctggagttggctcactgcaacttccacctcccgggttcaagcaattctcttgccccagcctcccaagtagctgggattacaggtacccrccaccacgcccagctaatttttgtaattttagtagagatggggtttcaccatgttgaccaggctggtcttgaactcctgacctcaggtgatccacctgcctcggcgggtgagactccatctcaaaaaataaataaataaaaataaacaaccccccattttccccactccccaccccctaacaaccaccattctactttttgtctctatgaatttaactacctcatataaatggaatgacatggtatttttctctttgtgactggctaattttatttagcataatgtcaagtttcatccatgtggtagcaagttttatcttcccaattagagtgatgaagatagtcatatactctttttaaaaattggttgggcatggtggctcacacctgtaattccagcactctgggaggccraggcaggcggatcacctgaggtcaggagtttgagactagcctggccaacatggcaaaaccccatctctactaaaaatacaaaaattagccgggcgtggtggcacacacctttaatcccagctacctgggaaggtgaggcacgagaatcacttgaacccaggagggagaggttgcagtgagctgagattgtgccactacactccagtctgggcgacagagcgagactctgtctcaaaaaacaaaaagttaaaagaataaaatttcccataatttactatgtgtatagtagacaataaatatttaagtgagaactttcagcatcttactgttttttcttttcagatttgagattgtgttctcatagattttgcattgctgagatagtgctatctttgtaatgagatattacctgtgtttttattattgtaggcctattgtagaaatgctattgataagcattgcttttatacctataatgaagttgctgtttttcccccttacttattacaggagttgcaggtgctggccgtcttttcactcctgatgtaatcagagccatggcctctatcaatgaaaggcctgtaatatttgcattaagtaatcctacagcacaggcagagtgcacggctgaagaagcatatacacttacagaggtattaataatcacatgaattgatatgtatattattttycctccactagcttattagttatacattcttacaccattgttctaatggtttccctagagattacagcatgcatctatgggtgatcaaagtctgatattaattattgcttataccaattatgggaaacaggtactttataactccactgtaatgccctcacactgtttgcactattgttgtgaattttaattttctatgtattttaaactcaaaatacattattgttatattttacaaaaattattcagatttacctacactttaatttatttatcactattcttcctgcaagtgcttctacctaggatcattttccttctaccagaagaattcctttatttaagtgtaggtctaatgaattctcttggtaatttattttgccttcattttgaaggatattttcactctgcatagacgtaaaagttggtaaatacttgagcattttgaagatatcattttactgttttctgacttttgttttctttttgatgatatagcattgtcttaggtttttaacagtttgactatggcggacatatgcgtggttttctttgtatttattccacatggggattatactgctcctgaatctatggcttgatgtctgtttttggtttttgttttttctgttttgaaaaaatatcagccagtatctctactttggccacattgtctctctcatcttatgggactctaattatatggttagagatatatctcatttatcttttacactgttttctatatttactatctctcttgctttctgtgtttcaatctggtgatttcctttggccctattttccagtttgcagattctctgttcagctgtgctcatctgttgttaggttcttaattttagttgctgtattttttcatttgtagaatttgtgttttatctgtatagtaatttattaatttagtaacagacttaaaatcatgtactgtagaaataatcaatctctaaatactgctttcttgtactcacatttcatgaaactttttactctcttcaaatgcatcttcaccatcagtgtttgtcttttctaaggctgttttttttgagtcatctggcgctgtggagaacaaatttttatttacatccgaactgtttaagattcactacttttagatctttgacactaccacgggattatagcccaattacaaatatctgcctataaatcacttgacatttgggtttttttcctaccattctgtaaggatgtagttgtaatctccacaattactttctatattgttgtggtaagtgatctaagtggctctaggaagtgatttttaaaggcttgtttacaatgatgtctagcagctataattgctagactacatccttgagagtaagtaataaatctgatacatttttttaatcttcactcctttaaaacaacgttttttatagtagaaaagtattacagtgtatctctcaaaagctaaggattcttttaaaaatataaccacagggccgggcacggtggctcacgcctgtaatcccagcactttgggaggctgaggtgggcagatcacgaggtcaggagatcgagaccatcctggctaacatagtgaaaccccgtctctactaaaaatacaaaaaaaattagccagatgtggtggcgggtgcctttagtcccagctgctggggaggctgaggcaggagaatggtgtgaacccacgaggcggagcttgcattgagccgagatcgcaccactgcactccagcctgggtgacagagcaagactccatctcaaaaaaaaccccaaaaaaccatatatatatatatatatatatatatatatatatatatacacaccacagtactgttatacctcataatttgaacaataattatatcttgtcatttaattttttttttttttttttttgagacagggtctctcttggttgcccaggctggagtgtagtggcacagtcatagctcactgcagactccaattcctggctcaagtaatcctcttgcctcagcttcctcagtagctgggactacaggcaaataccaccacacccagctaattttttaatttttatttttgtagagacaaggtcttgctttgttggccaggctggtctcaaattgctgacctcaagtgatcccctgcctcagcctcccaaagtgctgggattacagacatgagccactgtgccccacctaatttcttgaatatgtgaattgcaattaaaattttctgatggtaacaaatatctcactcatttttattatctatcttttgttctgtcttggttatcaggtttgtttgtaaggctaatttgtccttttttttttctttttttttttgagatgaagcgtcactgtgttgcccaggctagagtgcagtggcgtcatctcacctcactgcaaactctgcctcccaggttcacatcattctcctgcctcagcctcccgagtagctgggtgcccgccaccatgcccggctaatttttttgtatttttagtagagatggggttttaccatgttagccaggatggtctcgatttcctgaccttgtgatccgcccgcctcggcctcccaaagtgctgggattacaggcatgagccactgcgcccggactgtttttgtttttcttaattgagtgatggatagtgtagaaaaagaactatagcaataatttaaggctgtggataaagttatttttggagaaagggactttactttttcaagtagatcgccataatccagtcaggatgtggtccacatgaggcctggggtatttccagtttgccctttctcctgatatccacccctttgggtatgaatcatcaaaagtcctgaggtatttatcagcacctctcatccttaacggtccctgaacatccattttcctctctgtcatcatgagactttgggtggctttgctgttcagggtctcagtcacagcttttgatttggaaatcagcagtcatcttgaggggaagagcttcaaatgctaggctcatatatcttgcttccctcttcttttgaatcttggaaacctctcttccccaacaccaaactctcactatcttgttaggtctctgcttgcttacaaaaatttttaaaaatgtattttatctggttttttaaattgtaaccagaggaaaatttggtatgaaacaacccagaaaatcattgccaaagcagaactctcagaacttcctgaacttaatattcatacttttgatatatttggcattctttttttttttttycccattgttaaacactgtgtaggccaggcacagtggttcatgcctgtaatcccagcactttggaatgccaaggtgggcagaccacttgaggccaggagttcaagatctgcctggccaactaaaaatacaggtgaaaccctgtctctactaaaaatacaaaaaaattagccaggtgtggtggctcacacctgtagtcccagctactcaggaggctgaggctggagaatagtctgaacccaggaggcagaggctgtgtgagccaagatcgtgccactgcactccagcctgggcaacagagcaagactgtctcaaaaaaaaaaaaaaaaaccaacaaaaaaacaacctttatgttgacacatgtattctctcaaaattcctttttgacctttttgaccactccrttagtcaaaataaattctcatgactgttagtttccaattgatataataattattgaaatctcttcttctaaatcaatcacaaaatcaccatacagatatttaaaaattagtctctttagtatactgtcttatctttttattacttttagcttgattgcctgtcctcttcaccaggttttactacttaaaactaatggttattgttccccaaattaaatcttagtcttctacaatgactcttgggtaaatatattaaatgcatcatggatcgttgacatttccaaaatataaaaaatttaagtgtttcgagtagtagtggtatatcaccagaagactgctcatttaagaattttgttttttgtataaatattattgtaataaatgtactttattggaataaataaaaattccccaaggagactagtttgatatactatatttcatcagttttaagatcaaggattgcttgagcccatgagtttgagaccagcctaggcaacgtagcgaaaccctgtctgtataaaaaatttaaaaattagccaagcatggtggcgcacacctgtggtcttagctacttgggaggctgaggtgggaggattgcttgagcccaggaggttgaggctgcagtgagctgtgatcgtgccactgaactccagcctgggcaacagaatgagaccccgtctcaaaaataaataaataaaaagagcatggtgtcatagtttacttttacataaattctttcttagtgttacatgaaataatggcatagaattttgactagtcgtcacctgttaaatttttagtcccattttgttttcaccagggaggtgttactccaacaccgtttgctgctcagcgagaaaaatactctaaaaaaaaatcttcatagttgaattgccagctgcttacatagaccaagttggacttcagaataagaatatactattatcattaaaayctggccacgtttaagccatggattaattattgagttaaatgggcagggaggcagggatggtgacctggagaacgtgaactgctatagaatcttgtcattattgaagagattcccaagatctttctaaatttccaaacttactgataccatgagaacattttttccatgatgtgctatattgtataatctaccttataagactattaaaattaatggtgccagaaaaataattatgtacttattgtgataacatgtatgacattaaccatgaactaaccttaatcatcaaagaaacaaaatttttagtcacaagtaatgtttagaacagatagataattgtaatagctatccatagaataggtagaaaatgatataacaatatagagttgcaagtctaagatagtcagctstgccctactagcatagttagcttgcttctactcttaaaccttgtatcattttgaaatggaaagtatgtcttgtaaaagtagtggttactctgcattattgaccttcagattacctggagtcaaattcttgaatgttaaatccactaaagccaagggtctacaatgctataaagaataataacacaattaattctcttagaaatactgaatatgccagtaacatttattatatgccattatagagcatagtatcaaaattggatagatgtgacaaatttggagaagtattcttctttaacaaggcatcaggccatttgttttcctggagtgatactgtggtcatgccacatgcctgtgttataaactgcctactgctgggtattatagcatcattgaaaacctgtggctatggagttacaaaaaaatctagattaagatttaactactacagttttgatgtgtgacttttgacaaagtatttgaaaatattaaagccttagttttctgattttttaaaattagtgaaatggagatgatgatgaagttttcatgatggcaaaattaactgagttaaacacatataaagcacttggtaattagttttagcggatatatagtaaatgacagccatttgttttggtatttccccttcattcatcrgtgtttatattggtctttataatatggratggtatttattggccgtctacattttaaatttcttttttttttctttttcttttttttttgagatggagtctcgctctgttgcccaggctggagtgcagtggcgtgctatcggctcactgcaacctctgcctcctgggttcaagtgattctcccgcctcaggctcctgagtagctgagattacaggcatgggccaacacacccagctaattttttgtattttttgtattttttgtagagataggggtttcactctgttccaggccatctcaaactcctggcctccagtgatctgcccaccttggcctcccaaagtgctgggactgcaggtgtaagcttctgtgcctggccttaaatttcttaaaaataagtgtctggtttttaaatttttagtaataaatgatttttaactttattatttatttattgaatgtatactacacatgaaacaaacctcattctaacaaaaggattgtaacgaaaagattgttatatagtatattatgccttgcttccaagtaatatattggtctattttacttcaggacttgattttgtatgaattcacctcaattttctcatccacagaaaataacaaaattgaagttatttcattttattaacagggcaggtgtttgtttgccagtggcagtccatttgrgccagtgaaacttacagatgggcgagtctttacaccaggtcaaggaaacaatgtttatatttttccaggtaaatgccaccattatttatgttatagagcaatagttaattatgtaaaaatacttaatggaattctttggaatgggagactgaactgagcaacagtattacagaattttggtataaatgtacaaggaaactcaaggaattcatcaaattcagcatgctccactttctctgaaaatttattcatattgttaattaaatttgtttttattatagaaataatatattgcatgatttgtaaaaatgcagaggaacagaatggcacaaaattatgtaaccctttctatctccccttggtgtacctccttaatcatacttctcagaaccattgtcaataatttgctgggagttcttctgatggttaccatcgtgactgatagatttatttcccaggttcaagcagttcccctgcctcagcctcccgagtatctgggactacaggcatgcaccaccacactcagctaatttttgtatttttagtagagatggggtttcaccatgttgaccaggctggtctcgaactcctgacctcaggtgttctgcccatcccaaagtgctgggattacaggtgtgagccaccacgcccagccaggtgttcttattttgtaagatacacccagtatactggtatcacaccaaaggaaattaataataattgcttaatatcgtttatcattacctcagttcaacaacttatttttattcccaataccttttttattctagaattgctctttctaaatagctacttttaaagcaaaaatggttacagtactcattgagctttttctggagaattattaggattcctttcaatgtttctgcctttgtgctgtattttccataaatttctagtgatcctcagttgtctctttcttttaagcaagactgtgttgagtaaaacaggaattttgtatgattttcttttgcacttgtgtcttttttcttctggtaggtctttccctgactagctgacagcaggctctaattaagatatgacaagtttatataggctggcatcaggcaagcatgtataactgttgtcaaagtaaagagggtatttagtctgtgaatatcctggtacttttctatatttttctccttttttttgcccctcatgttttcctatatgtctcttgagacctaacttctataatagaaactgtcctgtcatccataatctctttctagaacttgataatgttcaaaattaatgtgttctattcagtaacatttctatggcctaaaagacatgagggcaggaaaggaaatacttttctgctgattttaacaaagctatttttttaaactttttttttttagttccaggggtacatatgaaggtttgttatataggtaaattgtgtgttgcagggggtttcatgtrtagattatttcatcacccgggtaataagcatgctacccgataggtagttgtttgatccttaccctcttcccgccctctacccttaagtaggccccagtgtctgttgttcccttctttgtgtccatgagttcttatcacttagctccacttgcaagtgagaacatacggcatttggttttctgttcctgtgttagttcacttaggataatagcctccagctccatgcatgttactgcaaaggacgtgatctcattcatttttttggctgcatagtatttttttttatttatacacatggtgtatatgtgccacatttactttatccagtttaccattgatgggcatttagattaattctatgtctttactattgtgaatagtgctgcagtgaacatacacatgcatgtgtctttatggtagaatgatttatattcctttgagtatatacccaataataggattgctgggtcgaatggttgttctaaattcagcaaaaccatattttatatcatatctgagtattaaggaatttagcagttgattatttttatataacactttaaaatcctaacttaaataacagctatggataccataaatatagacattaaaaatgacctggtcaggcatggtggctctcgcctgtaatcccaacattttgggaggccgaggcaggaggattgcttgaggccagaagtttgacaccagcctgggcaacatagtgagaccttgtttcttccaaaaattaaaaaaattaaccaggtgtagtggtgcacacccctattcccagctagtcaggaggctgagatggaaggatcgcatgagcctgggaggtccaggctgcagtgagccatcatcatgccagtgcactccagcctgggcaacaaagtgagactgtctcaaaaaaataaaataaaatgacctggcatttgaggcagaaatgagcctaaaagcaggaggattggctgaaagtctgtttataaagcaacttaaaaaaaaaactgttaatatttgaatgacctagttgagcaactataacaaccggatgaaaattttttttaagactttaaaagggtcaaagggataagatattgactctaatggaatattggagaattctggaccaaggttagggagggaacaaatgcacagaacaagcttttgaagccagttttacagtggaaatatagaccaggaagaaagtggctaagaggtacagctgtgcttttcatggaaagtggacaagatcggcaccatgtccgagtctggcactacctcccactctggactgaamccctaaagtgctgtaccttggattgggggtatagtttgcagcagcaatgggtgatttagaaaacctcaagcctctgttcgggactgccagtgcccacaagtgcccagcggaagcaaacaaaaatttctctgaaataagataatggcatcctagtcctcaaattatttttataaattttcaagtacaacctaagtagaaaaataaaaaaaaagataatgaggcacataaagagacataacaacagaagccaaaaccagcaaaaacaagaaaaacagacacactgaaaccctggatataccgtaaatgctatgaaacaaatatgcttattatgtttatagagataaaagccaatcttraaaacttaagacaagtaccactaaattctagaattgaaaaatgtagtagtctataagaactgagtgagctgggtgtagtggctcatgcctgtaatcccagcactttgcgagaccaaggtggaagaattgcttgagcccaggagtttgagaccagccctggcaacgtagtgagacccccatctctataaaattaaaaaaaaaaaaaaaattagccaggcatagtggcatatgcctgtagtcctagctattcaggaggctgagatgggaaratcactcgagcttgggaggtcaaggctggagtgagtcatgattgggccactgcactccagcctgggtgacagagcaagaccctgtctcaaaaaaaaaaaaaaaaaaaaagagtgaatgwggcttatggcagattagaccagagagaattaatcaactggaaaatatctcagaagaarcaatccagaatgcagcacagagagaccaaaaagaaaaaaaaataggtaagggacatacatttcattgatagatctttaattgaagtcctagaagaaatgagaatgaagcagaggcaacatgtgccggcctcatggctgagttttttttttagaactggtgattgacaatcaatattcaaaaagctcacagaaacccatgtgggatgcataaaaagaaatctacatctaggaacattattgtgaggcttcagaatcaccacaaagagaagaatatgaaagcagtcagaacaaaaagatttccttcaaagaagcgaccgttagactgacagcagactcctcagtgacaataagataccaaggcagtggtaatgacctattaaagttgcttatgggaaatacttgccaacctagaattcattacacagtgaaaatatccttcaagaattaaagcaaaatgaagacatttttcagaaaaacaaaaaaccggggattcaccacctggcagactgtttttatattaaaggaaaggaaattttgttccttagggaaaaagaaaataatcccacatagaaaccctaaggtgtaggaaggaatgaaaagcaaagaaagttatgaataagtgggtgggtacaacaaaatgaatgttgtttatatagagtgaaacaaacatcacatgggattttgaaaaatatatatagagagaattaaaatgcacaacaacaatagctccgttaaatagagttaagctgttatgtgggacttacattgattgacaggaaggtaaattaaaaattataatgtggagctggggacattggctcacacccataatcccagcactttgggatgtcaagatgggaggatcacttgaggccaagagtttgagactagccctggcaacatagggagactctgtctctacacacacaaaaaaaatttaactagccaggtgtggtgacatgtgcctgtagtcccagctactccagacaccgaggacagatgatcacttgagcctaggagtttgaggttacagcaagctttggtcgtgccacagcactgtagcctgggcaatagagcgagaccctgtctcaaaaaaaaatttaatgtagaacgttggtggttaaagatgcatgatataaattttaggataaccattaaaacactacaaagacttcctgtttatggtaaggtaatgttgggatgaaatgaaacaacaaaaatccgaaaagcaagaaaaaagaggaaaaggaacataggcaagacaagatgagatgagagtgatgagactaaatgtttgggggctaaatctgccccaattacttraaaaaaaaaaaactaaaagtaaaagtaaaaaccacattaaatctaaatggaccacattctctacttaaaaaaatgctattaaccatgtgatcttctcagtcatgaggtaatctggtgactacccttcctcaaagccagttgggatattctttgaatagagtaaaacagtgtttctaggctgggagacaccagacatagttgaggacagaggtgctagaaaataggaagtttaaaagcatgtgcggtgatgctcagaggaggtaaaccccaccctcatgctcatagcttccaatcattttctctagttcttaactcttaaatgtgagaaatgcttgaagattactagtcatctgaagaaagtctctttattaaagattttcataaaagagaccaaagcagacaaacagaaaaagacatcttggggaaaaaaacaaggataatgggaagagaaggaaagttttaaaaattatcaatatcctcagggggacaaaatattatatcctataaagacagatttttattttttaaaaaaatagaaagcaaaacaagctcctaaaaataaagtttgatagcagaaagaagaaaaagatgagttaagtcacctaaaaagagagcaaaggacaggagaaggaaaataaagaaaattagagagccaatccaagaggtacaayatcagaaaatataaatgtcagggaacaagaacagaaaaatggagggaagtgaatcctcaagacttcatgaacatttcccaaaactgaaagactcgtgttttcagataggaagcgcctactcactgaatgctaaacatgatgaattaaaataatgcacatcaaggcacagtgttatgaaattgtagaccgttaggtataaaaataaggatctggctgggcacagtggctcatgcctgtaatcccagcactttgggaggctgaggcaagaggattgcatgagtccagaagtttgaaaccagcctgggcaacatagtaaaaccctgtctctacaaaaaataaaaaaattagccaggtgcgatggtacatgcctgtaatcccagctactcaggaagctgaggtaggaggatcgcttgagtccagggaggttgaggttgcagtgagcttgtgccactgtactccagcctgagtgacagagcgagaccctgttgccaaaaaaatttttttttaaaagggatcctacatgcatccagagattaaacgaaaacaatcacctgaaaaggctctgaactcagattgatgcttctcaccagcactggaagctagatggtattggaataatacctcacagttctgaaggaaaaatatttccaagccagaattctaaacctagacaaactatcaaatataagtagaaagaagtaaacaaacacattttcagaaatgcaagatttcaaaaaatatatatctcccatgcactgttcttcagaaagccttgggagaatgtaccctaccaaaagagggagtaataaactaggaaaagttgwatttgggaaatggaatcaacttagaaagaagcaaagaggcctgtaatgataaaggggttttctaggatgacagctccatagctggaatgggggacaaccagaccagaatggagctttagtagatatattctagagcaggaaattcgagaatatataaagtagctaaaatagaagaaaatgtagacaattgagtgagagttcaagggtgaaataacaatgttaaatactaaaaaatcaaagtaaaggaaaaaggacaattattaacttcaggaaagacaaagttatgcagaaaaggaaaagtaaccatgatataaacattgaatattgattgaaccacaattatgctctaactatattgggragaagaaagaaagctgaaaatatgaaagagcgctaaatatttactcctacaggaaagagtcagtgatctccaaaacagaaaatgcaagatcagcacaataagagaaggcmaaaaaaaaaagaaaaaaaaaaagagagagagagagaaaaaaaaatcacaagaaacataagttatttaagagtgagagagagaaacaatcagctaaaaaaaattgtcattgcctctgtagagcaagaagtggagtgttagaggtgggctgggaactggagttaaaacaagcgttgatgaattgtatgtatttgtcattttcataaatgtaaaaactaaactgagaaaagccatttgatatttctgaaattacttagcgaataagaattattaaagatcgtttgattttaactcagatttctgtttcttcttggctgttttctgtttggggggagctgtttgcgatgtggatggattaccatttatttgcctgaatataggaatttacttctttcataatttgaaaagtgaccatactagtaaactttaaaatgtgttctaggtgtggctttagctgttattctctgtaacacccggcatattagtgacagtgttttcctagaagctgcaaaggtaaatgttttaaatgttgtttattttataaaggatgaattataaagatgagtagatctgaaaattaaaggcagagagagaatgggttaaatctgccttattaatgaaaaggaagttactcaaattacttttatgatttgcctatttatgcataaaattaatttttttaatcatgacttaaatttttgtaaactgaatcctctcgttttaataacacttagactatacttgcaatttgtatatctgaatatattgtgacagcatagatractccttgcatgtttttaatggacaagtactggtattatttggagtgctggcctatgggagctccagactttgaagtatttctgaagaactcacattaatacaattaatgtctgttttcaaagtagccattgcaattaagccaagctctacatgtgtaatataaagcagaatataatcaataagtctttaaatctggttatttattgtttagtgatgaacagttttaatttctgcagtggtttaagtgtattccttcaagaaataagaggaattatattacctgttttactctctgtttccccaatgctttttccatttactgggtccttattytgttatttaaacaaacaaaagcaaaatgctgtttttytcttcaggccctgacaagccaattgacagatgaagagctagcccaagggagactttacccaccgcttgctaatattcaggaagtttctattaacattgctattaaagtaagtaataacttaaacttcttcacattaattttaatgacattttcttatacaagaaatacaggtttattaagataaatctgaaacatttagaaggctgcaaagaagaaattttaggcccatattcttactaccagaatataacacacatgattattttgggtttgttgccttctagtcttttttctttgcaaacacatacatgcatacacacatgcatgtagtcacttgtgcctttttgaaaaattgttttaaagaatagagataggggtcttcctgtgttgcccaggctggtctctaaccccttggcctgaagcgatcctcctgccttggactcccacagtgcttggattactggcatgagccacagcacctggcctgtgcccattcttataattggtttcttactgcactttttccccttaatatattgtaagtcttttccrtgtaacttaataataattctcatgtatgtgatcattaatgctgcatggcattctctttattattttttcaaaatttgtttcatcatttctctgtttttggacatttaagtttttagcttcttattgttagaaataacactgtaggctgggcgcagtggcttacacctgtaatcccagcattttgggaggccgaagcaggtggaacatctgaggtcaggagttcgagaccagcccagccaacatggtgaaaccccgtctctactaaaaatacaaaaaaagttagccaggcatggtggtgggcacctgtaatcccagctactctggaggctgaggcaggagaatcacttgaacctgggagaaggaggttgcagtgagctgagatcgtgccattgcactccagcctgggccacaagagcaaaactccatctcaaaaaaaaaaaaaaaaaaagaaagaaagaaataacagcgtaatgaacatctgtctttacagataaatctttgtgtgtatttgtgatggtttctttttttttttttttttttttttttttttttgagacagagtcttgctctgtcgcccaggcttgagtgcagtggcggaatctcagctcacggctcactgcaacctctgcctcccaggtttaaacaactctcctgcctcagcctcccaagtagctgggattacagatgcccaccaccatgcccagctaaytttttgtatttttagtagagacggggtttcaccatgttggtcaggctggtctcgaactcctgacctcaggtgatccaccggccctggcctctcaaactgctgggattacaggcgtgagccaccacgcccgggctgtgatggtttttttttttttttgggataaattctaagcttaaraacaaaggtttttaaggtgttttaaggcttctgatgcatattgtcaaatgagctcttcagaaaaagtactgatttacattgcagcaattagatatgagtgtatctttttccacactttttccaatacttagaattatttttttaatcttgcatatttaataggtaaaattgtttctcattattaaggcattattagtgagattgaagaattaatatatatatattaagtgtatatatactgtttgctgtggtgcagatattttcccayttgtcatttgttttaactttatagaattgtttgacatgtctwttaaaagtkttttatggaattatttgtttattttgtggattctctcctcaccttttatgaatattaatgccttctgtcactccaaaatcataactgtctacttgcattttctaaaataaaacttttttaatctctctgggatttattttaatgtatgatatgagaaagggaaacattttttcctgagtagttaaccagttgccccagcattatttattgattaatgcgtccgttgtttacagttaattgggaattgaatctgttcctgggatttctattcctgaccatttttgtttactatctgacactgttttaaattttataatgtgtataatgtaacatttagtactttatctttcccatcattatgctttttcagtgttktcttgactgttctaaattgttttcttctggacaagtttttgtatctgcttttttaattttaaaaaactctgcaactttgtatgaaattgttgcatttataaattggtgaagttgggtctttcagtattgagtattctccaatcactatctctctttacttattaagatcttttttaaaaagtgtttcagtataattttgttttcttcatctgaatatggcatttttacttttttctaaatatttttaaatttctgtttttctaacaaagacttttttttctttccaagtatcttctcawtgatcatttctaatatataggaaaaggtaggaataatactaatttgaaaacattcatttttatgaatttacttgatgaccagttttttgaacaatcttattttaatagtttttcatttcatttggaattgttgagtttttaattgtctgcaagtaattttttctttttttaatatgcatagtccgtttttctctaactataaatcagctgaaactgcagaatagtcttaagcaattaggttgataagggtattcttgtatttttttttcaatttagagacagagtctatgttgccaagctgatctcaaactcctaggctcaagtgatccttctaccacagcctcccgagtagctagaggcacatgccaccacacctggctaacatctttgtatgttaatattaaatatgatgctagcttttgattgaaataagtattttctactttttaaaagaagtagtcttctatttctagattactaagatttttcttaaacattaggattgactgtggaatttatcagccacaatttcaacttccatacagttgatcataaaattttatcattttgactattaaatttatttatttatttatttatttattttgaggccgagttttactctgtcacccaggttggagtgcagcgacgtgatctcagctcactgcaacctctgcctcccaggctcaagcgatcttcccacctcagcctcccgagtagctgggaccacaggcatgcaccatcatgtccagctaattgttttttgcatttttggtacagatgggggtttgcattgttgcccagactggtctcaaactcctgagctcaggagatctgcccaccttggcctcccaaagtgctgggattatagatgtgagccactgtggccagctttgactattaattttattattacattattttggtgcctgtaacctaagcaaagattgggaattggtaaaggatggtatgttcagggaataatagttgagcctgggggaacaggtagggaaatggcatggaagaaaatttgaaagttatattaaagccagctgtacaaatatacaaatgccaggctaaggagtatgattaccttctactgcaaaacagttgaagattttagagcccagaactaggatgatagagtccaactttagaatttatagaatgatattacaggtgggagagattttggaagatattagtcagttaagagattactgggccaggcagagtggctcactcctgtaatcacagcactttcaaaggccaaggcaggaggatgacttgaggctgtaagtttaagaccatccctggacaacaaagcaagatctcatctctaccaaaaaaaaaattagccgggcacagtgatatgtgcctgtagtcccacctactcaggaggctggggtgggaggatcacttaaacacaggaggccaaggctgcagtgagctatgatcataccactgcactccagtgtgggtgacagagcaagaccctgtctctaagaaagaaaaaagagagagaaataattggtatatccaaatgagaggtagtacatgaggtcatagaaggagacctctgcttaggattagtatagcaacagaggcccaggttcatgtctctgcgtttccccagaggcaggagtagagagtgtgctgtgtctgcagtggcataggcttttctttttaggagcaaataaggaagtggtgagtagaggaggcagagctttgtgtctgtccccaccccaaatagccactgattcacccctttggctctatgagcagggctgtgtgtgctcctctgacagccaccagtcaccttctgcatgcctccaggaccaaggggagctttctccaatctcatgccttgcccgtaatctttttctgtggttactaccagcctgtgggaaagagatttgcagtgagtgtgagccccccttatgtctaaagcttgcagttgttccagaataaaacactagctcacattgacctttggcagttccttaaaattttagctgacttcttattgtatgcatggtggccactgcctcattctccctcccatgctctgccacaagtgagagtttctgtgtctagtctgccgccttctctccttcattcatttatttataaatttatatttatttatttatgttaattatgctgctcactggcttcagaacacctcccactgcccctcacatcaggcaggccacgtgttcagctctccaaggtcggaaggaatgaggaaaaatgtgtttattccatcctcctggaagcaaaaatctctgcctgtctttttatatcattcctgtttttcctgttwagtacaaaaactgagaagagcaatttggtcaacaaactgtactaatgacatgttatgtttatttggcccttaggttttttgtttgtttgtttgtttttgagatggagtctcaactctgtcgcccaggctggagtgaagtggtgcaatctcagttcaacacaacctctgcctcccaagttcaagtgattctcctgcctcagcctcctgagtagctgggattacaggtgcccgccaccacgcctgactaatttttgtatttttagtagagacagggtttcaccaygttggccagcctggtctcataaactcctgacgtcaggtgatccacctgcctcagcctcccaaagtgctgggatcataggtgtgagccaccacgcccagccagcccttaggtttttaacctcagatctttattgcagttacctgccactgaggatctagcccttccctacttctttttcctagtcagtgataataaaatattagtaaaatatgttttctataatagaacagaaaacaattgaacacattttctatcacaaaatacactgagattgagttcttggtaccaaggattattttttaataaccatcttattctgagatttttcttttagaaagttgaaatatgaaactttaataatggttaccatttggaatgagaattagaggaggggagcgacatcttataattgtttgaattttttctaccatatgtcactacatttttttaagttaaaataaaacctgccgggcatggtggctcatgcctgtaatcttagcacttaggtaggctgaggcaggcggatcacctgcggtcaagagttcaggagcagcctagccaacatggcaaaaccccatctctactgaacatacaaaaatttaccaggcatggtgttgcatgcctgtagtcccagctactggggaggctgaggcaggagaatcgcttgaacccaggagatggaggttgcagtgagctgagatcgtgccactgcactccagcctgggtgacagagcaaggcttcatctcaaataaataaataaataaatccataacagagcaaggctccatcttaaataaataaataaataaataaataaataaataaataaaaccatgacttcagaactttactgtgtgagaggtgctgtgctaccctgtgaggaagtgtttcacattcctcattttatatcagaactgaggttcaagggcttattctcaccaccaatcatggtgtgtggcttgggtggagaatttgaaattcactcaagccacctttggtggggagtagtcgagcttactgttgagggtctaatatctagactcagaatgctttgggtttgaaacagctctcaagtaactaccttgggcaagttacttaaactcctctcattcctcatatgcagaatgagaataatgatagcacttatctcctggggttcttgtcgagagtaaaggaggtatccttgtaaaacacatagaaagtgcctggcactcagtgatagtggtgtcagttcccctgtataggttctagccctgacttcacctgaccttatagttctagtgtctaaatcctgatttataataattactatgcctcttaatccaaattctagagcagaaacctctctctcaccttgggttaggttttcttcctggtcaagttggctgtgattaggaaatagtctctgtgcccctctagaaaggccactctttcagcaagactgggaggaatgacataggctgggcaggttatctaaatgtatttactagaatgacacagtagaacttaaatgtgtttggttttatcttttaaactttccatagtttccaaatgttttgaaaggagtcaaagcaatgttattttttactgtgaaraaagaagaatgccattcttctaaacttattttcctgtgttataatagtacgttgtctctctaataggttaatactcagagcctacacaataaccttacttatttttcaggttacagaatacctatatgctaataaaatggctttccgatacccagaacctgaagacaaggccaaatatgttaaagaaagaacatggcggagtgaatatgattccctgctgccagatgtgtatgaatggccagaatctgcatcaagccctcctgtgataacagaatagaagcactcccctgataaatactttctgtgctccagggaacccyttttttcagacaagaagagataatgtcttcagttttatggtgttttctgtgttttgttctccctgaccactttggttgatgtattttttccatgcrtctccacatctgttggggtagacgtgttgattgattgcattgcccaccagcaccctacartcagatagttgtgatgctttaattctaacatacagcccgtaccacatccaggagatgtaaaaagtgtgtttgtgaatgtcttcacttgtactctaattcagacttgccaaagtatttgctatttactattatgggtaatactcttctctggcctagttcttacagagctactaaaatagaaatttacttttatggatagaagtacagaattttgagaagaaactaaattttcmccaaattttaaggaaaaattgtcattatctaaaaatgttcttatatatctgcttcatcttaccttcatactctgaaattccctatagcagacagagctagggaaatattaaaaatttaccctatttattttctggaactaaatcaagccttaactataacattatgagagtaatgggaactactgctggctttaagtaaataaaagtcattgttttcaacagtgtataaaaatcatagtgtaacctttttatttaataaatatcttacatttaattgcttcagttatgctatcttattgcccaactagaaatttagatttgcttatgaaaaacacatatttttgttacttctagatgattctaggagggagtataagatacctaatcatatgggaacatcacgtgactttttaaatctaaattagtcatgcttcacatcaaaatgagtcatatttaactggagaaactatgcccttattccagaactgatgctctttattgcttgagataattttggaatgttactatgatactgtttctttgaatatcattagtagtgacaactctttctccattgaaggcagacttaatttttttaaaccaccaacattaatttagagctaaatggggatgaataaggttggtgttcatctgggaaatgccttttttaatcccagtaaaatgggtaataatggctatccagaacagttttcttgtgtggcttgcatattgaagaattctaaaggaaaatatatctgcctaccatgcttgctcttagggaagaaaacttaaatgctcattctaggatagtaacaacaacagataattcatcgataatatgagcatgcacagtatttgatattgctctgtaggaaaaaagagacttcatttttttcatcttctgcctatgaatacaaattgattctttttttttttttttttttttgagacagagtctcactctgttaccaggctggagtgcagtggtgtgatctcagctcactgcaacctctgcctcccaggttcaagcagttctcctgcctcagcctcccaagtagctgggactacaggtacacgccaccacgcccagctaatttttgtatttttagtagagacgggatttcaccatgttggccaggagggtctcgatttcctgacctcgcgatccgcccacctcagccttccaaagtgctgggattacaggcgtgagccaccgcgcccagccaatttttttttttttttttttgagacagagtctcgcttttgtcgcccagtctggagtgtagtggcatgatctctgcaacctctgcctcctcggttcaggcgattcttctgccttagcctcccaagtagctgggattacaggcaccggccaccacacccagctaatttttgtatttttagtagagatggggtttcaccatgttggccaggctggtctcaaaatcctgacttcaggtgatccacccactttggcctcccaaagtgctgggattacaggcgtgagccaccacacctggtccaattcatcataattctgaatataatttaataattttaaaatggtcgcaatggcattgccatttggagtatgggaaaatgcagttggttaattcattgaacagattagtaaagtcagaagtctttttcataacatacggtcacaattcctttcttttaattaaagacaaaaggtttatgggttttggtttgtttgttttagatatggggttttgctatgtcacccttgctggagggcggtggctgttcacaggcgtgggtcatagagcactgcagcctggaactcctgggttcaagctctcctcctgcctcagcctcctgagcagcttggactaaaggtgtgcaccaccgcacctggctgagaggcttctgtttttcatgttccctttatcaaaacaaaatcacgcctaaacatactctctgtgtgaaatcttgattttagttcaacctaagaaatataataaatataaacctgtttcttgcttagtgtttattgaaggcaggaacgtatgctgaattaaagtaattttactacgaagtttgcttattaagtatgcctggtacagtcttcatggaagttattaagtattttaaggaaaaaaataggctaaatggcatatagcctgcttaaataaaataattctatttttttaaaaagctcccaattgtcattgttatttaccagtcaatctttcaacaagtatcaattattggatgtaaattaaagtaaaattgcttaatatttaagctaagaatacaggaaggactatgagcattgaggaaatcgggggaggccagaatggcatcaagctggaaaagaaattaaaacattaccttcgatgagactttacctagcaagaaggtaattattttgaataacagcaatagagaatcttttattttgaattgagaagaaattctgatgattagagtgtcagtaagtagtaggaaaaggtaagaatacatgtgtttctaatctcccaccaccacctgttgtatggaacaaattggattactagcaagggtaaggtttattgacaatgagaagttttagtccaagattttagttaaaatattttaaaattttttgattcataaccaagaagttgcctcagatcactgtgaagctttaaaatgcaggtgcctttgctcctcctccctccaggcccccgggggcagagccctggctggtgtctcttcaggaggacccctgacacaccgattctgccctcacaatcactgccttaaagcaggcagcagaatcttttggagaactaacaagattctgatgctgatgcatagggcctggggtggggcctcagattctgcttttttttttttttttttttttttttttttagacagggtctctttctttttcctttctcactcaggctgcagtgagtggcgtgatcttggctcactgcaacctccacctcctgggctcaaacgatcctcccgcctcagcctcctgagtagctgggactataggcgcaagtctatgcaaccacccagctaatttttgtatttttagaagagtgggggttttgccacgttgcctgggctggtctcgaactcctgacctcaagtgatccaaccacctcagcctcccaaagtgctggaattacaggcatgagccactgcacccagccaagaatgtccacttctgacaagctcccaggtgatgcctatgctgctggtacagtgaacaacatgctgagaggcattgctccaggatactgcatgtagtgagcagttctttagcgtttatgtgtcatatacttcaagttacatgaaaaagatcaactgaaattatgttcttacacagaatagttttcatctagttttattatgtttttacaggctgtttacaagaacaaaaatagagaatttttgaacatatttttctgaaaacataaaaactagaatactctttaattctaaattatagatttgtagcatacttagtaaacttagtaaccaattttcatttgtaaaagattagctatcaaatggacatttatttctcttagttttcttatgacatgacttgccttatatcctttgtcctttttctgtaacttgtcagcctctggagaaataggattttacatttttgcaaatgagttgccaatgaattaagatcaaaacgtcattattaaggagtatgaagcattatttactggctctcagataacagaaaacccaaaagggatggtggcggagtgaagaaagccttgccttgggaaaaatacttcaaatgctcccatagttttttttcctcaagcccagtcagtatccttcaaggataactttttcataccttttttttggtttgtttgtttctgctagctttatgacagaggttataatattcttttctcctctcttctttgacgtgttacgttgtctttttttttttttttttaacttcttcatactcttaaaaagctccagaatggccaggcgcagtggctcacgcctataatcccagcactttgggaggccaaggcaggcggatcacgaggtcaggagatcaagaccatcctggctgacacggtgaaaccccgtctctactaaaaatacaaaaacttagccaggcgtggtggcgggcgcctgtagtcccaggtactcgggagtctgaggagtgaacccgggaggtggaggttgcagtgagctgagatcgcaccgctgcactccagtctgggcgacagagcgagcctccatctcaaaaaaaaaaaaaaaaaaaaaaaaatctccagggttctgttgaattcaccaaaatggggtcagctctggtgagcctatgtaatactcgagaacattaatataaacccatagctctttactgggcttccatttaaagggaagtcctaagaatgaaatggcaccagcatcctgtttccatccaagacaagaccacacgtgttcaggtgccatgtattcatatagctctcaactgattggtgatttgcactttgtgcatctaattattaaaatgaaactctctacaggtgagctgaagtaacatacttcatatttaaaaagttcacagcaatttgaccatagaaaactttctcatctgaaatcagggtaagtttttttaatgtaagcagagaaaaaaataaagcagtgttttatttcaaatttcagtaagttcaggtgggcctaattaagacatgactattattacaaatcctattcttgccagaagttacttagatagattagtgattagattttaaaaacattattttcctttcttgaataaggaaaattgtgcatctcaaagagaaaagtaaatatggaaatatgttcatagttcagttgcataaaatagacacattaagtcaagtgatttgaatgcttagtgtcttttggtaaacagcattttgtcaacaaacttttcatatggctatagaatcttgttttttccaaataaaaactttgcaattgggagttattcctccattcagcacactttttaatgttaagactaggggaaacttgtgggtatatattcagtggttttcaggattttcttttatgttctagaaaagtaatttttcctttcctagttttaagtatatattcaagcaaatcgttgattcctatacagccattggattatcaccaacacatttggtatatacagtgggccgataatgacaaactaaagtttgtggttaatacctactctataccagacactgttctaaggatccgacatatttaatcctctgtttaccctctgtttctgtgcctgatttacagacagagacagaggcacagagaggttaaatgacttgtcaaaggtcttatgatgtgtggcagagcctgggtttttagctcaaacccctctcagtgaagaaagccttctgtgtaggcaatttcatctaataccttcatgaattgttacttcagatgagaattctcacttattcttttttttttttttttttcttttctttgagacagccttgctctgtctcccaggctggagtgcagtggcgcaatctcagctcactgcaagctccgcctcccgggttatgccattctcctgcctcagccttccgagtagctcggactacaggcgcccgccacctcgcccagctaattttttgtatttttagtagagacggggtttcaccgtgttagccaggatggtctcgatctcctgacctcatgatccacccgcctcggcctcccaaagtgctgggattacaggcgtgagccaccgcgcccggcctcacttagtcttttaccagttcatctgatttttactttgttcccatttataattcaaatataatataaacgtcttattcatttagtcttcagcattttaagtattcgacacgaacattaaagatttggtgttgaatttaataaattacaccaaaaagtctcagtagccaattcactaacatcttttgatttggtaatcttcacagaatcaacaactgttaacacttctgtgcaaataaatttcagttgtgcttatatattataatattcactttaggaatccacctgtcaatttgcaattcaattataaggtatattttaagtgatatctatgtattgtatacacatattccattgaaaggtgagaataattagaaagtagtaatataaaaatgtgtatgaaataagaactttcttaaaagacctagtttagctaaatatatgacaatataaaatgtctgcccaatgtttgattatactttgtctaatgacctttaaatttaactgaaattaaaaccgtacttttgcagttgatatttttgtgttccctttgttaacataccaagcactaattattgacttcaaggaagccacgtattgcaagtcattgcttagcctttcacatctgagtgttgataagatgacggaatgggtagtcttgtagtaattgcttatgggaatgctagtttaagaggaatgccttgtatagaacatattataccagattgacttgttaaaaatggttccaagaatcagtctaaaaacttcagaattatgtgaattattttttctctgttgtgatatgttgtaatgagatgtgtgttcttatattttcttagtaaaattttcttaagcataaaatgctttatgatcttgtttttaaaggctctgtgtataggacacttttaaaacttggtaatataaaccttaacacacactctctctctttctctctctctccagaatacttgatctcttgggaatgtattgttgga

SEQ ID NO: 95164 - DNA, 42127 bp, Homo sapiens
tgggggtaatgtggaagggaagcctggctcggctactcgagatgatcacttgggtcggctttaaggagctttctggctggccctaaccaacactgtcgcgccgggagcagggatcccctggcgcccttcagtcagggcgctggcccaccctggggcagcaacgcactcccttacctccgtggttcagtcagagctaggaaggtccctttgtgcttcctgagatcaacatcgctcccttttcctgggaaggcaaagaaaatgagttagggaagcgtctatcccgctcctacctcctcgccaggctccgggacgctatgcgctatcagcattgaggtgaagaggactaggtgcccggggcgatccaggctcgtgtcctcccgctggagtttgaggtttgcccttccctcatcaccctcaccctcgttctttctcggtttcccgcttccctctacgcggcggagaccaccaccttaccgctcgcacttaagatctcagacccacgccggaggccggctcgctccgcccctccccgcccccttgtccccgccccggctcagacgccgctccccggtgcctctcggcaccggctcacgctctccaggcccacctgcccggtctccacacgtgggtagccagagcccggccgagagccctggccgggagcccgcgggggccccgccccctgcccgccccctgcccgccccgcycgccgtgccgccatgtttactgagggcggatggaggggcccgagtttctgcgaagccgcgacctcggcgtccggacgcggggaacaccgggctgagggagtctgcagtcggctccgggaagccgcgcggcgacgggggaggccttcactaaaggggaaaaggaagagggggtcggccagtatccccgaaagagggctagggcgcatgaagaccagcgcagagctccacgagcaggaaaagcccccaagcagccccagggcgactggaccgggccgcttaggccacgcccggggaagagggcctgacgcgctgcggggcggggccgcggggccgggtcgcgcgagcagcggagcaccaagggaacggaaaatggcgcctcacggcccgggtagtcttacgaccctggtgccctgggctgccgccctgctcctcgctctgggcgtggaaagggctctggcgctacccgaggtacagaagcaagtttgaggtcgggctgaagcagggtcrctggccagccgtgcgtcgcgctcgccagcggctcccccttctcctcggcgggcctgcggttctgatttcgtccctgacgcttcccgaccctgcccagccaggtcctgttcccaagtactcacgtcgtgcaggccttcggcgccccagtcctgccgactttcaaagacctgtgaaacttgatttcgccccttaattttagaataactttaagttctttctacagacgggtcctctgcctcttgtgtaatctctctacgcacgaacgccatatatcgtgcggtggtagggctgtacttttgtaatgcttgatgagttctttacgtacctgcggtcgttttacaccgcgccaaactagggctgtcagattgagaagtctctgcagaaagcataataaataagttcgaatagtgatcttcagagatgaggaccttccctgtgcgatatctggtactgaaagtgtcgggagctgattcggcgcaggactctggaggaagagatggcatctcctagcctagcctgttacaagggtgggacacgagccgtttatccatttatcggccccgtgttagaggaattctggaaacgtgtactggcagttaattcttgatcgccgtttgttcttttcttggcttttctttctggagttctaatgtttctttctcttctgcagatatgcacccaatgtccagggagcgtgcaaaatttgtcaaaagtggccttttattgtaaaacgacacgagagctaatgctgcatgcccgttgctgcctgaatcagaagggcaccatcttggggtgaggggaagacatccctagatgctggatacaggccattccttagcctggctgcttttatacccttatattatttaaagaatccacctattatggtttcagctgtaatcatcacgcagatgtctaccaaaactagatctctttagtgtcttttttaacctttccacactccaggtacatacgggtacctctagcttcctattaagcatttcctactgagtgcaccctaacttcaaactcaaaatgttatgttttgcttccattctcttctttccttcatctacctaaatacttctctgtattaagcttttagaaaaccaacattttccattatcactctcttgctttaatactatatttagtattaaattttgtctcaggacaaaattcaaaccattaagtaccatactagtcccaacccacttttccaacattatttccaattacttgtccgctcaaacctccataatggtctgcaccagccagatttgcctgccctcaaaggcattccacctttgttcaggcctctctccatacctgaaattgccttcctctaccaaattaggaaatatccatccttcaattccaacatcttttgtgaatatttactactactaagttccagagtaataccttttttaaattattatttatttatttttttgagacggagtttcactcttgttgcccaggctggaatgcaatggcatgatctcggctcaccgcgccctccacctcctgggttcaagcgattcagtaataccttttttaaaaacttcctgtaatctttagtgtccactcaaatatatttatacactgtcctgtggtttcttttatattgtaatttaatgtttacagtgcttttatttttgggcagtgctcttgttcctctaactacattgtaagccactcaaaggccaaaatactgtgttacatatttttaacattctcccagtgtttgcagtttgtagggactcagtaaatatttgtagaataaaggaatggatagcagtagatattgaagaaaaaaataacgtggcatgatccttaatgtccagcagtttacaaccaatctgtggtagaaaatacatgtggaaaaaaactttgatttatgtgacttgcttttttttttaatttaaaggccctctgtggatctgaaaatcataatatgagattcactaatgtagacaagaaacacagatttctcccaatagatgcataaccgattagaacagtgctggcggatagaactttctgtgattatgaaaatgttccgagccaggcgcggtggctcatgcctgtaatcccagcactttgggaggcccagatgggtggatcacgaggtcaggagttcaagaccagcctgaccaacatggtgaaaccccgtctctactaaaaatacaaaaattagccaggcgtggtggcatgtgcctataatctcagctactcaggaggctgaggcaggagaattgcttgaacccgggagatggaggttgcagtgagccgagatcgtgccactgcactccagcttgggcaacagagtaagactgtctcaaaaaaggaaaatgttccgtatctgtactaaccagtacagtagctactaacgtggttattccatttgcacttgaaatacggctagtgcaaatgagacactgaattttaggttaaattaattttcttctatagagtcagggtctcattcatattgcccaggctggtcttgaattcctaggttcaagtgatcctcccccgcttggcctcctaaagtgctgggattacaggagtgagtcactacacccagcctaaggtacattaatttaaatttaagtagttacatgtggcaagtggcgattctattggataatgcagaattaaaatgtctaccacagctcctagtgtgtgactctgaacacagctgtgttcaattattagctgaaaagggggttgtgtagtcaaatacaaactgtgccgtggctgaagaaaaagaggaacacacagttatattgattactttatttcctcaggctggatctccagaactgttctctggaggaccctggtccaaactttcatcaggcacataccactgtcatcatgtaagtagttaggtacctcccacccaaaaggctaatataatgtaggttgatgcgaaagtgctaacattgtgtactttgcagagacctgcaagcaaaccccctcaaaggtgacttggccaacaccttccgtggctttactcagctccagactctgtgagtaagggtatgggaagagaatcaaagagggatgatgctgtgagtttagcaactttgcatgttatgaccacatttctctataggatactgccacaacatgtcaactgtcctggaggaattaatgcctggaatactatcacctcttatatagacaaccaaatctgtcaagggcaaaagaacctttgcaataacactggggacccaggtatgctgtcttacctccaaacttctgggaattgtcttttctcccttgtattttccactttagatcagaaagacaaagttgcttaagcgcctttcattcagagttctggggctataacccctttgaaagaaaagatcttaagatatactctattatttgtctcacgtgtgtccgtgtaaagagaccaccaaacaggctttgtgtgagcaacaaggctgtttatttcacctgggtgcaggtgggctgagtccaaaaagagagtcagcaaagggtggtgggattatcattagttcttacaggttttggggtaggcagtggagttaggagtgctgttttgcgggcaggggatggatcttacaaagtacattctcaagggtggggagaattacaaagaaccttcttaagcgtgggagagattacaaggaaacttcttaagggtaagggagattacaaagtatattgatcagttagggtggggcagaaacaaatcacaatggtggaatgtcatcagttaaggctattttcatttcttttgtggatcttcagttgcttcagaccatctggatgtatacgtgcaggtcacaggggatatgatagcttagcttgggctcagaggcctgacattattgttactgtttttatctgtaattttctttcttcttcctttatcctagcaatgattgagagaatctaagttgaaacagataattgagaaatatgcctaatgaaatggataaagtgatgttctctatttctctctggcctccagaaatgtgtcctgagaatggatcttgtgtacctgatggtccaggtcttttgcagtgtgtttgtgctgatggtttccatggatacaagtgtatgcgccaggtgaggaattaggccgtctaactagggatacaaggaatgcatagagcaagtcttctcagaaaggagagccacaagaccaggagctgatacaaatttcctataggtggaaaactatagaattgccctagacaaagtgataggtatattaggaaagaactaggtgttaggatgtggccctccgtgtaacgttgtatgggggtgttttttggtctgttgttcacagggctcgttctcactgcttatgttcttcgggattctgggakccaccactctatccgtctccattctgctttgggcgacccagcgccgaaaagccaagacttcatgaactacataggtcttaccattgacctaagatcaatctgaactatcttagcccagtcagggagctctgcttcctagaaaggcatctttcgccagtggattcgcctcaaggttgaggccgccattggaagatgaaaaattgcactcccttggtgtagacaaataccagttcccattggtgttgttgcctataataaacactttttctttttttttcctctctttctttttaaggaaaggcgccctgcctttacgtgtttcttgcttggggtgggagggactgctttagggcagccggttttttcaggtttcccccggttttgcagtgcggagaccacgggggcccactccccgtggctccgcggaccccgccccttacgtgcccggccccgcccctcacgccgcctgtgtccgcgccgccgcagtctctgctgctgccgccaagcgcgcccgaggctcctacgctgccgcgcccggcttctctccagcgccccgcgccgttagccacgtggaccgactccggcgcgccgtcctcacgtggttccagtggagtttgcagtccttcccgcttctccgtactcgcccccgcctctgagctcccttcccatggcggccctagtgttggaggacgggtcggtcctgcggggccagccctttggggccgccgtgtcgactgccggggaagtgggtaagcaagcccggttaggctgcagaccttatcccactctgtgatgcgcctctcctcccaaccttccccgtccagaccccgccattttcccgccagcgtacccccttcccccattcggtgcccatgggccccagcgccataaacccctcgcgaccaaggcagcctccactggggcgtgctcatcgcgcggggagtgttccgaagggtgccctaccggagcycagccctgcttctttcttgcagtgtttcaaaccggcatggtcggctaccccgaggccctcacygatccctcctacaaggcacagatcttagtgctcacctatcctctgatcggcaactatggcatccccccagatgaaatggatragttcggtctctgcaaggtagccacacccagtgctttctctacattccttttcaagtcagtaattgttaactattagtgaagtaggagacgttgacaccctgctgggcatcctgcagaaaacatacccactgaagtagtaaagtcaaggactaagatcactagtaactgtagttaggggttgttaagtgccttgggaggcacagagtgttggaggcctcaggaaaaagctaccgcctttgttaagggcatcaaggctccaggtatagctgaaagcattctgtatgtagtgaaggcatggatcaaggaaaagtaaaagaggtgtaagggaacagccttgtccaacttgttaggcatgcagaagtcaggagaaaaaagcctgcagataagttaaatccggtgggcatggagggacctgaagccaaagcagagtcagsttagtttggtaaaggatccattgaaggtttttttttagcagcagagtcagatgggagcagtgctttttaggactacataaattagtggaaagagrctggaaactagggtcacatacttctctgtgacagtgagtgccagtttacctacaaaaccagtgacattatcttctagacctactgacatggcctcgtctgattctctgcttttcagttgtgttcttacctctaggtgagaaaactgagtttcttcctrcagtgaggtttcccctattccttcacctctgaaatttggaaactaagttgccctctgacagttcaagcattaaaaaaaacccaacatatrgtaattaaggtaatagaggaagtcaatctggcctagagtagtatctctcaaaatttgtttggcctcactgcaggtgtaagcctttaattcttaatttgccttcccagccaccctgacgctggggagagtgagctccggataaaggacgtacatgttgttcttcctggaaaagaatttctaggttcatcacaaacctacaaatacactgcattctagttgatagtgaattcttgtgaatttggttaacctttgtcagtcrtcacctttgtcaactctagacacactgactaaattgagtttataaaactacaaaattgaggcctgattaggatcagggtgggaaaggcctcttggagccactcgcacatataaatggattactccacctggccagggagggttctgccaaactatccttcagatccctggacagtctcagaatgcaggttccttaaactgttcatcacccagctgaatgcagtttaaatatgctgatccctcccacataaactttctgtttctatgtagctattaaacgcttatctattgagtaacaagtttatggtttttgttttttttttggggacaaggtctcactttgtcacccaggctggagtgcagtggcataatcatggctcacttgcagcctctgccacctgagctcaagtagtcctcccacctcaaccccccaagtagctgggactacaggcacctgccgccatgcctggctactttttttgtattttttgtagagaccgggtattgtcacattgcccaggcttgtatgttatctttttttatttaatttttttttatttttattttgctttgaggtagagtttctttcttgttgctcaggttggagtgcaatgggcaaccttggctcactgcaacctccgcctcccgggttcaagctattctcccacctcagcctcccgagtagctgggattacaggcatgggctaccattcccagctaattttgtatttttagtagagacagggtttctccatgttggtcaggctggttttgaactcccgatcacaggtgatctgcccacctcggcctcccaaagcgctgggattacaggcgtgagccaccgcgcctggccttttcttttttaaataatcccaaatgaagtttgggaggcatgcttagtattgtgccctgaacctttgttttttatttggtaatggggtattttgtacctccctatcttactcagtttttaatcacactctataattaatatttatatgggtgttaccttgttttctagctccctaagtcagaaataaacatcatgaagacaggaacctcatctttttttgctcattgctcttttctcagcatcttttgcaatgcctgcacctcaataaatgtctgactgacaccatgtgccttgctcttgagttctctgtttcgtgacaaagacacaaatacatattcatcatatgacgtaaatagcaagagaggaaataaagtattaaaacagctctaagatggaggcacaagctgtattgggtgagtgggaggggcttcacagagaarggatttgtgatttcagttttagataaaggaagaaagaggcggggcgcggtagctcatgacttgtaatcccagcactttggaaggctgaggtggggggatcgcttgagcccaggaagtttgagagcagcctggcaacatggtgagacgctgtcactacaaaaaattcaaaaaattagccaggtgtgatgatccacacctgtggtcccaactactcaggagtctgaggtgggagaatcacttgagcccaggagattgaggctgtagtgaaccgtgtatttgtgccactgtactctgcactccagcctggataacagcaagaccctgtctcaaaaaaaaaaaaaaggaatggctaggtgcgatggctcactcctgtaatcccagcactttgggaggctgaggtgggcagatcacaaggtcaggagrtctgagaccatcctggctaacatggtgaaaccccgtctctactaaaaatacaaaaaattagccgggtgtggtggcgggcgcctgtastcccagctactygggaggctaaagcaagagaattgcttgaatccgggaggcagaggttgcagtgagcttagatgtcgccactgcattgcagcctgggtgacagagtgagactctgtctcaaaaaaaataaataataaataaataaaaaggaaaatgtcattttcagtgatcatcggggcaccctgggcctgtgggttgtgtttcgtataggagagagcgttgttggtaaatggaaatacctatgcaaaagcaccaaaagtttggtatattgaaggccattcaatgtggctgaatatagggtctgtggccacacaatcgggaaaatgctgcaaagaaataacttggcctgaggcttctcacaatctctttccatctacagtggtttgaatcctcgggcatccacgtagcagcactggtagtgggagagtgctgtcctactcccagccactggagtgccacccgcaccctgcatgagtggctgcagcagcatggcatccctggcttgcaaggtatggtggcaagcaggggcatatttgggcagagcacagcatgcctggatggaaagaatcaaggtttctgtaatctgctgggacctgactctaagattgtgatagttggaaggtttagattggagttgggctgggagaaagaattgaactatcactcagaaagaaaatttccaacacaggaaggaactcccaccttccataatcatcagcttagggctaatcttatttcatcaccaccactggattattttgatgcaaatctcagacatcatatcatttcatctacaaatagttcaatatctatgcaaaaggaatctttaaaaaacatgatcataataacgtcatacactaaaaaaattaataattccctaatacaagtgtccaggcaatgtttaaaatttcccaatttttttttttttttttttttttttttctgttcatttgaatcttgctctaaacagggttcacacattgcatttggttgataagtctcttaatctgtggaccttgtaacctatttgaaaacaggtcatttttcctgtatctagtatcccatagtctgcacttacttggttacactcctgtagtgttacttagcgtattctttttttccctttatattattttctataaatggatagatttagagttgttcaattcagatgtgatatttttggcaggaatacttcatggtagtatacttctgtcacaatggcccaggattttgatgcacatagaacagctgtgtgtgacyggggctctggaatggaagtgcttctggaagtctaacctcacagatgactgagttgtaggaatgtgatccctaagactgtgctattttgacaggagtagacactcgggagctgaccaagaagttgcgggaacaggggtctctgctggggaagctggtccagaatggaacagaaccttcatccctgccattcttggaccccaatgcccgccccctggtaccagaggtctccattaaggtacagaggtagagtgggagagtgttgcaagctctagcacagtasttatattctgcccacaattggggggtgaacacaggagagaatcaraggaggctttgaaggtaggagttggtgcaggcatatcttatacccactgagcacagctgccaactgttgccctttattcgtctatttctcagactccacgggtattcaatacagggggtgcccctcggatccttgctttggactgtggcctcaagtataatcagatccgatgcctctgccagcgtggggctgaggtcactgtggtaccctgggaccatgcactrgacagccaaggtgagtagctggggcctgttcagggcctcagacaagcagcttgggtggaagatctatcccttggtccaattgctaaaagtcagtaggagttgcagtgaagaagatagacattgggrcttaacactctcatgggctgggggggctgcaggtgtgtctcctgtaattgaaatactgattttgatgtcatcttttctgcccactccagagtatgagggtctcttcttaagtaatgggcctggtgaccctgcctcctatcccagtgtcgtatccacactgagccgtgttttatctgagcctaatccccgacctgtctttgggatctgcctgggacaccagctattggccttagccattggggccaagacttacaagatgaggtgggacttgtggggagcagaaggggcccatacttgtggcatgaggggtggggtgtctcaggaatgagaagagagttggtgtttattcgtgttgaaataggagcgggggggttgcaggtgaggtggctcccacctgtaatcccagcactttgggaggccaaggtgggcggatcactggaggtcaggagttcgagaccagcctggccaacatggtgaaactctgtctctactaaaaatacaaaagttggccagccatggtggcgtgcgcctgtaatcccagctactccagaggctgaggcaggagaatcgcttgaacctgggaggtggaggttgcagtgagcggagatcgtgccattgccctccagcccgggaaacagagggagactccgtctcaaaaaaaaaaaaaaaacaaaaaggaaacaggagtgaggctactgagaacaggagatcggtgagagctggggtaggttcagtagtgaagagagggtgagcagggcctgtgactcggcatgcttctacctccagatatgggaaccgaggccataaccagccctgcttgttggtgggctctgggcgctgctttctgacatcccagaaccatgggtttgctgtggagacagactcactgccagcagactgggctcctctcttcaccaacgccaatgatggttccaatgaaggcattgtgcacaacagcttgcctttcttcaggtgagcctggttgactgggtctgtgaaaatttgaagccctgtgggccttgatgatggaaaagtaaagcacggcagtggatccragtcccctgtcccactacccacctcgaggctgccagtgtcatgccagggaccatgatggttttcatgatgcaatctcttcaatagtgtccagtttcacccagagcaccaagctggcccttcagatatggaactgcttttcgatatctttctggaaactgtgaaagaggccacagctgggaaccctgggggccagacaggtaagatcctgagtagaactgggttgtggacctaagaacagggttggctccaggatgggcataaggtggacatgccctgggcaactcctagatgtctaggaggttaagggtattggggatgggtggcaaccaacccaagataccgtttaagcttctgttgaaaggaactccagggtcctgggttctggtcctccctctgctcctcctgaggtgcataatttgctctggactcttctgaaagcgagggagctaatccagttgacmtcttgggtccagctcagctctaacattctacgaccttctttgcttccacagttagagagcggctgactgagcgcctctgtccccctgggattcccactcccggctctggacttccaccaccacgaaaggttctgatcctgggctcagggggcctctccattggccaagctggagaatttgactactcgggctctcaggtgaggcatgttcctccccacccttctgggcgtgtgaccctcaagaatggaaagggtcttaaggagaagggctaaggttgcagggaggaaatgaaccagatttggggaatgtagagaaagatgtagtaagaaatagaagtcaattattaggggccaagagtacagggagggaaagaagaggagaatgctactctaaggctgtttgcaattttgcttcttcagcagaggctgagatgccattcttgtccttttaggcaattaargccctgaaggaggaaaacatccagacgttgctgatcaaccccaatattgccacagtgcagacctcccaggggctggccgacaaggtctattttcttcccataacacctcattatgtaacccaggtatgactggggcaaggctggaatgaaaagaggactgggcaggggggcccagtggtcactgtgggttattaaactttgattgcctctctacccacaaggttctgatgcctgtaactcccctctccatcctcaggtgatacgtaatgaacgccccgatggtgtgttactgacttttgggggccagactgctctgaactgtggtgtggagctgaccaaggccggggtgctggctcggtatggggtccgggtcctgggcacaccagtggagaccattgagctgaccgaggatcgacgggcctttgctgccagaatggcagagatcggagagcatgtggccccgagcgaggcagcaaattctcttgaacaggttggaggggtgtttgggtaaaggaagaatggtggtgttttttttggtastgttattttcttttttttttttttttttttgagacggagtttcgctcttgttgcgcaggctggagtacagtggcgtgatctcggctcatcataacctccacctcccagattcaagcgactctcctgcctcagcttcctgagtagctgggattactggcatgcgccaccatgcccagctaattttgtatttttagtagagacggggtttctccatgttggtcaggctgatctcgaactcctgacctcaggtgatccacccccccgaccctcggcctcccaaattgctggggttacaggcgtgagccactatgcccagccatgttattttctttatatctttttttatgtgggacaggcacaccttggacagtaggaaataacctgtttgttcatctcttccactcattgcaggcccaggcagccgctgaacggctggggtaccctgtgctagtgcgtgcagcctttgccctgggtggcctgggctctggctttgcctctaacagggaggagctctctgctctcgtggccccagcttttgcccataccagccaagtgctagtagacaagtctctgaagggatggaaggagattgagtacgaggtggtgagagacgcctatggcaactgtgtcacggtgagtgaatgggggaagggtgggcgtcgtgtcaggcaggatgagcttttggaagagcagaggcccaggccaaggtctttgagagttgtatgtccctcagacccaggttaggtgcagccccagaggtaacaggaccctggggtgcagccttctgcctctcctgactctgcttggcagtgacctccatggcaccccccttcacaggtgtgtaacatggagaacttggacccactgggcatccacactggtgagtccatagtggtggcccctagccagacactgaatgacagggagtatcagctcctgaggcagacagctatcaaggtgacccagcacctgggaattgttggggagtgcaatgtgcagtatgccttgaaccctgagtctgagcaggtaagctctaggccctggaactgatagtctagttgttaccccctcttcttgtataatttttggcccttgaggttgaggtcttttgggcttacagtccctggagtasaagctggaatcttctttactaggttacttttctctcctttctgagacctctcctagacagggtcttctaggccagwgactttattctccttctttgcagtattacatcattgaagtgaatgccaggctctctcgcagctctgccctrgccagtaaggccacaggttatccactggcttatgtggcagccaagctagcattgggcatccctttgcctgagctcaggtacgaggatgagggagatatcacagtggggaagtgggtcgggggctgaggaaaatattgatgggacagggaatatgaaaaggacattggcctggatttgtgggaatggaaagagctatccggaagctcaccctttatgcttccttcactgtccttctggcatcccacctgctggaccccaggaactctgtgacagggggtacagcagcctttgaacccagcgtggattattgtgtggtgaagattcctcgatgggaccttagcaagttcctgcgagtcagcacaaagattgggagctgcatgaagagcgttggtgagactcatgccctgggcacccccatggggccccaccatgaccaagaatcttaaatgtcaagagttccctggcatggccttttacgtcctatgggagcaggtgcttgagacatttcaaactaagattatagtccttgtcaggagttggggaggcatctggaaatctgtgttggaatacagaatctctgggataggtgcaagccatcagactatctcatctcatttttgcagtatctcctcctctggcactttgtgctttggtcactaaatgacctttttttttagtatgatgtttacatcagagcagggcatcataaacctttttggtaacaaggaaatttattagtgaatgatgaatggccgtaacgttacccagcagtggcagagcatgttagaattgagttagtatgtttctttgtggtatccctttagttgccgaagaccgtcctctaacacatttcaaccaaaacaaaaatatacgtgtaccagacacagcgccaccagcctgatggataagagcattttgtggtgctccagatttccatttagagcagtagtggcctttaaacaagtaagtctaagctcagatattatttcagaatttttagaaattctgcaagactgccaattttttccttctggagatgaatctctgttatatgaaaattagaataaacatgggaatgaagccataattaaattgtggcaaaaagaagtggattgaaaataggccaatgaaagattggttcctagatgagacatttaattgttttacatctgttcaagtattcttggaatgtggtcttctttggtaactttttgtaacttttattatacaagtaagaaacatgaatcatggaaaacgaggaaagatagtttaaccaaagaacartagtcacctgtaatcttgccttacagagattgattaattcgaccgtgtatctgcgactgcataattcagccgtgtatctacgactgcatacatttctaggcatatgtgtatgcatgtattaggcttctccttttttaacaaatctcaaaataaaaagtcttacaaccacagttacaaagaaattgaacaaaatcagtcacactactgttaacatcgtagtgtttttaaaacttttttaaagaaatgtaaatgttaggattgtaaatagaaaaatacacttggtaagaaatacttaagcccctagagtaaatagtcagaggagatgaacaacactttacagaagaagaaatcaataagcaaacctagagaaaagacggttcctctcattagtaaatagaaatctagttaaatgagactctgtttatgcccacttcttagaaggttgcttaaactttgtattatgaagcacagacttctataaagttattcgtactcatcaagggctataaaatttgtgttacctattgcctctacatatctggaaatttatcctaaggagattatccaaaacagaaaacatcatatccagtccaggcacggtggttgtaattaatcccagcactttggaaagctcaggtgggaggatcgcttgagcccacgagttcaaggttgcagtgagctgtgattgtaccactgcattccagtctgggtgccaggctaagaccctgtcttttttgtttgtttgtttgtttgagacggattttcattcttgttgcccaggctggagtgcaatggtgtgatctcggctcaccacaatctctgcctcctgggttcaagtgattctcctgtctcagcctccagagtaactgggattacaggcatgtgccatcacgcctggctaattttgtattttaatagagacagggtttctccctgttggtcaggctggtcttgaacgcccgtgctcaggtgatccacccacctttggcctcccaaagtgctgggattacaggccactgtgcctggccgagaccctgtctcttttttcttttcttttttttttttctttttttttttttttgaggcagagtcttcctctgtcgccaggctggagtgcagtggtgctatctcggctcactgcaacctctgcctcccaggttcaagcgattcacctgcctcagcctcctgagtagctgggactacaggcgcgcacaaccacgcccagctaatttttgtatttttagtagagacgggggtttcatcatactgcttaggatggtctcgatctcttaacctcgtgatccgcctgcctcggcctcccaaagtgctgggattacaggcatgagtcaccatgcccggccgaccctgtctcgttaaaaaagaaagaaaacatcacagcctaacttataattatgaaaacttttttttttaatacggagttttattctgtcacccagggtggagtgcaatggtgtgacttagctcactgcagcttggatcttctaggcttaagtaatctcccaccccatccttctgaggagtgagactacaggtgtacaccaccacaccttgctaatttttttttttaattattatttgtagagagggaggtctcactatgttgtgccggctggtctcaatctgccttaggtgatccttctgcctcagccttccaaagtgttggattacaggtgagagccaccaggactgcctaattgtaaacacttaaaagcgaaatgggccgggcgcggtggctcatgcctgtaatcccagcacattgggagggtgaggtgggcatatcatgaggtcaggagtttgagactagcctggccaatatggtgaaaccccatctctagaaaatatacaaaaattagctaggcatggtggcacgcacctgtagtcccagctactcaggaggctgaggcaggagaatcgcttgacctcaggaagcagaggttgcagtgagctgagattgcaccactgactccagcctgggcaacacagtgagactacgtctcagaaaaaaaaaaaaaaaaaaagctaaatgtccttcagttagyagttaaattatggcagatcatacaagaattaagttagttggttgggcgcagtggcacacgcctgtaatcccagcactttgggaggccgaggcaggtggatcacctgaggttgggagttcgagaccagcctggccaacatggtgaaaccccgtctctactaaaaatacaaaaattacccaggcatggtggcaggtgcctgtaatcccagctacttgggaggctgaggcaggagaatcacttgaacccaggaggcacaggttacactgagctgagatcatgccattgcagtccagcgtgggtgatgagagaaactccgtctcaagaaagaattaagttggtgttgatgaggccatgtggcaatgtgggaaaatgtatgatgaggaaaaaacacaggatggaaattatatgtatgctgtgatgatatgtaaaacatacctatgaagggcccggcacggtggctcacgcctgtaaccccagcactttgggaggccgaggcgggtggatcacggggtcaggagtttgagaccagcttggccaacatggtgaaatcccgtctctaattagccagacatggtgacacgcacctgtaatcacagctactcaggaggctgaggcaggagaatctcttgaacccaggaagcagaggttgcagtgagtcgagaccgtgccattgcattccagcctgggcaacaagagcgaaagtccatctaaaaaaaaaaaacctatgaacctatgaagaaaagtccagaaagagaaactctaaaatgattgttgtaaatgtgatttgctctgcatggatgagtagtaaggatcatcttcctattatctacacttttttaaaaagttttaaagaattccagttggtgttatgattatgtgaataaatcaaacccartaactggacagccatcagtggtttgggccactgtgataaacttccagtatccagtgtatggggatatattccagtatccccatgcccgttttaggcatattgattccatattcatcartaagcacaaagcctgagcttatccatgaaaatagcagggaaaagagctataagttaagatttctttttgtttgtttgtttgttttgttttgtttgagacggagtctcgctttgttccccgggctggagtgcaatggtgtgatcgctgctcactgcaagctccacctcccgggttcacgccattttcctgcctcagcctctggagtagctggggctacaggcgcccgccaccactcccggctaatttttttgtatttttagtagagacggggtttcaccatgttagccaggatggtctcgatctcctgacctcgtgatccttccgcctcagcctcccaaagtgctgggattacaggcgtgagccactgcgcccggccattaagatttcttagttgtgaaacaccatgaatcccaccatcatgtgacttgccttgagaatctcccagagtcttgactataaaccataagcattatgggcagtgccttcttcccaccccttccacctccacaccttcattccttccattctgttcttccaggtgaagtcatgggcattgggcgttcatttgaggaggccttccagaaggccctgcgcatggtggatgagaactgtgtgggctttgatcacacagtgaaaccagtcagcgatatggtaagtagctcccctcccctggcaatacccctaaaatagaccctgcttctcatcgcccccagaccatgagcttgttaccagtaacactagcagcagtcatcattggacatttgctttgtttccactttgctgagaattttgagatgtctcattagcacgcaagggtgtattactagacttgtttttacagatgaggaaactgagacataggttatagaaattactcaaagccacatagccaatgagaggtagacccaggattggtatccaggtttttgcagttacacagcctgtgctctggtgtacagtttccccttcctgagacaagagcagctacttacgctcaggcttttagatgggctggcagtagcttccgtctgtctaccccctttctatcaggagttggagactccaacagataagcggatttttgtggtggcagctgctttgtgggctggttattcagtggaccgcctgtatgagctcacacgcatcgaccgctggttcctgcaccgaatgaagcgtatcatcgcacatgcccagctgctagaacaacaccgtggacagcctttgccgccagacctgctgcaacaggccaagtgtcttggcttctcagacaaacagattgcccttgcagttctgaggtcagaggtggcaatgagagcttccggctgggaaatgtggggcagaacctttgtatcagtgagggacccttgggagggaggaaggagagtgtgggagagctttagaggcttctgaccttggttccaaggatatttcctctcatctgtgccctggggtctcaaccctctatcagtctgtaccctactctctgggcctgtgtttcagaccctttttctattttagcacagagctggctgttcgcaagctgcgtcaggaactggggatctgtccagcagtgaaacagattgacacagttgcagctgagtggccagcccagacaaattacctatacctaacgtattggggcaccacccatgacctcacctttcgaacacctcatgtcctagtccttggctctggcgtctaccgtattggctctagcgttgaatttgactggtgtgctgtaggctgcatccagcagctccgaaaggtcagagagttcattttctttccactttccttgctattctgttcatctctagcaattgcttggcactaatcctggcatttcctattaattgccgtcccttactttggtcatagagctttggggtgggggtccttttaggccatctctcatgccccacacggtatatgaatctcttccccaacactttgtacctccttccctcccaaggcaggggtcctgtacagctctttcagaggaagctgtgctggcagtctctgaagtaggggctttggcttagtttctccacgattttctccacgattttcctcccacctgactgctaagtacccttcccctccctcttgcagatgggatataagaccatcatggtgaactataacccagagacagtcagcaccgactatgacatgtgtgatcgactctactttgatgagatctcttttgaggtgagggagatggaggcttcctggtagcttgagtggccagggtcgagtagaacagctggctgacctaagattctttgaaacttggtggcggctgagggaagcagtgagcaggaaggctcagattcctgccctcttttgctgccaccacttgtttctccccctgcaacgtaggtggtgatggacatctatgagctcgagaaccctgaaggtgtgatcctatccatgggtggacagctgcccaacaacatggccatggcgttgcatcggcagcagtgccgggtgctgggcacctcccctgaagccattgactcggctgagaaccgtttcaagttttcccggctccttgacaccattggtatcagccagcctcagtggagggagctcagtgacctcgaggtgggctgggacctggtgggttacccggaggctggatgatgcttgggggaaagtgtgaacaactcagctaagctccctgcctcctgtagtctgctcgccaattctgccagaccgtggggtacccctgtgtggtgcgcccctcctatgtgctgagcggtgctgctatgaatgtggcctacacggatggagacctggagcgcttcctgagcagcgcagcagccgtctccaaagagcatcccgtggtcatctccaagttcatccaggaggctaaggtgggaggctgcagacagtgaagtctctgagggcatgctgccagccctggaggagacttccttctctggtccagcagaatcataggcaccagggctgggaacagtgggctatgtggggctcgttaaaggaagagacaatcctagagtaagtgagagaagaaagtggccctatgtcccactgtctgtgtccccccgctaggagattgacgtggatgccgtggcctctgatggtgtggtggcagccatcgccatctctgagcatgtggagaatgcaggtgtgcattcaggtgatgcgacgctggtgacccccccacaagatatcactgccaaaaccctrgagcggatcaaagccattgtgcatgctgtgggccaggagctacaggtcacaggacccttcaatctgcagctcattgccaaggtaataaggctaaaggaaagaactaaagggccacagctcttgcatgttctgtgctggccacagtgccatgaagccctgcactgtctcctgccttcatccaagtaggcagggaagctggagggaaagggctgtagctagagctcatggtgttggggcttatgacagtcagtgaccctgaaccctgctcagtctgwtcccccagagctgaggacggagaggaagagtctaggcctatagatagtgtcagcaaggccaacctgcagaaggcctgaccagtcttctctgccccaggatgaccagctgaaagttattgaatgcaacgtacgtgtctctcgctccttccccttcgtttccaagacactgggtgtggacctagtagccttggccacgcgggtcatcatgggggaagaagtggaacctgtggggctaatgactggttctggagtcgtgggagtaaaggtaaggaatatcgaaacccttggggttagcagaaaaatagcgggagagagttcactcaccacacagagttgtcagtatgtaaaccaggcactgactgcaaggcattgccggatcgtgggggtaatgaggtggtcattgtcccttaagagcttactttatggtaatgggagggaagagaagttggatccccaaaaaagctttggtatagaacagtccgtggtaaaactacatattcgacctgtaaacagaatgctgcaggagttcaagagacaggaggtgctgcttccaaaaggggtgatctgggaaggcttgagcgaaggggtgctatttgaattgagttttgaaggatggttaaggttttttatttgcaagggcacatcctaagcagaagctgagggatgaccccaagtacgtttggaaagcaggagggcacacagagagggcaggctgaccctgccattcagatgggatcaagcacagggtactgtgtccgtctctgctggtgagggaggaggtcctctcayaccttggccctctctcttccctcccgcccctttaggtgcctcagttctccttctcccgcttggcgggtgctgacgtggtgttgggtgtggaaatgaccagtactggggaggtggccggctttggggagagccgctgtgaggcatacctcaaggccatgctaagcactggctttaagatccccaagaagaatatcctgctgaccattggcagctataaggtatcagaatccaggagggcttcccgagggccgtggctccctgggccagggctgaccttgaaatggaagacaggaagaaaacaatttcatccttctgtttggtttcagaacaaaagcgagctgctcccaactgtgcggctactggagagcctgggctacagcctctatgccagtctcggcacagctgacttctacactgagcatggcgtcaaggtgcaggaactctggcaacctaccccactgctgcccttccccaagggggtgaaaatactgcaccaaagaattatctgggctgggcacggtggcatatrcctgtagtcccagatactcaggaggctaaggcaggagaatctcttgagcccaggaggtagaggctgcagtgagctgcgagtgtgcagtgagtgcaccactgcactccagcttgggaaacagtgagatgctgtctcaaaaaaaaaaaaaacaaagaattatctcctattcccctgcttttattattaccattatactagtaagctatattccatgcagaaagcagaatacacaggaagcaaagagaaaagtctcttaaaatctctgtaccactgttctgatatttttccttccaggattttctctgtgtacatgtgtgtgagctcatactgcacctagtccttggtaacccatcttacttagtgtagatatctttcctgccaagaaatacactttgccagtatcaaatagaggcagccctcagtgcccaccctatgggtcctcagtctcctcatcatgggctcctgggccagctcctctcccttaaggctagccttcctgaccgctgccagacagcttggccctgaccttgactccgggttggcaggtaacagctgtggactggcactttgaggaggctgtggatggtgagtgcccaccacagcggagcatcctggagcagctagctgagaaaaactttgagctggtgattaacctgtcaatgcgtggagctgggggccggcgtctctcytcctttgtcaccaagggctaccgcacccgacgcttggccgctgacttctccgtgcccctaatcatcgayatcaagtgcaccaaactctttgtggaggtaactgagacccatgtgctgggagggagactgccagtgttgatgggaagaagaaagagggaggagtgagtatggaacagccatgctagtaataaagctttgtggctacagagggagagatggtgggtatagagtgtgcagarcctggtttatgggaaaaccacatctctccctacaactcccaggatcacccttcccttaaagctgactgctttccacttgcaggccctaggccagatcgggccagcccctcctttgaaggtgcatgttgactgtatgacctcccaaaagcttgtgcgactgccgggtaagtctttggggagaacttggcttctgaacactggcagcccctggcatagagacctgcagtgtggtgaaggatggctggggggcccactctttgtcctggactgcacagactgtgaagaccccagaatgtttctcactctttcattccttaatccacagtgtccacagtggccttgtctgaggaattttttttttttttttttttttgagacagagtcttactccatcgcccaggttggagtgcagtggtgtgtgatatcggctcactgcaacctccgcctcccaggttcaagcgattttcctgcctcagcctcccaagtagctgggattacaggtgtgtgctaccacaccaggctaatttttgtgtttttagtagagacggggtttcaccatgttggtcaggttggtctcgaactcctgatctcaggtgatctgcccacctcggcctcccaaagtgctaggattacaggcgtgagccaccatgtccagctcacccttcctatttctgaatcttcctgtaatcttgctgcttccattttctcccaggattgattgatgtccatgtgcacctgcgggaaccaggtgggacacataaggaggactttgcttcaggcacagccgctgccctggctgggggtatcaccatggtgtgtgccatgcctaatacccggccccccatcattgacgcccctgctctggccctggcccagaaggtgagccactgcactcttcctggtattggagacccatatgcccctaccagccacccttgcttccctgagcccttttccttctgccccgccctatgggcccaggccactggtgccaggctagcctgtgtgggcatgggtgcsagtgagccttacctctgtgtatcctctccagctggcagaggctggcgcccggtgcgactttgcgctattccttggggcctcgtctgaaaatgcaggaaccttgggcaccgtggccgggtctgcagccgggctgaagctttacctcaatgagaccttctctgagctgcggctggacagygtggtccagtggatggaggtagggagtgtgcatgtggcaggaggccaccacccastgtctcctggcttgtgggcccctgcctaagtgggctggtagcartgaggattcaggggagctcctggggactctgggctctgatgagcacagtcagagattctgcacactccttcatcagttctttctgctcccagcatttcgagacatggccctcccacctccccattgtggctcacgcrgagcagcaaaccgtggctgctgtcctcatggtggctcagctcactcagcgctcagtgcacatatgtcacgtggcacggaaggaggaggtaagagtacacctgagatcctgctgtccctgttgctttcccagtaacaccaaaggtcagggtagtccttaggggcaggagacagcaggaggagagtctggagacagcaggaggagggtctcgagccagcacccttgcaggtctacatcatcattttttgagcagggatgttggccattgggactttgtgtagggcaaggcatatgggtggtgcctcttctggatcttcccattgttccccagatcctgctaattaaagctgcaaaggcacggggcttgccagtgacctgcgaggtggctccccaccacctgttcctaagccatgatgacctggagcgcctggggcctgggaagggggaggtccggcctgagcttggctcccgccaggatgtggaagccctgtgggagaacatggctgtcatcgactgctttgcctcagaccatggtgagagaatccagcatgtacctcctctgcccagtggggcttgtgggacagccctagcaagaaaatgggaagcrggccaggcctcaggactctactaggacagggtcttgatccgtatgggaccctagcctctagggtacctggtctgtgataggtgcctgataaatacttgttgaaagaatgaatgagccagtgagtagaactgcaagtgaaagaatacatgggtaaaagtgtgggctccagaagatggcagcagtcctgttgcccttgtttctagttcccagaaaaaatgagcattgggagtggtagtgagcataaggaggttgttggaagtgcagtcctggggtgtgagtgacttcctagacatggaggtgattggtcctgagggtaatggctttctttctcccagctccccataccttggaggagaagtgtgggtccaggcccccacmtgggttcccagggttagagaccatgctgccactactcctgacggctgtaagcgagggccggctcagcctggacgacctgctgcagcgattgcaccacaatcctcggcgcatctttcacctgccyccgcaggaggacacctatgtggaggtstggggatgaggcccagagcaggaggggggctctccagccctaggatatgttctctggggatcctttccctagcataacccatgtcctctgggcaggtggatctggagcatgagtggacaattcccagccacatgcccttctccaaggcccactggacaccttttgaagggcagaaagtgaagggcaccgtccgccgtgtggtcctgcgaggggaggttgcctatatcgatgggcaggtacgcaagtagcccctgcctgatctcagtagtgccctcttctgcaccacgttcatwtcttccctwcccagcacatctacactgtcccactatgtgcaccactgccctggaccaggggttgggggcacagctcccccaaggtgctttttgtccttgctgacatctacccctttaggacctgagttctctctgctccctcctgagtgccctgccttctgcctgcaggttctggtacccccgggctatggacaggatgtacggaagtggccacagggggctgttcctcagctcccaccctcagcccctgccacyagtgagatgaccacggtatccacactactgggctagggggctgggaggtgttagtctcagggcaggatgaacagcttgaacattttcattggtggttcaggaacaattggggttttcttgagggactgaatttgaagtggggttgggtcaattatttttttaaaatgctgggccaggccagatgtggtggctcacacttgtaatcccagcactttgggaggccaaggcaggcggatcatctgaggtcaggagtttaagaccagcctagccaacatggtgaaaccccatctctactaaaaataaaaaaattagccaggcgtggtggtgcacatctgtaatcccagctacttgggaggctgaggcaggagaattgcttgaacccagaaggtcacgccactgcactccagcctgagcgacagaacgagactccgtctcaaaagaaaaaaaaaaaaacaactctgggccaacgttatccctccagacacctgaaagaccccgccgtggcatcccagggcttcctgatggccgcttccatctgccgccccgaatccatcgagcctccgacccaggtttgccaggtaagagtggggttcctgtgactcagagactgtgtagggacaggatccacttcttcccagtgcctcgcctttctctacttacatgtcctcctctccatccctttatcctcgtctgatctgccrtgccatcctttgcctaaacaagtctccccggtgtgagtagacatctcacagcttctcacatgcccttttttgttgtgggcagctgtgttcctccgcccaggagctgggatcccacggggcagcagagcgtggggtaaatccaggttgttggttggtgtgagtctggccgttcctcttgcctaggatgcctttgccaactgggagagccccgggagggcaccactgctcccatacaacacagccccatgggaagccacctgtctgtccccagagctgctgcagtcccctgccctcccctaacctgctatattactgtgttgtgaattggtttaacatatacactgtgattcagagttcctgggaatatggrgtttctttccaaacctcagccataaatgtatatctgtcctcttgtcctgtttgcagctgaggagccaaaggagaagtcctctcggaaggtagccgagccaggtgagactccaccctgacacacactcacctcggggacctctgatctggccttggtaggaggaaccctctgaccagccttttctgccccatccctcactgcagagctgatgggaacccctgatggcacctgctaccctccaccaccagtaccgagacaggcatctccccagaacctggggacccctggcttgctgcacccccagacctcacccctgctgcactcattagtgggccaacatatcctgtccgtccagcagttcaccaaggatcaggtgcctggggcagggaggatgggaccacccagagctttgaggatttggaaagctggggctaggacctttctagctaacttgggctctttcttagatgtctcacctgttcaatgtggcacacacactgcgtatgatggtgcagaaggagcggagcctcgacatcctgaaggtcaggatcagggccgggggtagggtccaggccatcgcctgcccttgggccgcatcagcgcagggccrcgcagtggtcagagtgggtcttcctccccctgccatcccgtccccttatgctagtccatccctctgctgctgtagatcttcccccacgttttccctccccaaagcaggatttagctggctggggaggccctgagcatgagaccatcgccccactagtggggtcttctggtctgggctgctgcaatcatgggagagagctagggtgtgtcctcctttcccagctcgttcagacacttaatgatgggtggttttctggaggcagagcctttagctcagagtgacaccagtggtggaaacgtcaaggctctgacaggtcacaggggaggtttgggtgcagaagggtcctcacagcacccctcaagtgtcagttggggtggtggtgcctagctggggtttccccagggtggacacgcatacgtacaccytccatcttgctctttccctaggggaaggtcatggcctccatgttctatgaagtgagcacacggaccagcagctcctttgcagcagccatggcccggctgggaggtgctgtgctcagcttctcggaagccacatcgtccgtccagaagggygaatccctggctgactccgtgcagaccatgagctgctatgccgacgtcgtcgtgctccggcacccccagcctggagcagtggaggtgaggccagcctgggtactgagatggggttaagaaggctggacccaggggcatgagaacccttctgcccacrttttctgtgttttgggccagatgagtgaggggaccccagaagagggggactggcagttggggggcctctgagctgcaaaagacaggattttccccttttttccagctggccgccaagcactgccggaggccagtgatcaatgctggggatggggtcggagagcaccccacccaggccctgctggacatcttcaccatccgtgaggagctgggaactgtcaatggcatgacggtgagggtggtggcagggtttggatccctgccaggggacgatctagagagggaggcaggaagtggttaccccggtacaggacagctgcatcaaggaggccttcattctgctccagaggcttttaaaagcttggaaatgatgtcggggggcactcagtctgggatccctgtggtgactggattcctctcctagatcacgatggtgggtgacctgaagcacggacgcacagtacattccctggcctgcctgctcacccagtatcgtgtcagcctgcgctacgtggcacctcccagcctgcgcatgccacccactstgcgggccttcgtggcctcccgcggcaccaagcaggtgagaccctcacagccctgcctggaagccatggagatgtgggttgggcagtcagagcccagcgctgcatccaccatggctctcctcaccctccaggaggaattcgagagcattgaggaggcgctgcctgacactgatgtgctctacatgactcgaatccagaaggaacgatttggctctacccaggagtacgaagctgtgagtgctgggcttgaggaagaagccagggctgctgccgtagggcatcagatatgaggacagaaaggctgggctgagggctgggtcakagctgttaaacttcacatctgtcaattgccatagctgcatgtgggtgtggaggggaccccagtggagcccagacttgtgtcctctgtagccactcctaccccaaggcactaatggggaccccatctgctttgcagtgctttggtcagttcatcctcactccccacatcatgacccgggccaagaagaagatggtggtgatgcacccgatgccccgtgtcaacgagataaggtggtgcagcatcagagtcagagactgcctcggggctggtggacgggaggagacttagtcctggacaagccatccatgggctgcacgataacacttcctttttttttttttttttttttgcagcgtggaagtggactcggatccccgcgcagcctacttccgccaggctgagaacggcatgtacatccgcatggctctgttagccacygtgctgggccgtttctagggcctggcttcctcagcctcttctctttaggcccagctgctgggcaaggaattccagtgcctcctacgggggcagcacacttagatattcctggacatccagatagctcacatgtgctgaccacacttcaggctctggactggagctctctggcatgggggtggggcctcagatgctggggcccagtctgccccatcttcattcctgcaccttaaacctgtacagtcatttttctactgacttaataaacagccgagctgtcccttgatgctgagtgtagtagaacagagctttcttttagaaaattgagcagattcccaaattataagagcagcctcaccaggcagggctctggctagggctgcgtgcccacactcggcattttcacactcgtgactctttgggactcggcaggagcgtgttaactctgtgctctctgagtcctgtgtcgtgctgatgccagcgcttacctgggggctctggctggtgtccagccctccttcctcaattcagttgactcaaagacctgacagagagttctgccctcttcctgacactgggagaacactcatcagggtaaaaggaaggctgagcactgcggcctgtctgaggccaggcctggactcttcctcactctttctggttagtcctcctccagtggctaaggctgccattgcattctcaaaaccaccctggagttcttcagccactgtcactattaggagcccctcctatttcccatccctgggagcctctgcctgacattggacagaggggcagatgccatggagggctgaggagcactttggcttggagaccccagggcagcagcctaagggcagtagcttatgtgtctgtgggtgagggcttctgaggagcagctgtgccctccagtgaacttgagtagcattggagaaatctcatttcttgttccaacaaaacttagcactctgtgggtacaaagcaccatgtgcagtgggagtacaaggaagaacaaggcaattctcaccctcagttttcagcctcgggtcataaggcttccagtggcttctacagattaaactgctgcacactggcacatgatagtgcaaactgctctgacaccattcaggaatcacctacttcatccagagagtaacagcgtattctagagatgagaaaaggagaaggacctcgttttttgagaacttagtgtgaacaggaacttgatgygtattctcatttctcacaccagccttccacccatttcacagatgtggacactggctcagagaagtggtgggggccggtggctcacccctgtaatctcagcattttgggaggctgaggcaggcggatcacctgaggtcaggagtttgagaccagcctggccaacatggtgaaaccctgtcgactaaaaatataaaaatcagctgtgtttggtggtgtgcgcctgtaatcccagctacttgggaggctgaggcaggagaatcgcttgaacccaggaggtggaggttgcagtgaggcaagatggcaccattacactccagcctgggcaacagtgacactcttatctccaaaaaaaaaaaaaaaggtggtagcttgctgggccactcaccttgagactcatacgcaggacttcttgacttaacaacccacctttctgttaaaaggaaaggtcatttctggctttaagggcatccaaaaaccagtgggaaagacaagccacaaatctaagcagtcctgtagggaaccagtttccagaagaggtcagcacagatacggagtcggagaaccctgtgccgtggggtgtgagctgtgtcgtgaggaaggacgaagagtctcctttacagtacagttcgagaggaatggaaattgtgtctgcggtacagtgaggagacactgaacgcagcaggagattcctactgagtattgtgagggttgagagtctgacggaccagaacagggggcttggatgtcaattccaacaaaaatattaatttacaaccacaggtactatttgaaggagggtattaagtataatgctaagtcctagagtgtggaggcctccagtcctgctaatgttaaccctttccagtctttccaaacccagattcctgcctgacaaggtctccctcaggtacctggaggactttattggttggaaaatagagtaccatttccagaactcttctttttctttctagagactccatttccttgcttaaactcttagaacaagtcagagattattttcccaattgtactcatgagtacttgggactcgcacacagattcccacagaacttggatagcctcaccctcaagtagaagcagtgttttctgccaagtagcggacgcattttacttagttgctaagtggtgggagatgttcctgtcctgagcctttctttggctctcctaatcatagctcagctctgagttgaataaagttttttcccgtatgaccagaaagtaaatctcattataytgggaaacaaaatgaaaaaacttaccagcaaaaaccaaaattagccctttattttttaaaatttttatcgttttgagatggcatctcgctctgttgcccaggctggagtgcagtggtgcaatcttggctcactgcaacctccgcctcccaggttcaagtgattctcctgcctcagtctcccgagtaactgggactacagacatgtgctaccacacccagctaactttttgtatttttagtagagatggggttttgccatgttgkctaggctggtgttgaactcctgacttcaagtgatctgcccgcctcagcctcccaaagtgctaggattacaggcatgagccaccgcacccagccaaaattagccctttaatacaatacctttgggcctgttccacatccactgagaaacaacttcatatctgccatgtaattgtcatgaagcataaaaagttagtttgcttcctgaggtacttaagaggtttgatctatttcttctataagaaacatttatatgccaagcactgttctaagcgctttacagatacatccctttgacacttggatgaatcctttgactatcccccaccttgaaagaagtgtggctaacgttgggttgctattacagccattttctcccacctcttcactgtccaccctagtgaaggagacatccccctcaacataggtagtccaccgggagctttgtcagctgcactctagtcctggcccttacaactaactacctgcaaccatggcaagtcagtatgcctgtgggcttttattttttatactaaaattttgtttttgagacagggtctcattctgtcacccaggctggagtgcagtggcacgatctcagctcactgcagccttgacctcatgggctcaagtgatcctcccacttaagcctcccaaggaggtgggaccaccatggccataccaccatgcccggctaattttttgtgttttttttgtagagatggggttttgccatgtcgtccaggctggtctcaaactcctggagtcaagttatcctccccactcagcctccagaatagctgggaccacaggcacatgccaccacacctggctaatttttgttcttgttttgttttatagagatggggattcgccatgttgcccaggctggcctattactttttttttttttttttttttttttgagacggagtcttgctctgttgcccaggctggagtgcagtggcgcgatcttggctcaccgcaagctccgcctcccgggttcacgccattctcctgcctcagcctctccgagtagctgggactacaggcacctgccaccacgcccggctaattttttgtatttttagtagagatggggtttcaccgtggtctcgatctcctgacctcgtgatccgcccgcctcagcctcccaaagtgctgggattacaagcatgagccaccgcgcccggccaggctggtctattcctgggctcaagtgatcctcctgcatcagcctcctaaagtgctgggattacagccatgagccaccatgcccaacccacctataggctttaaaagggtagttggcaattcccagtgtaaaattgcaaagtgtctgtagttctgcagtaatatcccctgggacaatgagggggcattggctggtggaggtgaggagcagagaatgagggccaggatgggatgagtgcttaatggaagactcgtctggcaacagtgcctagaagagagaaaggagccatttcaccatcaggacgccaattaggaagttgttgcagtaaatacagatcatgggtgaagaggttctagattcagagataggaatagatgttataacactgaggagagaggagagtgaagaatgactgcacagtgtgggacctcaagactggaagaaagaagactgatgaaggtagaccagatagccagtttggggtaggggagggctgattccatttgggcatgatacctagctgccgtgggccatctatatggagatgtcatggaggtaatggagctggggagttggagcaagcacaatagagacaggtggcatttatatgtgacaacacaagtgccatgagagcagggactttactcactgatgtatcccaaacaccagaacagggttgagcacatagtaggtgctcagtaaatgtgttgaccgaagcatcaacataaaggtaattgaagcttttaaaatatgcatatttgttcaccaagagaatagcggcaagcctcaatttcagcaagggccgcaggagaactcaggagaaagccctcaagaggcccagaattccaagtgtgtgagggacgggagacgtattggcagattcaaatcctgtagcaggccaaagagaaggaaatttgaggcaaggaccttgtcacaatagttgttaggctgatgctttgtggtggtaaccaggtttcacgaggttactgagggactggtttagaagctgaggtcatttaccaagtggcaaggaaaaaaatgggtgttgagattgggagctcaaaggctttagagaaggtcagggaagctgtgatgaatccgcaggagattaatagagtcacaagcaggactcaaggggaagctaaacactgaatttgtggtggggctgggggaagccatgtccagggcaggggcgtagaagggcttgcactccctggaggacccaagaaatagaaatgagctggccgggcgcggtggctcacgcctgtaatcccagcactttgggaggccgagacgggcggatcacgaggtcaggagatcgagaccatcctggctaacacagtgaaaccccatctctactaaaaatgcaaaaaaaattagccgggtgtggtggcaggcacctgtagtcccagctactcgggaggctgaggcaggagaatggtgtgaatccgggaggcggagcttgcagtgagccaagatcacgccactgcacgccagcctgggcgacagagcgagactccatctcaaaaaaaaaaaaaaaagaaaagaaatagaagtgactgcctgcttgagagcacctgaattgctaccatcaaatgctaccatcagatacagatttatacctcgggaatcagcatgtatgaaacctgcttgttggcccattggtaggagctggggattagaagatattttatggactttgcattggcctgacatttatctgttcaccatccttccacccattccttccatcaccagcagtcatactgagcatgtacttggtgtctggctgtgagctaagtgctgggggagcatgccttccttcaaggagtgtgccgtcagtaggccactcaccgttttactgtgtctcccagcagtcctgtgtgaccacgtcctggtccagcaggatgggggaaagcagggaggccatgcttgggcagactccgtggtcaggaaaaagcaagtttgttgttgtagggtctgaaccctgcttattttggtaagctttcttatctttttaatattctgggttcagttcccttctatttctccccaggcttttggctacagtcctttaaaaatttatagccatcgttgttgagccaaagcaaacaaaagaatggaatcggaggttaaggctgtttgggtcgtgtcctctgagtgagcttctccaggtctgggcttcttcctgtccccaggatgctgtagccagagagcagatgagggggtctggggtaccacacggggaatggcaagagcagagaaaggctaggaccagggctgaaggagggaggcacaggctctggcaacccgggccttcctgcctacccactctccccacgttctttctcttgccagttaaggaaacggggcctgctttgtgtatgggattgctggtgatcacagctgcatctgggggtgtggtggtatacacgtggagtcccagctgctcaggaagccgaggcaggaggattgcttgagcccaggagtttgaggctagcctgggcagcatagcaagaccccatctcaaaaaaggaaaaagcccccacacagctgcatctggggcctcaggctttgccctgttggggcctgggaactgcccctccaagcaccccttggaaggtactgaccaggtactgacgaggtgtccctgggacttaagccagggacagggaggccctgggaactgccagagttgggggaagggaggttggagagttaagaaagagtactccaactataaaaggaacaccctgactacagttctccacagtgagggtctctgcctggcggaggggaaaagggtcttcccgtcctgaccccagtcctgagactccctgcaaagacttccggctgcctctgccgctgcggtggcgtatgccccagttgggggcgctgctccccagccagccgggctctaggaagcgggagggccaaatgcctcctttaagccggctgcaccggggccctgaccgggcgggagggctgctggagggtggtgcttatcacccgggcttcctcttgaccctgccggctgggccctgggccttggccttcgcctcttaaacgtggtgcaggactcaccctgggccacccccaggtgggcagccttgggagaagggcaggacctgcccatgtgcccatgctcctccgcccagtcactgcagcacgaagcctctcaggtccgcaccctgcattctggccctttgatctccagtttctcctttgaatagccctgcagctctcagcagggaaacccggcctgcctctctctccctccactctccatttcacccctttcctggctgtccctcttctctggttcctctctgacccgaaagcccacccctcccctagttaatcagctgtgtaaagagctggggctgggctgagggatgggccctcccccacctgcgttgctctcccctgccttcccctcacccctcccaggcccagtcccttcccctcgactctccctcctccatctatcatcaaggaagggcacccaggggaaagggacttctggataagcgagtggagaaggaggataggaggataatgggggagtgcaggcagctctgcagataaggatttcctgggctcccggggatggtggcccagtgtgaaggtgggagaatgctccagagacctgtctcctcatcctcccgatgcccgaaggtgagtggaaaggcaggatggcatagagagagggctggggacgtccaggggccagaactcagaaccgagtggaaccagctgcacgaccatgggcaggtgagcctgcttctccatctgtcaggtgcacaggatactgtccgcaccacagtgccttgcacaaaataagctcaatgattgctgcttcctgtccctgctgtcagggtgccgggccactctcttctcctgaaatctctcccctgcatcctgggttcaacccaaaagctaactcttatatacaccttctatataccaggcacattcacacccatgatatcacgtaatcactattttataattgagaaagctgagacgcagagaggttaactgtgactagaataatagtaaaggcagagcagaaccagagggtctgaccccagagccccaggacgggagtgccagcggcagcaggctgctggaagggctgaggaaagatttgctgagaaactcaactaggcaagagcttcaaaggggcctggagtgggaatgagagcctgggcatgtgctggctgaccctggggaagtctttttccctccctgagtctcctccttctatgggcagaagatggactggatgcttggtgaaggcattcacctgccctgagcattcccctgcaaagggacccagcatcrcacagataggacaggctgtggcttaaagcatttcatagggtgaaaatcgagtcctcctgttccccaccctccttccctctcctcgatttcctcactcttccccacycccatcctgtcacctggggcctataatcaatgagacgtaaaatgagaaagtatcaggaaccagcaaagcatggcgagcagctggggcggccttgccgccgggcgtgatggactgccagcccttcgcttcgccagcctcccacaccctgacgtgggcagtggcgtctcacccagcctgggctaaggctcccagctggacatcagggagggggctacctctgatgagtccaaaagcctcacctttaaaaaggaatgaaatctatggtcttgacatggaaagatgagtctaggctgcatggttgagtcataaacacaggtaacacgatctcacctataagatgaccccatttttgttattatgtagaaatactgaccccatactaggattagcagttttctcggaaagtaagattacaggggaaacattcactttctactttatatacttttcctttgttgtacccttaaaacaagtatatattgcttttatagtaaaaataatctgataataaagatatttctattatgaggaaggctcacagaaatatgcatgggctattgaaaatgctcaacgtccttgctttgggctgggattttatcaacatggtgggaaggcctgaagcactagatctaaaatcaaagcacagagtctaatttttttttttttttttaagacagagtctccctctgtcgcccaggctggagtgcagtggcgcaatctcagctcactgcaacctctgccttccgggttcaagcgattctccctgcctcaacctcccgagtagccaggattacaggtgcccaccaccatgcccagctaatttttttttttttgagacagagtttcactcttgttgcccaggctggagtgcactgatgcaatctcggctcaccgcaacctctgcctcctgggttcaagcaattcttccgcctcagcctcctgagtagctgggattacaggcatgcgccaccacactggctaattcttgtatttttagtagagacggggtttctccatgttggtcaggctggtctcgaactcctgacctcaggtgatccacccacctcggcctcctgaagtgctgggattacaggcatgaaccactgtgcccggccaaatttttgtattttttagtagagacagggtttgaccatgtttgagacacagtctcactgtgttgcccagactggagtgcagtggcacaatcatggctcactgcagcctcgacaacctgggctcaagtgattctccccacttagcctctcaagtaactgggactacaggtacacactaccatgcccagctaatttttgtatttcttgtacagacagggtttcaccatgttgcccaggctgatcttgaactcctggggtcaagtgatctgcctgcctcagcctcccaaagtgctggaattacaggcgtgagccatcttgcctagctgatttttctttttttttttttttttttttttttgatggagtcttgctctgtcgctcaggctggagtgcagttgcatgatca

SEQ ID NO: 95165 - DNA, 191410 bp, Homo sapiens
  misc_feature (1)...(191410): n = A,T,C or G
ctataaaaatacgagaagaatttctaggaaaaatttttctggacattggcctaggcaaagaattcacgaccaagacctaaaagtaaatgcaacaaaaacaaaaatagacaaatgggacttaattaaactaaaaagtttcttcacattaaaataaagaatcatcagagaaaatagacaacctgttgaataggagaaaatattttcaaactatgcatctgaaaaaaggactaataaccagaatctataaggaaatcaaacaactcaacaaaacaaacaaacgagatataaatagccccattaaagagtgggcaaaagaaatgaacatatgttgtgtgaaagaggagatacaaatgaccaacaagcatatgaaaaaaaatgctcaacatcactaatcatcagagaaatgtgaattaaaactacatgagatgccatcttatgctagtcagaaagactattattaaaaaggataaaaaatgacagatgttggcaaggatgtggagaaaagggaacacttatacactattggtggaaatgtaaatagtacagtctctctggaaaacagtatggcgatttcttaaagaactgcaaatagaactacctttcgatcctgcaaccccactactgcctataatcccaaaggaaaaaaaccactgtatcaaaaagatacctgcatccgtgtgtttatcacaacactattcacaataacaaagatatggaatcaagcagaatatccatgagtggatgactggatgaagaaagtgtgatatatcctaccctaaacacataaacacacacacacacacacacgcatatataaattggcaacctaaattgttaggcaatcaactacactttatgaaaaatattataacaaagggcatttctttttcttttcataatctgttaccatgataatgagataatttcttatatatttaaagttatattgccagtatttgagtaccacacagtggtattagttaggaatatgaaacagacacagaaacgagataattcttttggaattatctctgcaaaagagttaaaatcaccttttaaggatttgggttatttgattaaaatattagtaatttttattgaaaatatttgcctacgtcgttgttcccttcatgtttttctcaaatagaagtaactagatatggttttttttgttagttctttttttttttttttttgagatggagttttgctcttgttgcccaggctggagtgcaatggtatgatcttgccccactgcaacctccacctccctgaggcaattctcctgcctcgacctcctgagtagctgggattacaggcatgcaccaacacactcggctaattttgtatttttagtggagccggggtttcttcatgttggacaggctggtctcaaactcccgacctcaggtgatcttcccgtctcggcctcccaaagtgctgggattacaggcatgagccactgcgcccggccaatatgttttttaattagaaataactttcagttgttttgttttttcagaaataaaaataagattagtggaggatatttggctgctagaatgaactggagttgtagaatgccttcccatctattggaatgttacatgttttaaaatgattctttcatctgcctttttcttcttcttcttcttttttttttttaactgcagttactatttgggaataaaaagaaagtttcaaaataggagtctacaattttattactatgtatgatttcattttagacatttaaaagctattttttaagccctgaaaatcagtatattttccagaaaccctttgttaaatcataataaacttgcagtgtttctgcaggggcaaacttcagctcagccctgctgcacagatgaagtactttatgcaaacccctccacatatacttgctaagttttcaaaatattcaagaaaccagaagcatggaagttacaagcaaaccttttttttatttttttgcgacagagtcttgctctgttgcccaggctggagtgcagtggcatgatctcggctcactgcaacctctgcctcccaggttcaagcgattcttcttctcagcctcccgagtagctgggactacaggtgctcagcaccacgcctggctcatttttgtatttttagtagagacagggtttcaccatactggccaggctggttttgaactcctgaccttgtaatctgcccgccttggcctcctaaagtgctgggattacaggtgtgagccactgcgcccagccacaatcaaacattttagtagctctaatacttgtagttagacatttggctcttaaaatagttaggtgaaaatataaattttgtggccagcagaatgcattattttaaaattgttacaatttaactactttctctttctctttctctctctctctctctctggtaaaaacgttaacctctgctagtgatgaccaaacctggtaaagattgtaaagtgggaaaaattggattgtaggatccttatatcttttctctcttttaattatagttccactctgttcttcctttgtatttcagcattttttccttaggcattagtattcttttttttttttttttcttttgagatggagtcttgctctgtggcccaggctggagtgcaatggcccgatctctgctcactgcaacctccggctcccgggttcaagcgattcttccgcctcagcctcctgagtagctgggattacaggcctgcgccaccacacctggctaatttttgtatttttagtagagatggggtttcaccatgttggccaggctggtctcaaactctggacctcaggcgatccgcctgcctcagcaggcattaagtattctgactccagttttctcccctcccttcattctttcttgagcaaatttccacacctttttattctctctgatctttctctgcactgtctccattattttgctctttccatttgctagaatgcttctcttaaataattttgtcaataaatctgcttatgatgttttaaaatgccatcctgaatagcatattaattatacaattatgacatacaatgaaataaatactatgcattaataagctggagttttagcatgcttaaccattgaaaagattgtgattaccttgtacctcaaattaattaaaaatataattttattttttgaaataatacagaatttatatacatgcttaaattaaaattgtttcttttgagaggttctgattgttaaattttaggtatgttaatttgcagggttgaatttttagattatttggttgttcactggcttggctgctgtcctaaattagcttggcttgctactgacccaatgctaagcagtttacacatatttgaaccttgcaacaatcctgtgaagtaagattatcagcttcagattacagatgcagaaactgcagttcagaaaattaactttccaaattttcacacctaataagtggcagtagtgtaataagattcaacctgagacttcatggctcatgattttaatcttttcatatgcttaatgaccaatcaacaggctcttggtgtcttaatttaaaggctaatagtttatcctgaggtactgacttgcatttgacactatttacactcatctgtctggctgtttgtccagtacaatcttctagttccactggccttgcttgctctacctgtacactgaacactctcaaaaccagacccactgcatttgctggattgtgtctacacttatgctctcccttcagcctgaaatggagcttacagtaacaatctattgtatacaattactttcaaaagaaaaaatggtatactgatgggtccagaaaaagtggtttcatctggcgatacgggggtctaactttgcctcatgtgatcttgtaatcagttccttgtttttaagctctgaacttcatacttccttctgaactttcagaggaacccagcacctccaaaacttgagacataccaggttcctaaggagaaaatggattctccttaggaaaatctattttctcctccacaagctcctcctccccacttttaagtcatattccacagattcatcttctttctattctttcatttggtttcttttcttttcctgttctctttatccttgtaggatttttaccacgacaaccgccctctttgattctctttcagtggagtttctttaaggagaagaatgaatgtggctattcaatttgtcatattttactggaattctaagatttttttttttttttaaagtagaagatactcagcctggaattaaaatcgtggactttggagtcagattcccctccttgttcaagttgtggcacagagataaaatgatcgtatttgcacagtatcctggagtgagtgacaggattagagtgggttttcccctagccctccaccttgaggtgtcagtaaattgtatcacggcatatctgtaattcaaagcatctgggctttgaaatactgggcatccataaagtttgaatcctgactgtttcacttgctagctgcgtggccttgggcaagtcgatctatctctatactagctccatttgtaaacatgggattatgattcccacttcttggtactttcatgagaattacaggagctaacatttgtttaaagtgcccagtataatgtgaacacatgctaggtgccaataataaatctgtcgttctggaaggatgaagaggttaaatggctttgtaactttctctggatttaaatggtgactgtgtctttggccattcgacattatttgatttgagacctttggaaggactaaagtagactgcagatgtcagggaaaagtctagtgccttgcctctcagtggaaagggaggtggttatttaaagaaatattctctgttttgcattgcacttacctctgttctgtttagcctttatctccacattattcttttcctgcagaatcatttgtttacggattctcaagttatgatccttcccaaggtcaggggcatgccactatttctcacctcagatttggaaatacgtatctttacatttaaaactgcaaatactgtcacaccaagacagaatgtgtttggcataatattaaggcaaaagattgcatctgaatctcgctaaagcatgaataatascggagcttgacgaatgttaaacctagacagtactatataccacctttctttttacattttcccagtttcctcttttgattcatctttacttacttcctatttttgttttttgtttatttgtttgttttgttttctcattagaaaagccacagaaactccaagcaggcaaattagaagggaggcaatgcaacaagtcctatctgttctctgtctagatcacatgcggagtctggtcagcaggtgaatccgcatcccagtggggtcaccttccctgtgacctgtcaatcaccccaagaagcacttcccaatttgtctggcacaacctccttccactcctcctaccctctcagtggtcaggaaatcccggagcagtccttgccctggagctgcttgtgtttttagtaaccagggactgagctgattttgaaaaatcaatcaatcaataaataacaatcaaagagccttgcctcaacgcaccgagttgctggtttcctgcaggtcagaggcgatgccacctccaccaacgaccttccaaagattaaaccagccgtgtacaaactgctggattgaaaattgagagatgggccgttggcctcctcctaggagtacttgtgtgttgaaatcggaaggacgttctggagtttgagcgcgatttttcccggaaggctgcggggttggaagtgcatgttggggtttggatctcgtgcagcagcgcaactaacctgctgcaacggcgctgtgacacccctgtcccggggcccccactttagcctgttgcttctctggtcgctccaggtcggtttttcccggcgactctagtgtggcttccaaacttctgggctctgggctcacttcggaatttgcccccgccccctactcccttccctcaggccccaggaagttgcaagagtaccatttgtcgcacactcggggaccgcgggtggccggaggagatgaaaccgtcttggctgcagtgtcgtaaagtcaccagcgccggggggctcggagggcccttgcctgggtcctctccggcccggggagccggtgcggccctcagggctttagtggtcccgggcccgcggggcggtctcgggggccggggatgcagggcactgtcctccggcagtggcagcgagtacaagacccacttcgcagcctcggtgaccgaccccgagaggttctggggcaaagctgccgagcagatcagctggtacaagccctggaccaaaacgctggagaacaaacactcgccctctaccaggtggtgagtgacttctgtgccaaccctgatcccccatccctggtaactttttgggcgccaggacctccctgggacctggaatctggcattctatcacgaaagaaaattgaaactggagatgtgttcagacccctcaattcgtgtttcatttcaatttcatagtcagttctcttgccttctgctcttgagagaccctgttacctattgtgaacccagtgtcccataaacgggagatttacctgactggsaaggttctgctttggcagtgggaatagtaagaaaactaaaacaagatcctgcctccagggaccgcacagtctagtaagggagatactaggtaaacaaagcaagcggtacaagaaactagggaattataactaagtatcctcctactatggggagggagggttaagaaaagacttcaataaaatcgcaccccataagggtttggaaggatgggtatgtcttctcgaagtcgacaaggccctaattatcaaagttctagaggtgaacaacagcttgaactgtgactgagacagtgactgccaatgattgtgttggctggagaggtgggaggggaagtggtgagtcaggggctgggtccggaagggatttatgtactgtgctaagtagcttggatcagatccataggcctgttgtgtatatgaagctgcagtatggggtacccagaaagaatacagatagatataggccaggtgatgttagaagtcatggtaggagtaaagtcttccacctggagttggaattataagaagttataagcatgattttttttgcgttacaacaaacgcagacacattgtagaataaatatcaagcttgctaagatactgagggtgaagcacagtcagtgatactcttagagtgtggctccttatgtgtctgccctctgggggtgtgattgctctcatctgccagccattagagaggatgtttcctgtaaaagtttgaaaaacactgctcagcaatgagatgaggggaatgatatggtcaggtttgcagtggacgaatggctctgtggtcagagcaagaaatctggaatggaattggctagagcctgttctgtgtctccaccatgcccagtcctctcaaaagtgtgtggggatgacatggtgttccctttagaatctgagcaccttgccccttcctatcaattattttttcaatagtatttgatcggtcctcttttctgtgccagacagtgaacaagacactgggtgttcaacaatgagtaaaacctagtccctgctttctagaagtcataaagattaaaagcatggactctggggccagactacctggtctgagtttggcttctcacagttactgactgtgtgttcacagtcaagtgacttaatctctctgtgtttcactttcctgaaatgcaaatatggaaataattggaggcttaacttagtaaaggatgaagactatgtctttatacactagaccctatacatgttagaggaagaatagctctctttgtattctcrgaccataattatcttaggagcaggaaactctcctagtattcctcagatgaaagcacagagattattgcatcactgtttctcaaagttctgtgtacaaatatctgtcataaaatatggtactataaatgattttatgtggccatctccattataaaactaatgtgcagagaattcagttaagaagccacaggtatattctaaatgaaaaacagtgagggccagacctaaggcagtggcaataagaatggaggagaaaggacagattggagtgattcgagaggacaattagggatcagcaaaggcccaggagagagctttggaagtgagtgtcaatgtcccagcaagtagagcttaagaccaggagatttccttttcaataatttgctttttctttgtaatatctagttgcttgtctacatttttttaaatggtgtgtataagatgtgtttaatgagaaattttgtgaaagggtcactatatttttatagatcacaatttgataacaccgtatctgaattctttatcttttcagtcttgaactcrtgcccagaaaatcaaagtgaagaagtgataaaactttgactctatttatttyagcagtgcgattcaatcttacaagaattctggttgggcaagcagggttgggagggaagtagacgtaggagaccaatcttaaatttcagttagtcagtagtttcaatttgaatctatgactgcattggatacctaaatgaagatagtcctgattggttagcaaatttccacaaagccaaacagaagggcagactgaatttacttttattttgtttggctttatatccgcaagatctaaggcagagctggcatataaatttttaaagtgagagtcaactaactggatacatagctttgatgatttttgttgctataaaacaagacacctctttgggaggtgataagtggatttaggcacaatttggtgtgaaggagctttacttactttctttgaagctgggatctggagaagggagatattracagccaagtgcttaagcaaaacaaggcgagattgctatagctaattgttctctcctctgtggagctggcatatgtgtagtcacagtctctgatgccctttggcttcccagaggcaagagsgattcttcattataagcttgtctgtttgttgttcacaaaagtaaactcccctcagaacccacaggcttatcaaaagtctcagcatataaatagtattgcatattagctttcacaatgacataagctgtgcaatattctatgcatgcagtaatatagacatggagaataaatctttaagggcgatatatggaagggaacttccattgtagtgaatgactctattaaatgcatttccagtcctgtaatttctaagaccttcaaaaaacaaatccaaattacgggtaggtgctttaggggtttatacgtaattgcttctcctcacagtttggtggttactccatattgttaacacctggctctttgggtaataaagtctctattagagagacttcagtggagaactgcaatcatagtaatttcttcagtcctggaacaacaaagtggatgtttctggttattttctccggatagacatcctgctgcctgtcctgaaattgaaatccagctgccactctctgaaggattagtcaattcacttttctattatatattgtggttgactctctgggccatcaatttatctctttctatggaagcattgcaatccaattttagtttacttttatttaaacaacattcaatgataggattctcatataccatttgtttagaaatcaatatgtattaacagtgactataaaccaaaaaggaaaagactaactaaatgcagattattagaaaataacttaagcttggctaacatttctgtagtcaaratactgtgggtttctcaacatgcaggatctgaattccttactagctgagattaaggttgtttaatcctgccaagtcttaaaatggcttttaagaattaaaggacatcaatcattcacccactgcatgtacagtacagagaaaatgatgaaagagatagtgaaggaactcaccacacagcagcgtgaaagacatgcattaaattaytacaaaagagactaattttaaattttagatgcaggggtacatgtgcaggtttgttatatggacatattgtgtgatgttaagatttgggcttccattgaactcatcacccagatagtaaacacggtacctggtaggttttygaccctggcctcctctctccttccttgccttttggaatccccagtgtctattgttcccatctttatatctgtatgtctccagtgtttagctcccacttataagtgagaacatgcatatctggttttcaacatgatgaacactatttagagttgcagtagatgctaggtaatccagcctttattgggggatatgatactgtcttctttagaaggatcatgagaggggtctagaggaaatgatgtttaaactgagatcaaaatgagtaggagttagacrtgtgagaagtggggaggaacattccagggaaagaaaatagcatatgcaaaggccatgaggtagacatgtttagtaagttccagaaacttaaagaaggtttactcggttgggacttaagaaatgacagaaaattatcttgagatggaaggagagagccatatcgtgaatggtcttttgagttatgttaaggatttttaaattttttcctggcatataatacctgtcaggtaatacatgaccaaaatgtaaatttcctattccttcttcttcactgggtcaatacaggcttgagttcaaccgtagctttgccgcttactctgagaaagcttcaatacctttatttgcaaaattagaatcatgacggtatctatttctaaggattaaattgggtgagaraagcttgtaaagtgcctaggactgtccctgacacatacaactagatatgattatctttggaatatgaaagaaatactcccrtgagctaatgtggtccaataagttttgaggggaagcggtagcatttagagtgaatcttaaagtaggacttaggaggaaagtcatttatgttcagggaacaagatgacaaaaacatagaggtaagaaaagccaagtgtccttagaggatagttatagtagaccagctggcttttagtggcttgtctgagttgctgggacttactttcagaaaatagtttcagcctgcttttaaaaggcttggagtagcaagctaaggcatttgcatttacttcttaggtcacagcagggctgaaagcctgcaggtaggctttgtttgacctacaagttttgtttgtttaatttgttggcatttaaatattggaatataaaaatctaaatttcctgtaaaaaattcagcttttggtcttttttttttttcttttgagacggagtctcactctgtcacccagcctggagtgcaatggcatgatctctgctcactgcaacctccatctccccgcttcaaccatttctcctgcctcagcctcccaagtaactgggattacagatgtgcaccaccacacccaactgatttttgtacttttttttagtagatttggggtttcaccatgttggccaggctagtctcgaactcctgacctcgtgatccgctcacctcggcctcccaaagtgctgggattacaggcatgagccaccgtgcctggcccttggtctcctctttaaagaagaaaaaatgggcagggcgcagcagctcacgcatgtaatctcagcactttgggaggctgaggcaggcagatgacgacgtcaggagatccagaccatcctggccaacatggtgaaaccccatatctactaaaaatacaaaaattagctggatgtggtggcacacaccggtaatcctagctacttgggagactgaggcaggaraatcgcttgatctagggagtcagagccaagattgtgccactgcactccagcctggtgacagagtgagactctgtctcaaaaaaacaaacaagaacaacaacaaaaacccggaatgtctgtcggcgatgggtcagtattcctgcacagcaacactcggctggaactgagcagctgctgatcctttaaatggtgcatgtgcttgtttgttattcactgtcctcacccctattgcattatactttgcctgtcccagccgttaacttttccattgtgatcatttttgtttgcagtgcctcgtaagrcagtaatgatccatggaaacattttgttaagaaggtgataggatgaaagtattatcagaagccaagtttgacttcagatttcaatatttcttggtaggttgggaaatgagggatattgggaaacatggagtaatgagaacataaaataatgtgactaatgaactagggtaatagcaggaggtgtagaaagagaggaacttcaggaataaaaattaaattacacatagtgactttttggcagcgggatgcagggaagtaaagacatggtaactgtaagaatctgacttaaatgtccagatgaggaattgatggggcaattaaagttacgaggctgaaaactgggagagaacttgatgtagaattatagattttagtataaatcttaaagaggtgagaggtagaagcttatgaaagttgaagtgaaagagagaaagaaagggaagagaagaggaaaatagtaaggactgaactttgggaaaaagtgggagaaaaaaaaactatggaaatggatgagacattcaaagaaagaggaaaagaaagagcaagatattctagtgtcatgcattgtaaaggagagaaaagataaaaatagtggtcaagggctctagagatgctttgaggctattgaaaatcaaaaaaatatctgctgtgactcagagattcttgatgactttctataatatgatatcaatggtgagataagggccaaagccagaatagcacattacagagtgaactggtataggcaaaaacattccatgaggatattcgacagtgacaggaagatgaaacaggataatatatggcagtatggtggtatctgggtcaagtaaaataagtttcttcctcattccttatttcctctcctccctttaagaagaaatctatgtttaaatgcagaagtgaagaaattatgaaataggaatgaagggaattttgcttgttttgaagcctactgctcaacaggactccttgtttttgcaagttgaactttgtgtggtttcttatgttaattttttgcttttgctgctacaagttactgaaagaaacaggttgcaaaagtctcagaattggtataaagagtactcagtagatctgtttgttctttttaaatactacagtgattctagtgagctaaatatctcaatatttgtttgtgagtctgacagggaggataaggaagcagctgaaaagggaaaagataatgaatatttgttgagtcctttctctgaactatcaactatacagtagagtcacatatttccatttattccttccccagatgctgcaaagttagtattatcatgccttttctacatatgagggaattgaatcttaaggccacacagctagttagcagaggctagacctgggttagtattaatagctccagtggctaagcccagaatcttttcctccaaatatcaagggaactgttccgaaggcaggttgccaaatcttggccaacctgaaaaagatttttggctactaaattgaaggagaccaaagagatatgaattaaatgcaaaaggtagtttctgaatattttcaccataattgatatttttgaggacaagtaagaagccagaacaggatttcaggattggatggtggtaatgtgtcaatattagtttcctgaagttgatggttatagtatcgttctctagaagaatgtccttatttataacaattacatattaaattattctagggttcttgggcatcatgtcagtaaatgtttcaaagggaaaaaaaaagtactttatcttgtaatcgcaaattttctgtgagtttgagattgcttcaaaggaaaataaatacaaatataatggggattttatgtatccagaaagcaatttaatccccctattgaactttggctctttggcaaacaaatgctcagctacattaaactgtttgggaaattcagtatttgtcagatatttttaaaattacatttaattctggtttgaaggtgagagtgttatataaagaggaagaatttttctccttttgacaaactctaaattaaatgaatttattcatagcgttgtacacagtaaaggtatatttaaaatataaaatcatcattattttatagatttaaaaatattttaagaaggtatctgcttggcatgaaaaattgcctgttagaaataaggcctctcaaaataacctcatcaagaaagaccagttttaaaagatgggccttattttatattctgaaggtcagcagcttggtactgtgccgtatctaattttctcagcctgtcatgctgctgaaccttcaggacagaacagagtgaactacaggaatgctgcaattacataagcaaggatggattgcctggcaaatggcgcaatcaatgaacaatggaaattcaatcggctgtgactgatcaactactaggtgttgggggaaaatccacactcttatcaccgcctgaaaggtggcttacttttcttttgtcatgccacatatagtattagttgaaaggacaaaaaaaatccagtggttgaagttgtttgcttgttcttcttcttctttttatttttttttattctactttcataagcaacaagctgcaactccatgagggagatcattgctttccactgtggtgtgacatttgtaagaaaaatgtgtaggaggctaatgaatctttgcaattatatatatgaatgtaataacctctctaaattacagtttcaagtatatgtgaatgtggagctcaaatcctttatctaaactacgtggatagggaacttgttatattaaaggtattaattatatttgtttttgtcagtgttttagttgaatgaggtaaggaacagtgcatagaaaggataggtattatttttataatatcttaggaaaattaaaatttgtgaattttgagtttgaaggagtccaattggaaatacgaggatagtaaaaaacagaaggtctttcaaatactaaattagagagggacagagtttaattatatggctttaataatttaaaacattaattgccttaagagggaggaaagcaattaaagtctgtaggtctttgacttatgacctgactctggacaataggaataccttctcttaaggtgtttatggtagaataacaacacttgccaagtataatctttcaaggtgtcattgctaagtggatgcagcagttaagtaaaataaatttggtaagatgaagaagaaggagcaggagaagaagaagagcaggaggaggaggaaggaggaaagaggaagagaagaagaagaaaagaaggaggaagaaaaagaatgcttaatttctactgtagatctggccagtatagatatctgtagaaaaatttagtaagactaaaaaaaaaattagtcactccgtattattgtccatttgctaaataactttaatctaatgagtgcatgggagcttagaaaagtccacttttgcgctaatctcactttgcattctctccatacattttttcttattttcatagaattccattgattttcaattgagaggcaagtatttttctataataaaccacaaatacctagactgtgccttcctctaactctccctcccaactctccctccttaagtacagatgaaatttgccactcttatcaatgggatttgttggataccctaattttggtggttaggaggaaaaagtattgagaattagttagtggagaaaacaaactgatttctggttcaaaatcttggctctactctttgaacagtatcttggtccaaataattataatacggaagaattataaaatgcatactgtgatgggtattactattttttgtgttgtttcttttctcgtctgttctcttctgctaatatgtaggaagattggtcttccccacatatacgtgattatgcgattagctttggccactgcaataagaggagcaaggcttttcacttagttaattgccagagcttcaattcttagttctttctcatctaccatggccatttggaagtacatgtagaatagaagcagtttggattgctaagcaaaaacgtatagatgacaatgttttggggagtctacctgaacccacaatggartggcgtgagtgagaaataaacatttatttttgcaagttactgagattttgcaatcgttaccrtatggcataatccagcctgtccttactgattgaggggtaaataataactttatgactgttgggataatttagtctgctaaagtacataaacattgtyaggtatatcataaaatagctaacctttttattatctgttayyataaaaacagctgttatgaaaacagctaacaactaagctttttattgtctccatagtatgcgctagatacaatactaagtgttttaatttgtttaatatttataacaactctgtgaggcagggccaatttttattcttgtttaaagggtttggaaatacagtttcttaagaaacttgcctaaacttataaaactagtaaatagcagagctaagatttcaacccaggctggctgaatttagcatctgtrctcctaaatatattctattgcttgttgaaaatagtctcaattaattttagatttttaaaaattttttaactcttctcctctgaaaccgtttaaagtttttacttttctttttaaatagtgatataagaagagtttttaaagtttgggtctacatctcaaaaacattctagatatggaataaaaartagctgttctttgaaaaaataaacttttaattttttattgtgtatgacagtcctaaaggtgggaggaagggagctttaaatgagttgacagcttctttagaaatgtttcctggacaatagaaagcaatattaatctcttccttaaaactactctgttgattttctggcttaaggaaaatctataatgaccryattattcattgcttatagtatgctttaatgttatttttataagaacatgataaatagcctaattaatttgtctaattatgaacacttggaaatttactcctccaacctctcaataaaaaaataggatttctttatatgttaagttgttggttttatttacttttaaatacgttgatgtgyactatttctttttatttttctttcattcttttttatcttgatcctaattcccttctgcattttcaagcagaagatatgcaggtggagaaaccttgattaatggcatatgttaagtgcagagatatatttcttggaaattgcattgcaactggctcccttagttctaataatatcccattttttaggaatccagtgcaaggtcaatgagttgtgtctctcacctgtgttattccatagatattgccaaactttggaaaacaaatgatctaaaaatgttaaatgcttcctttgagtgtttatgggatgagtcaaaaatatatgtgsagagtctgtaatagaatgagaaggaaactaacatgtgattattctctagcttgttactgagtcattcctttctgtaacctgatgtattatcgtcaataatgataatggtgatagtaataataacaaaacaatgacaatggcaaagactatagtactgctgttttggtactaattatgaagaatttgatttgtgttgggccctatgctaatcactatatgtatattatctctttgaatcttcccaacaactcttataatgcatttttataatactgtaaacaaatgcacagaaagataagtggcttgtccgaagttatacagtggtggacttagttttttcaacccagttgggtcacactgtagagcctaatttcagttataagttgtaattatgctctctaccttctgttttacatagcagaacctagagagtgaaaaagcatgagagcaatgtagcattcttaaaaatgttaatcgggatttaacttccctttgctttatttgttctctgtgtttctgtgtgttttccactctcctcttatcttagagaaatgtaagtcctcactgttttcccagagccaacttgcacatgtctttttgatttcgtcgcctttcaatgtctctagggattttatcttaaaacctttagtggttctttcctaaaaagcatttcaatcttgttttcttttaagcaaatttggcaaaaatgctcaatgctcatctacattttgtcacttcacatctattatgtgagctcatgctctattgatacttctaccaataatttgacacatcaccactcagtaataggagagtagggttcaggtctaaattacatttgtgatcttcgcagcagaatgcacaaagccttctgtatatatcagttgaactgrcattaaaaacttcaccatatacagatttaccttctaatccatctcctaaatctgattttttatataaattgcaggtagatactacctgaatcatctatccaatcagaacctcaaataatccacaaatcctctatcaaggaaccaaagagtttgaagttttgtcatctaagctttgggtctaagctttattttgaggcagttggcttcctttgcctctccttagctcattcattgatccttaagctgtagtagaggatattttataatccatgggtttccatttatcaagacaaatacatatatactgcaagtagggaaggtagggaaatacttcacctatgtgggggattggttccagaacaccacccactccctgcagataccaaaatctgcagatgctcaaatcccttatataaaatagtgtaatatttgcatataacctatgcacatgctcccatatactttaaataatctttagattacttgtaatacctaaaacaattaagtgctatgtaaataattggtatactgtatttttcaaatttgtattttttaattattatattgttatttaaaattaatttttctcaaatatttttgattcacggttggttgaatctgtgcatgtgtaacctgtggatatggagggctgactgttcctatatgagaatgaactggaaaagttgcctcttaggcacatatgagattccaaggatctcagattaagagttgggttgatattatgttatcagattgtcatcttttagtaaatatgttaagaaaattaaaatcacagaatgaaaaagtgatagcaatcatataaaaatgttgaattagaatgcatttatgttatcataaattatgataaaattttaatatattagagtaaaagcctatcttgatctgttaaaagcttgaattttagaaaaaatataaaactgattttattattatttaaaaatattgggtcttgactgctcaagatctcctacatatgtctagcatgagcatcgttttacttcgctagaatatttcaagagcagtctgaaaatgtaatttgtaattacaggcttagtagacctaatttgatgaaattttctcttaccttggtttacttaatttataaaaatattaattttcaagtttatcattagtaaaaaatactttaataaggagggttttaaaaaattaaatatttcaaagacagtatttgatggaaatcgtataataccactcttagatcaaaatctcttaaattctaaaagatgattttactctaagtgtgcatacctgtgtatgtgtatgttaaaatgttacaggatacaaaacatgttggtacataataacagcatcaccttttaccatagtaatttaacttcttaaaagcatcctgagttctcaagaatttaaggaaagttaagtaacttgctaatgctcacttgccatgcagagatagcagatctaggatgaaaaaacagacttactatgcttgagagtgtatcagtttctcattgtgtcacgtttcctccccaattaatcctatcttatcctcataataccagtgttacagatttaaaaacgagctgtgcatacataaatatatacatacacatatatgtttgttagccttttatatttataaaagtgggttttattttgttttttagccctggagtttattcatttgttaatgcatttgtttcttctttattttgttcattcatccaatatttactgaatgacctctatggaccaggcactattccaggtgcaagatgagagtccagatagagtttaactctaaaaaacaatgttacacatcaagcgaggaaaaagggcattttgcttatagtaaaatagcattcgttttcctgttcaataaaagaagagtaataacaagtgatatggattatctagttattattttctgaaaataagagtaacaaaatccattttattctacaatcagttctactctgaattgcctttgattgttgaggtgtgaaaaactagagcacatagcgttccattttggtgaacagtggccattttctaactaatgaatcctttaatagattaaaaaaacaactaattttaattttatccctttgtgcagcctctcattttttgttggaggtgaaaacaagcaggaaggcaagggaaagacaaatcagaaaagagagaataaagggagataatgggtttcttagcaccagctagataatgagatcttggataattgagcaggctgcactgtattcaagtttcaaattatcaaaatgttaatgggaaacgtttcatctaggaatgtggttggagatagtggggtaattgacaaaaatataataaagatgtacttcgtaacattgttctcagattattttgagtataaggctaggaaaaaaaggataaaagttttatgttttgcttagcattaaagttatgtccaatggtgtctatttagtgtagttggatttatctttgaggctatgtctaggttatgtttgtgtctgtgtgtttaaggttttttttgggtgcaaggtataggttggacattagatggagatgtagtgtgatttaattatcaagggagaggttttataaatgcaaggcctaggattgagacttatgtttaaattactttcactggcatttatttattcagaaataattctgagccagacgcagtggctcacggctgtaatcctagcactttgtgaggccraggtaagcggatcaattggggtcaggagttcgagaccatactgaccaacatggtgagaccccatctctactgaaaaatacaaaaaaattagacaggcatggtggctcatgcctgttgtctcagctactcaggaggctgaggcaggagaatcgcttgaacctgggagatggaggttgcagtgagccgagactgcaccaatgcacactccagcctggatgacagagcgacactctgtccccacygccaccaaaaaaaaaaaaagaattctgattaaagtgtaggtttatgccttttttcccactgtaaaaataggtattactttacattttaattaggtaaatgcaggaaagtcaaatatcttgctatattaggtatagttcccttcagtgttttttttttggaaataattatagacttacaagaagttgcaaaaataatgcaaagagttcatttgtrtccataatccagcttcccccagtaataacatcttacataactatagtacattattaaaatcaaaattgtcattggcataatgcaatgaactaagctataggtcttattcagattcaccagtttttgcacttatttatttatattttatrtgtagatgttatgcctttaaaaaatcaagaatctatgtctgtcaatctgtttgactccctggatctctatttctgttcttatagagaaatggaattgtactatccatccatattatttggtagctcattttttttcacttgtaagaagtgttttttccatttttctaattcattatttttaatgtatacagaatatttaacatattgggtgaatatataaatatttcctaatcctttcatattggcatttagatggtttctctttatttgcttttataaatcggcagatagacttgcatctttgggcttggcattccaaggatatatttttttttcctctctctctctctctgtctctctststgtgtgtgtgtgtgtgtgtgtgtgtktttctctttccttccttctggtaaattcttagcagatttcaatgtatattatccagccattctccaaaaaaataataaatattgtaagttcccaccatctttttccttatgaaatatttgaagaataaagataataacttagaggacactcaacactgaattctgtgaaatcttagtattttgtcacattagtttcagatctttttatcataagcagtaaaacattacagacacaattgacgctccctgtgtatctctcccaattacatggtatttacagaaacaatcttagaataatttgtaaggctcgatggaaaggaaaagttctttttggacattctcaaatgattgattgtattccctctttttaataggagctcatattcaacatctctccatggacatgagctaagtgttgagcagaatgagttaatgaatatgctctctgccttctgggagcctcgactgtagaggagcatttcatcagaacattgcagcatgttgttttgcatgagttataagctgaaagagaaagaaatggatagttaagataaagatgtaatatgaaaaaatgaaaaaatgtatagtcctaaagttctcaggtttagaaaacattaatttcaatccttgtctattgctctcctgtcttcctcccatttctccttaaccagagcaacattaacaccaggtcagctagttggggtcctcctcccctgcatcgtgctgctgctgctctttctctttcttctccttctcctcatttccttctttgttcatcatttcattattgttatcatcaggaatacatgcttctgttttttccaacaaatactagctgtcattaggcagagtacaccctccattccactccctcctggttctctggataactctgaggtttcttcaaagttacccacttgtggccctgggggcattctggattgtaggtctggtttctaggaacctgctctcatttggagtttggttctttgcmagctcatcatgacatttctgaattggttgactggggaccactgttcctaagagagtccctaaagtgttatgaaaaggactgactgatgaagcatgctttcctttaaaaactctacttttaagtttatgttattagcactgtatttgaatttaatatacttatgctttgaaacctaaatgtttttatcttttactttgaaccttaatattaatctaattatcattttacattttctacctttttagattaaaccaaatcctatgtccttttacttaacttattggtttttcctgcattttcctctagaatacaaataaacaagataaaatgtatccttaacgtctttgaatttactgtcaggcatgactcacaaccggagaatctttaagatcattcattcatgtcttttcactgacagtggattcagttcagataacaggcattgatttcctgaaagcttttctttctattctttttcctgtgggctgcatttctcaccactggcaattcacctagctttaatccgagatgatctggcaaggcggaagatgtctatgttgtcctttcatgtcgagatgggacaatctggctagagatggtgtgatggggccagattctgagtatacatactcatgtaggaaggatcggtgggactaaggaatgcctctgtctttacatcaggtttctctgttaaaataattatctgtgctatggagagatgtgctttccargtactttcacaaaaacaatatccctagtggtaaattaacataaggctattattctgttccaagtaagcaattacccaatttggagagtttcctggaacagtcagttgatacttcccaaaggccaagtatctgtaattcagatgggatatcactgtgtgaataaagcaaaatgttgccctcttaaaaatacttaaagcctgctctgtttctgtgcaacagtagtcttttgagctagtcattgtttttgctgagcactgactatttaccttataagagtctttttattatttgtcagaagagaaagtgtcaggagagaatttgtaaggagaatgtgtcaggagagtatattacatttcacatttattcacacttacaagcttttattttaaaataatcattgagcatttgttgtgtgccattaatgaactagcatgtggtccctgcctacagaaagcagagagtctgggaggacacaaaagtacacaaaaaaacatggatacttaaaagcggacatgcacttgtaccattttctttttcttcttttgktattattatactttaagttctgggatacatgcacagaaaatgcaggcttgttacataggtatacatgtgccatgtggtttgctgcaccgatcaaccggtcatctacattaggtatttctcctaacgctatccctccccttgccccccacccmctgacaggccccagtgcgtgatgttcccctccctgtgcccatatgttctcattgttctacttccacttatgagtgagaacatgtggtgtttggttttctgttcctgtgttagttgctgagaatgatggtttccagcttcatccatgtccctgcaaaggacatgaactcatccttttttatggctgcatggtattccatggtgtatatgtgccacattttctttatccagtctatcactgatggacatttgggttggttccaagtcttttctattgtgaaaagtgctgcagtgaacatatgtgtacatgtgtctttatggtagaaatttaaagttgtttaatttaattaaactttaaaaatcagtttctcagttgcattagccaagtgtggctattgagcactcatatgatggctactgtggtggagaaactaaattttaaattttattgtattttagttaatttaaatttaaatttagttagacacatgtggctagtcgttaccctactgagcagcagagacatagaacatttccattgtcacagaaattactagacagagctgctctagagaagggagtgggaatgcttttcttttcaggaccagattgaatatttttggctttgcaggccagaccagttccattgcaatctctcagttctgctgttgtagagcaagaacagccacagagaatacacataaatcagttatatgttccaataatgttttctttgcacaaacacatagtggaccagtttgacatgtgagttgtagtttgctgaccccrgccctaaaactttggtttcttttgtattcgttttccttactcttttcctgtttgcctctaaaattttcctttacagtattccatatttctcaaacacctccctgcttccatctttgttatcacaacacacttcattgtttcaaaacactataaatgatcaccctccacttgtgtcctgctcctgcccattctacctgtgaccatagagctatgccctcctaactcactttagccagtctgctcatctgttaatgtgtgtaataatagtaattgtctgatgtggttattgaaaggagctaatgaaatgtgtataaaattacgatcgtggaaggcatgaacattctcacattaacacattaacacagaatagttgagactcagagcccaactaacactaataccagtgtgtcactcattgtgtgtggacctcaggtaggaaacttgtctctacctcagtttcctcatatgtaaaatgaggattattggatgtagtaggtccttgaataacggcattttgttcaactttgttttgttgtaatattgaagtggaaaaaaaaaagaacaattcttgggcagcgccactgtctgtgtgtgttgtttgcatgttctacccatgtatgggtgggattattccgggtactctggtttcctttcacatcctaaagatgtgcacataaggtgaattggcatatctaaatggtcccagtatgagagagagagagagagagagagwgwrtgtgtgtgtgtgtgtgtgtgtgtgwgactgtgccctgcgataggatggtgtcctgtctggggctggttcctgccctgtcccctgagttgctgagataggctccagccgcccacaaccctgagctgaataattgggtaaataatgctcttagtggttgttatttatcttttttaaatgtatggatagctcatatttatttcagtgtttactattagaagtgttttgggtccttatttagaaatttgatgatgtttttgtgaccagaaatatgccctaggaacttaacacttgtttatatcaattagcctgtggtgaaattagtttccttgtatgtcattttgcttaaagtctccatttccaaaatcctattgatgatgttaaatgaagacctactgtatttacctcacagagtcctcatgaagattaagtgagttaatttgtgttaaatgctcatagcattgtcttgatacaattctttaaaatttttccctaaggtttatagatgaaaaaagaaagtcttaaacatgttaatttgtctgcagtcatttaaataactagcaaatgacatrgctaagattcgaactctagtctgttggcctcaaagctcaggccttaacattgtactacattccttttcacatccatcagctccttaccacattccctagtttagaattaatctctttcttattatgtgctttcatcatgcttagtttgtacctctgtcaggaaatttgccacattttgcatcttatcatagttattgcaaaccagtcttcgttttgagagtggagaacatgttcccagttataatgtttccccttccttcacagtctctggtctaatcaatagaaaattattatgaaatgtattaaatagaaacacttttgaatagaaaaattattatagttaatatttgggattctaatctgttgtagtcttcttatgagwtaatgaatttttttataaagwttatatattcacctttttttagtatatagataatcaaatgtagccttcatctttgaattgtttccaatrtgttggctttggttgattctactttagaaaaagagcctgaagttcttttgttttattgtttatttatttataaattgtgatgaagacccatgtatataggaggtcatcaaggaaataaattgtaatgttattctaagaaggaagctcataacagaaagtaaatataaacctgaacttttcagttatttaataataaatacatgcaaagtgcagaaatcagtgactgagaacacagataaagttgcaacattatgacaactaaatatggttgtgttggaggaagctttcaacagttatttcatacaaagtgcgatatggcactttttgagaatttcatattataggccacactgttaaaaatatattaagctttgttattggaatgggagaggatggtggaattgagagaaacattttagattttactaatttaactttctgtagctcagtaaccaaatttgcagattaaaagctgtccgttactctctgaaaaatggctatcattcactctgaaagaagactttttttttcagtatcagtcttattcccttttataatatttgaatagtraatacatatttaaattaaaaatttttagctctcagaaaagggaaggatggaaattggcagtgatgaaaaaattgatgggaagagaagaatcatgtaaacatttactactagccacttctggcacccagagatcaagaccatggaggacaggctccctacctcttaaaaacccttcagatatccacacacgttcactgacttagctcaatgtgtgaaccaaatacatgccccagtctcactaatttgataaacaaggccacagtcaaacatagaatgggtgaagttaacattaggaaagacagcgaagactcagggtaggctaaggtgaagaagagaacaaatcagattcaagcaagagtctctcaaagggctgagtccaggttyttatgctggatgtgagttagcaggcattaatgagcaaggggcaaggacaaatgcaaaattaccagtttttttttttttttttttttttgagatggggtcttgccatgttgcccaggctrgagtgcagtggctattcacaggtgtgattataggagaaaatagaaaattatgtaaaataagaagtccaaaaggaattttaaaagctatcttctttacagatcgctttggggaggccctcagtcctgtctctgagagcttacatgatgaargtgcatctttgacttctttacaaggacatctaacatttctgtagtgactatttatttacaggagctgagattctwcccatttcatttgccctggagtgcatccctctgcctcttaaattatgaaatacaacaatttcaaagtttatttgaatttgccgaaactgatagatcttaagaatyttatatcagtcagaatagcctaggmtatgctgcagaaataacccccaaatcttcctagtacatcatagcccaggtatttctcgctcatcctacaaattgatcttgggttattaggaagatttgccccaggccatccatcctcactcagagatataggctgacagtacagtcaacatttgggatgtcacaggcttttgtggcagggaggcagggaggaggatatgtagtaagtacccactggcttttggagactactttgcctgcattccttctcttgttaggccctgggctacagaaagcgacatggccatgcctcatttcaagtgggtatgaaagtgcaatcttacaaatgcctagaaggaaggcaaccaaaatcatgatagacagcaggaatgatgattgatagcatatctctctttgtgatctgaaggttctgtgtagccagttattattgactttttagctgcttgaggttgattctgttgagaaaataaaaggcagaagcaaaatttttrtggcccagattttagtttcataaaactgagtttagatgttgttataagtggaagaaatgcttctttttaccagaagaaaaatttaaagttatatttttacttaaatatttttatttgattataattaagctgactattaaggtaatgagtcagttaaaccaaaagctaagcaagctagaccattaaaatttatattttttatttaaaaaaatttaaatcacccattcagtatgtaaatacgtgctcaaataactcaaataacacagaagttttattacataaaaatacasactatcccttttctattactgccctccaatttttctcttacctggagtttaccactattattttcttaagcatttttccatactgcttgtgcatttatataatacaaaacatagatacacaggcaacttgctctggctgtgtaaaaagctaattttgatcattgtttcatattgatatatgtatatatcacatatacattgcattcctttaacgatgcataatatgtatttaaaatattaatagatactgattttgagccctcctaagttgctgaacaaatttatttgctcaccaacattatacgagaatgctgttttctcttcactctcactataactatgtatgatttttttaatatcaagtcagaggggcaaatgacatcttataattttaatattaattttcttgactgttaataaggttgagcatctttttttttawacttactggtcattttcattttgttttcatcagtggatatcatgctgaarttgtttgcctattggatttttaagttttttcttattaatttgtagaaacactttaaatattgcaaatatgtctttcccttgttaaatatgttgaaaatatgctctccccrtaccctggctttatattctcttctattttatgcacacgcacacacacacacacacacacacacatattctagcacatacatatatatatacacacacacacttatatacacacatgcactcatctgagtgtcaagatatcggtagttgagtgaagtacatttcagaatctgaataaagatcctttttcacttgtcagttaatggaggttttggttactaaaatccttcttcctatgagtrtttaaggaagaagaggcaatgagagtaggatttctagactttccggaagtcatatagagccttgttcctgttccacaagtcttaaatcttgtacaggatcctctatggagaaactcctcctatctcagaaaattacactctaggcccagaaaagtttgtgtgatgtctgtgcatgtgcatgggygcaggtgagggtgcaggaagcataagtgggggagggcatgtgtggcttaataatagtaaccaaagaaaccaaaattaaaactatgtttcacttttcaaattggagaagattggccacgtgcagtggctcacgcctgtaataccaccattttgggaggccgaggcgggcagatcaccaggtcaagagataaagaccatactggccagcatgttgaaaccccatttctactaaaacyaccaaaaaaaaaaaattagctgggtttgrtggtgcacacctgtagtcccagctactcaggaagctgaggcaggagaactgcttgagcctgggagacggaggttgcagtgagccgagatcacgccactgcactccagcctggcaacagagcaagactgcatctaaaaaaaaaaaaaggagaagattgagagtcatctgcattgagaggagttagatgctcatgttagattcagggagtgctgatgataatatagattaattcagtatttccagaaaacaatttgattattcaattttaatgtgcacacatgtgttagattgtgggaacgtagcctgctaatgtaattagaaagcagtgtgaccaatatttgtctgcaagaaacatcatcctaggatcatttaaaataatgacaatgttgtgaaagggaattagtaacaacacaggattaattttattattgaatagccattgaatggaatattatgccatcattaccataatttttgagaattcctcaggcccttgggaaaaactcgtaatgyagtcctcaacacagaggcaaactatgaaactacataacaagtgtgtttgtatatagaaagaataggaaatactctaaagtatattttttagtatttttacagtgagcattagttacttttataatctggggagacaaaccatttaaaacctgcccacgaatttagaaggaacagtagagagtcagcacatagaaggcattcaattgacctttactggaatgattttatttaaaatgaaataagaaacttgtcatagtagaataatcaaatctttgagctgggcagcttcttgcaggtcacttggtctagtcagtcgcagtaaaccaatctctaagcttagccaatttatattggtagattcattacctgtaactgcctctggaccatgctgatttgctatctcctgcagcagttctgtgtaacattgcctacagaacctacctcatttggatctttatattgcctcctccaaaaggtactcttgtttaaaaaaaaaattgtctaaaggtacttttaaaaaagaaaatcctaggatgttaatattttcaatattaaactactctaaagttgccaacaattgaaaaaaaattccaagttcaagttttttgagtattgtttatagaagtagtattgtatgtttgagggtttggttctgtaatcagactttcatgagcaagttgctgtgatgagtttccttgtatgtaaaatgggattaataataatacctgcttcatagggaaaggttttttaaaattaaatttgttaacatatatgatatgaagtcttggactacagtaaaagattgataaatgttatttagagacttctgttttcaagacaagacagagaaaatatacttcctgccaaatacaataaaaaacctaggatgttgtatatcaaacacacataagaagactgaaaggtagagcgaaggtcaaccagctaggaaatttggggatgtgaggaatggcatggccatgagttccctgggttttctttttttctttctttttgtaacccacactgggttcttaagaagctagcaaccgagaagcaccaataggcacagattttaaaaagccccaataaaaactttctctctgtgactacagaaccaagaaagggacagcatggcaagacagaaaacttttaggtgagtgctgtcctaatccagccaaacactccagaaaaatagtgtggcctcaatttcatccttaccagtaaagacctgctggagagtctagatttctgctcttgccaaggtgtagcaaggtgccccagacattgcctcctcccttggtggggtcagattagtttatgtggggagctgaaactttcattctggctaaggtaaggaggtaagaaggtcctcccacccagccatgtgggaggacatgaagggtatgggggagcagtcacaaagtgcccttctcctttcatctaggatgaaaggttgtaaaaacctcttgggagcttgaattattaccctgacccatcattcatgagccatcccccagctgatgtggtatcaagggaacctggagattaattgggacttatacctgtgcctggtagtaatgaggtggctccctgcccaccagcacagtgtcagagaagacctgctaaaacagaagatttaaatcagattattatttttgtttattttttaatttttatttttatagatttagaaggtacaagtacagctttgtgacatgyatatattgcatagtggtgaaatctgggcttcagcataaccatcacccaaagagcgtatgttaaatcaggttattcagtaatctgcagamccgagatgtaatataagacccgagatgtctagatatgatttactcattacacaaagatccaaaaattatgcgttatgcagaatcaggaacatttcactctgartaagaaaaacaatcaatgggtgccagcactgagatgacacagagtttggaactacctgacaagtattttaaagcggccrtcataaaagtgcttcaaggaacaattatgaacacaytcaaaacaatttttttagaaagtttccataaataagtagaaatcatcagcaaataaatgaaatatataaaaaataaccaaatggaaattttagaacttaaaaatacaataatgataatgaaaactcaggaatgggctcaacagcagaatgcagatgacagagaaaagaatcaattgaactggagcagagaaaaaaaagtaaaatcatctataaatgaatgagtgaatatgatgttgccaactataacaccagtttagacatctagacttgggtttcaggtatrgctttctccaattcctaaccacgtgccctgggtattcttcttatctctattctcttgactttaaaatggagagtaaaaacttccctagttactctgtctgggtcctaaatcctatgcttcttgaaagtttagtaacattctcattcattcattcatcaaacaaatattgagtgactaatacatggcaagtgctgtatatattctccttgtaatcttaggatctaaaacagtgtcatattcttcttgtagtctttaagattctttttaaagagtctctgcattcaggtagattacagtgtaatgaaggaaacatctgagtggagcaatgttctaagttaagctgtgtggtaagtgctatggtggagaaacatacacaggtacacagggcttttgaactacttggggagggtggtggtaaaatgaaggacagccacagaagtggaagctgactgaattcaaggaactgcaaagtttgtaatcagtacagctggagttgtaaagttggatgagtggaaatgaaacagagtagatcaatgggttttgaatgtcatctaaagcaggggtccccaaccctagggccatggactggtaccagtctgtggcctgttaggaactgggccacacagcaggaggtgagcagcaggtgactgagcaaagcttcatctgtatttatagctgctccccactgctcacattactgcctgagctccaactcctgtcagatcaggggtggcattagattctcataggaacacaagccatattgtgaactgcacatgtgaggaatctaggttgcattctccttatgagaatctaatgcctgatgatttgtcgctgtcttccatcaccccaagatgggactgtctagttacaggaaaacaagctcagggctcccactgattctacattatggtgagttgtrtaattatttcattatatgttataatgtaataataataaaaataaagtgcacaataaatgtaatgcgcttgaatcatcctgaaaccatacccttcccccaccccagttcggtgaaaacattgtctttcatgaaaccagtctctgatgccaaaaaggttggggactgctgatctagaggtatatagtttttatcttgaactttagagaaatatattaaataattttgagcactatttgaaatatttttgttgacatatttacataatatttacaatgaacaaagccattatagcagcatatggagatggcttgagtgaatggggtcaggtctaaaacagggagattaattaggatgcactcattgtaatcagtgagagaaccaaaccattacagagacaataaaggctctataagatgtgacattacatataaatgaatatggagagtgagggtacaaatctgactttggagtttctaattcaggccactggatgcaacatagttccttgaaatttagaaaacaggaggaggagcaagtttgcagttgtgatggagctgtgggggtgggggtggaggtggagtgaaatgagtataattttagacaggttattttttttaagtagagatgtcctgcagacttttggctataaggtatggagctcagaaaagaaggttagggctggagatcaaagtggaagttgaaaccagaagagtataggcatcatctagggagaaactgtagcgtgagmtaagggatgcatatggaacatgagatatcacagccaataaaagatgaagcagagaaaacaagatgcaacaaacatattgaaaaagagctggcaaagaagtaggagaagaataatgcaaataaatgacaaagtaaattctgtggaattgagggaagccccttttttgggtaaaatatcatgaacataattgaatattgatcacaaagaatggtagaatagaagtcatagataaaggaaaagagaataatgatattatcaagaaatattctagcaagtaaatagtttccctgccagaaatgttttttttttcaggtacaaatatatatatatatayatatatatatatatatatatatatatatwtatatatataaatgtttttgtgggaaattctataaaacacctttccttatttccaccacagaatgacaactttacctttttgttggtgtgttagatatttatggccacaattatactatatgwccaggaaccacaaaaatctccrtaaaatgaactattaagagtttatttccatatgtctgcaggtggtcaaggcatcagctgatctaggttgggggtggttgggagcattgcttcaagacataaatctagctggtgtgggctccctgcttctttgggctctgttcccacctgcagktgttcattcttggtgccatgttgaggagggagcagttatatctgggaggctgttctcctggagaaggtagtggtgcaggagagctagcctctgcttgcatcgtgtctgctgacattgcattagccaaagcaagtacatggatgagccccaaatcaagagagagagtctccactcatggaggaagggccgaggaaagagacaaaatacttttgctaagagtaggatgctgggaagaggtaatatttttgaacaaacatgagatcagtcacaggggaattcagaatcattatataaattaattctgtgctatgctgtaggtaatcaaatttgctattattgaaatacatagggtcatttgactttgattaaatgattcttcctcctgttgctttctgtggctattattattattattattattattattaattattattattattattattgttattttgagacagagtcttgttctgtcacccaggctggagtgcagtggcgtgatcttggctcactgcaacctccacctcctgggttcaagcagttctctgcctcagcctcccgagtagctggaatttcaggcacctgtcaccatgcctggttaattttttgtatttttagtaaagacagggtttcaccatcttggccaggttggtcttgaactyctgacctcgtgatccacccacctcagcctcccaaagtgctgggattacaggcatgagccactgagcccggcctctgtggctatgattttttaatgctgccactgtatctgtagctgcttttaatccactgcttcatttcacacagggctctttgagtgaatacctgaaagtgatactcagctatttaacaagagcttttttatttacttcaatatattttcctgttattttgcattgttactatatttggtagtctgacattggaagaaatggaccattactgtacttgcatattttattctaattcccattttactaaaaatktggcatatgtaaagccttttcttttrgaaaaatgagttatatttccttaaaaaattattccatgtatctacatggtttctgtgttttcgaaggaaaacattgatcgattaagagatgaaaagcactgaattgcaaaggctttcaaaaataaatattttatatgcatgtcccttcyttattcaaattatgaagcatttcaaacatgcagaaaagagcttatctattctttgtgaaattgtaggcatcacatttaactgaaataaaaaatacwtatagctctttcagagcagaatagaatttttcggtaagtttttctatttgcagcaggtaccaaaacttcagtcacacatctgccatttgccctttcacaatccccaatgcctctgcactgcacttacataccatttatttcatctatgtaaaaaggctgattttggtgctctataccctagttttatcctaagcaataaaatccacaaagtckccagctggaagtgtgaggtatgtatttttttagtgcacatcaaaataaatacatgcttattaaaataaaaaagtatactgtgtaccatcttaaatatctagtttacagctgtcattacttgacatagaatgcactaggaaacattgttttaaggccagctctatcaaactagaaatataataacttcattaagtgacaatatatttttaaagccatcattcacctttactttccaattatttttcaggtttgtggaaggaatgcttaacatttgttacaatgccgttgatcgtcatattgaaaatggtaaaggggataagattgctatcatctatgacagtcctgttacaaacactaaagcaacctttacctataaagaagttctggagcaggtaatatcataaactttatatatgtatatatgaattcatatagaaattacttaaatagcatacattctcattgtagagccttcaattctctaatgcattgaaatatgttgccatgcttttcttttgatacacattggaaatgaatacagatgtgttaactcatgtagacagtttttatagccttcaatttatgtttcacagtgctaaatgatgctcattttacagggagaggatggcaaatcctgagaatatgtgtcactcttcctctggtctttactcttcatccacattaccatcacctttggctgctccccagatcttgtactattgaaacagtcttctaactgccttccctgtcaytaggctctgctcatattagatgatcaccagggtgttcttcctaagaaacaacatatttctctatgccacttaaaaatctatttcttaaaaaatgctgttattcagagagtaaaatctagattgctgtggtgtctaagacactttgaaatctggtcataacattccttccaagcttcattttccaaaattcttgactatgcacacaaccctttcttttaccctagatgtcttgttattgccttagatactcctgggcctttgtagctctttgaacatgttcattcctttggcttatttgctcttttgagttctttcccatctgtgcagttcttaggtggatcatgatattaagtgatgagttatgagatttttctcttttattaacattagggtagaaataaggcctcagaagtaattataaaaagtatttgggaattgtggactgtgggaaagttattcaagctctgtggaacatttactaaaaatgatttaaagagaggtaatggtgcaaggcaggatttctcaactttggcactgttgatattttggatcagataatattttgttgtgggtgctgccatgtacatggcacgacatttagcagtatccctgcctccaccttaaagatgctggtaacacaaccccacctccctgagttgtgacgtctgcgcacatagctaatgtctgctgagtggtaagattgccactggttgagaaactgaagttgagcagagtctgtcatgctagggtttggaggcatttgctttgacatgaaggcttttaagattgtattctctccttttgctttttgaacccatttaagggttccattccatttttagaaagtttcatcaactctccctgactctttgaaatcatattctttttcatcagcaagttcttattttgccttgtaagaaatttcaagaaaggcaactcagactaaaggatcgcctttccagtcctgagttgttgcaaataagagagaagagttagaccagtttgctaggctgggtatcagcctggttgtagcaacaaattccaacctcagctgatttaaacataaaaaaagaccttatgaaaagggtagactgaagagccaggcttagaaaaatggtaaaccctaagggagaaagagcagaagtgaggagttaagaagaacccacaaattgtccaataactagactcactgccttgagtcaatcttctagattgaaagacagagtagtaacatctgtcrtgctgaacccctattgactccagtggggatggcaccaggttcaagaggccaaagaagagacccagagccccatacaaracatggggttttactggagccttacatccaggggagaggccactggyggcaggctgggcaggagaactgcacgacttgcaaaaagcatgcagtttctatagcatcttcacttagcaccatccccctaacagtctccatctggcaacttccatttaacctaaagcaaagggcctcgatcccagacgggatagggctgacatactcctcagaaataaggaatggatgtgtggattggccactcctggatttgtattccctagctcagaactctgaacacatatttgggtgtgcctgtcatacagggtctttctcagggtatggtcaagtcaagtcattgctgtcaaggcgtctatcatacagcactagttggccaaacttaggtgacttgcctaaacaaccaggcagtggggaagaaatatcttgtcctcctttgatttaatagtaggaactggggacctgtctcyctctaggatgcaaacaaggggaatttcagtctaataagaatggggttcaaatgctgggcagctcaagacagaaaaaagcaaaataatgctgcaatatatcgtttggtatttttwattggtctgtaactgaaaactgtatttttgggattaagtatacagagacagctctcacactgggatgagttagaaaggcactctgttaccaaatgagcttgttattcttacgaggctgcattccattataagagataatgtcgatttcctgaaaacctattataatctatgttttgttttaggattgcattttcatcttagaagaggtttagtctatgattaaaaatcgtgcctgtgattttggcatgttgctgcactctcatgaaaatactggcaaattcttattggtatacaaatacgtaaatttacttacatattgtaaaaacattacctatagccacatatttaatttgatacataatcaaacatcgcagtcagggaaaaagctttagagaaacctaaaataagaagaattgttgacattctcattttcttttgttggttttcaattaattaattacataagtgtatatgacaattatacacatatgttttgcttagaagcttttctgctaactcatctttcaaaccctttctgtgtttgtgctggttccctggtttcagtttagcctgacatcaaagtagttaaaaggactgtttctctcacctgctgacagcctctgattccccaggcttttcttctctaaagtactaaaggaagaactgttaggaaagagagaagcattgtgtgctactttgattacttgcttctgattccctgcggcctttattttattaagtagagaagacagagaaagaaagatttaatgggtaattccattgagaacaaacgaaaagaagtgcctttgtacattacttgttttactctcccatgtttcatttctaccagaagtttctggctagataatacttgattaaatttgtctgtatttattatttaattaatgagccaacaagacaggctaccttgtcttagtaacatgaaagatctgaaaattttacagaatgattcagaagyagaggttttctaaaactatcattttttctatagatctgaaaatattttaaataaccctttattaaggtttttgtacagagatttgggcctagttcaagatccatcattcactcaataaatatttgttttgtatgccaaaccctgataggaataagaaatacaaagtaaatgaacccatttcctattgtcaaagagataagaaaacatgtaaacaggcaatttcaatataaccgaataagggtcatgataggggttaatgttatattctgtaggaacacaagtgaaggcagccaactcagccagaggtaaatagagtctagggagatttctggaagaggtaatgcctaaaattatcccaattgcctaccctccgctagaaataatttttcctccagatatcttatggtccatgttacctgaatgttacgttctcagtgagatgttttctgaccatactaaatacaaatgttcctttccacaccacttcataaattcattttttcactttctttttaatttagcatttattactcagtatcattccttacattttatttgtctctcttttttagtgtcattttctcttctagaatctaagttccacgaaggcagtgactttgtatttgtttgcagaatggtgccttgcatgtagtgaatagttgttgaatgatgaatgagtcaatgaaagaataaatgaatgaaatactttttgaaatttccaagtgactctagcttcttttactgcaggaatgtcttagatttaaattgtaccagtaatggaattggattatctttccaagtaaattccatttctatctgtgaaggattttaatttatttacattcagcttggtagttcaagatgaatatatcctccttggatttcccacacttataactcagaagatctgcattctagaggacatgtatgtttttattgtattcttgctcttgttagctcttttcaagttagtcgttatattaagcctcagtgaaataaaaggtatgtgtaagagtgtattttatgtgtatgtwtatcttatatatatagtactagtcattttaaagtatctttattttcaccatcactaattttatgttgaatttacttctgtgtgtggcaagtgtgctctgttttttatttcaacaattatgaatttttatgtatttattcactaaataagaacgtgtcccctgaagggcatttgagcaattttcatgaatacatgtatactgggaaaattgayaaaaccaattatgtgttaaattttcctgatttaattcaaactgcaaattcctattatcttaactaaaggtaattttttgaaacataactatggcagtagttgtaaytataaaggtcaaaaaatttagaggagaaaattattctgaaatcaagggccatgtcccatgagaattcttccttccaacccctgccctgtaggatattttcttcaaagtatgtattccatctgctcagacatatgtcagagtaagataatctgacattttttcatctgtcatatcagtatttccttaagcaaacacttaagacacaaaaaccaggacttgcagaaattcagccctgtcaatggttgtctttgttcaggggaaaggatgcagtggcttttattatctgtttcctttccttaaatttcctaaataaacaataaaaccttcatttatattatggtcagtgccactaaaaagtgtgtctctgtaagttaaattaccttttccatgcttggtaaataggggaatgatgctagtatgagatagaagttatagtcgttcatgcatttcttttcctggcatgcaatttttgaacttttattgatatataatatatattcagataggagaacagatcacaagaataaattttgttagattttcacaaacagaataattccatgtaagcaacaaagaaacagaatatttccaggcccccagaagcccttgttgtgcctctatttagtcatcctcagcccctacatgatwgctattcagacatctaaaggtttacctgcttttgagctttatacaaattgagtaatacaatgtactcttttgtgtcaggattttttcactcaactttctggtgatgagtttcattcatttcattgcaagaggttgtagtttggttatttgggtaatgtctggttgggactattacaaacaatgttgctataaatatgtttgtacacaaattttgttgacaatatttatgcatttgtgttggggacgtgcttaggaatgagatgaattgttcgtagggtatgcccacgttggacatgagtagatagtgccaaacaattttccagagtggttgcactaatttatattcctatctgcaatttatgagaatgccagctgtgaaaacagtgtcgacaattccagatctttcaaattttgccctttctagtgaatgcatagtggtattgcattgtgatttaatttttttttccctgatgacaaatgaagttgaacttcttatcctgtgcttaayggacatttgtcttttattttgttttattttaagtttgccgagatgatatctcgctctatcccaggctggtctcaaactcctgggctcaagcaatcctcccgtctcagcctcccaaagtgttagaattacaggtttgagccaccacacctgaccaaatgctgatgctcttttctgaaataccattaatatcttttgtccattaatttttctattggattgttagcatgccatgttttgaagttttggagagagacattctcacaattaaagagaagaccttaccaatatttgaaaaccttaacaaaaataataaagattctttagtgagctgatggtgagttaaatgattttaggaatcaaagttgagaagacatttgcccctgtttaaaaaataattaatgttaaggtctacactctctcagtttctactggccattctttgaaagcaaatttggaaatgaaagcttgccagtagaatattatgcaacaggaagcaccagtgccggtatttaaggatctatagaagatgatgctgtgttaatgcatttattaatgttaaaatgttctagtcacatttaagtggtctgacccaaccwtatgtttctgtgagctatgttgtataatgcaagtataatgtatatattgtataatgcttgtgtacatataatgtacacaagcagaaaggcttgtatttcattttaaatagatgagtatatcctaaatactggcttaaatttttatcaaaattgtaactggaactttggtttaaagtactttacaacttactaaaatttaggttaaattttgagaggacttaatataaagaagataagcactagacaaattttaatagaaagtatagggaattattaaatgatgaaacaacagtttagtatttcctagtttccccatttattcacaattataagtgtctaaagattatttcatactcaatccaaaagagcaacaatacaaccaatcccttgaatattctcagacagatctttagaaattatattgtccatgaaatcaagaccactgttggaagtataaacttacttcttttcactcccctccataccagaaactattttaccactctttgaagtccagagcactttgcttacaccttctcctaatgtactggttcattattgcttttttaatccagttattagggtacctacatgatcttcctaccagagaaaaagctccttgagataagrgtaatattttattcagtttttcacctacacagtagctaatgtaggcctcatagtacatggagtcatattatgtagtgaattagtttgtgaataaacatttaataattcatttataagaaagtaaaatctaatcattatctaagataaatgattatttccaaaagtatcacttgccatcacattgtgatttttgtttttatatattaggaatttttatttttaaacagggtgagaatctttctcattttagttcattttctgactttgaaggtctgtgtgctgtctcatttaaagccctgattaaaacatttaacttactttgccattttagaaattggaaatctggtccatggcttttattcttacatttgcttaatgcatttatcattcactgataggttcttactagatttgaattatcttcagggtggctaaaccctggtcttttagaaagttatctgaaaatctgtaggccatctgctttgaatttattttcttggactagaatgatcatggtgtgaaatttatttattgaaaacatgcttgtggaacacataatatatatttgacactactagagacaccatgggtttcagtagcgcataaaataatctttaagaaaattgcattctagttgggaatatgtactatgaataaaaagataatacaatataaattaggtataagtgaagaacaataaaaggctagagagggacttcgcctgccatttgagataggcttgtcagggaaagtacttgtcacttatgaaatgacatttgagcatagactgaaataaagggtgggataggaactatgtgaatatttgagtgaaaattgtattarggctctgaaacaagagtagattcagaccattggaaaagccatgaggactcagagctcatgagaagagaatggtagaaagtgaggttaggtgagtatccaggagtcagatcatatagaaccttgcaggccatggtcaagactgtatctaattccaaagatgatgggaagctccatattgtcaaakaaatcactttggcatctctgaagatgaagagactgtagtagataacattggaaacaaggagatgacaaatgaatcggcaccccataacataaatccccttagaacagcagtatttacttacatgtgggaaattaagggataggatagatacagtttgtgcygtgagattctggaagctattctgcgtatgtttctggtcttggatccctggctacatccagtgtgtttgaaagaagtctgattgaaccaattatgcagcagttacctgtaaatgccctgcttcctccccatgttttcaggtcttttgtgagcattctaagaaattgtttctgtataattttcaagtagaattctgggaaaagaagattatctgttgtaagtattttagttctatttttttcacatacacacatacactttaaggatgattttcataattaaacatttacttaataactgatacactatccccccctccactcaaatttttaaatgttaggtcaaaggctaagctgctaaaataaggacgtgcagtaaaatagtggcttaattttttaaataatgcatttgtcttttataataatctaaagattatgaggtttagcttggcatgacccaagattatgaagtcttattataccttcatcttatagctcattgccttcatctgcatcgctgaagctgtggcaaagatatgtatgtcccaactcttgggaaggtggaggaggatatagaggaatggacatgctattttaatatccacacagagaaatgtcatatatgctttctacacacatccyatttggccatcagctgctaggaaggctggagaaagtagtgtaggtggaggcatcttgatggggagttaggagttcctgccacaagtactctttcatttcacaggcaaaataaatatcagatcttacatgtaaataattgtaacctgttaatgtcaataaattgtaagtccagggaaataaataatacctgaaattgaagtctcataggtggcatgctagagattaagaacaaaggcttcagtgaggtattcctcagacacatactgaatgcttattgtgtattatttattgatttaggcagtggggccataaagatgaactaaaacatgattcctgaatttcaggaatttatagtttgcccagtgagaaatacaaaaaagctactgaatggtagtgtgataatgtaacaacaaagctttgtgcatttgtagcatggagaaaggaccaacctggccacagcagttcagagaaggcttcaytattgggggaacccacccccgatatttcgtaggttctttctawtttccctaagtgtcggccgatctgagaaataaagagaaagagtacaaagagaggaattttacagccgggctgctgggggtgacatcacatagyggtaggactgtgatgcccacctgagccacaaaatcagcaggtttttactgaggatttcaaaaggggagggggtgcaagaacagggagtaggtcataagatcacatgcttcaaagggcaaaaaggagaacaaagatcacatgcttctgaggctaataaagatcacaaggcaaagggcaaagcaaagatcacaaggcaaagggcaaaatcaaaaactcctgataagggtctaggttcagctgtgcatgtattgtcttgataaacatcttaaataacagaaaacagggtttgagagcagagaaccggtctgacctcaaatttaccagggtggggtttcttccccaccctaataagcctgagggtactgcaggagaccagggtgtatttcaatccttatctcaaccacataagacagacactcgcagagcggctrtttatagacctctccccaggaatgcattcctttcccagggtcttaattattaatattycttgctaggaaaagaattcagtgatatcttccctacttgcacgtccatttataggctgtctatgctatatggctctattctgcctgaccccgcaggcagtcagaccttatggttgtcttccttgttccctaaaatcactgttattctgttctttttcaaggtgcactgatttcatattgttcaagcacacatgttttacaatcaatttgtacagttaacacaatcatcacagtgatcctgaggtgatrtacatcctcagcttatgaagataacaatattaagagattaaagtaagacaggcataagaaatcataagagtattattagggaagtcataaacgtccatgaaatcttcacaatttttgttcctctgccgtggctccagctggtccctccatttggggtccttgacttcccacaacacttcactgtggaggtgatgtagaagctgggtcaagtaataaaaatagaagtgtgtgccccacacataggtgactcttccacaggtgtcccctgaaggtctgcagaagatttatccaagaggtggatttgacatagttaataatgaaaatgtgcaccctgagaacaaaaccaactgcttttgttggcttaagttctaggacaacaagacaaattaagtaggaaacaatatagaaagattgttggagaataaaagaaggagacaggcagtctaagtttagtaggaagagaatagaagaagaaaaaaaatgtccttacaagtggaagtgaggagagctggtcacaatgaacacttgtacctgttatacagcaatgtaaagacagctgaatgcatcaacaattttctgtttctgacctttaaaaattaacatatgaaactataaaatcatttaatctagcacaattttcataacaagtagaggataaagctaactaacataaattgaggacactgagtggctaaagtggtgcaaattaatatattagaatcacactttgagtatataagacaaagtatttttcatataaggttttytgaaatagataaatacrtagctatgaaaaatgatgccactaaattattttaattcatttggaagttttatgctcacatttgtgcactgggtagatatatgtaatacttaagtaaataaatctgaataaatcaatataggttgcattcattagaattattatcaagattagagaccttggagatattgactgttcattttctcatgccaaccttgacttaaaagcatttcatttccattacaaagctgaataatattaactttatcatgtataggttttatgggaaatttgatatattttagaatatttgtcataaattcttggcacataccatgatctatgtttgttttgtttattagttactagtgtatgcactgtatttgtgartttttcttctctttaaatgtgtacagctcctttggttgagcgatgtagatgttgttaaaactgacccagctrttgcaatgatctcatgtctttgtaccattcctgggatatttggcaagttctctatgagaccttcacctatattgattggcttttgagatgtattgatcaaagaaactgtaaaggttaacaggaacattgcccaatcctgggaagtgtggttggtgtagtcagggtagttgtcatgttttatgtactgccagtggaagtgctgggggtgtttgtttaattagaactttgattaaataatcacagcagaattgatctaaacaatgcagcaggattcctgttgacatcttttgcatcttttatatttgtctttctttaagagaaaaaaagcctctaagaaaccaatttggcttttttttttcatgaaatagtgaagcatataaatgcttcataaaggcaaaacatttttacacacttttggtgtttacttaaattatttttattttagtgtattattaagcctaggccttaatgttctctttttacagcttagtacataaataaagccaaatctgagttataggcagggtaagaacaaacccacaaagctaatcaagctcaatatgacaatattaatttactataatgaatgatattgctctactggagctgaatgactgattgtaaagtgtgtttgatgctgtgaccctggggctttgagttcggtgacatgttccctgtgatgcctcaattctcttgtcacatattagtaattgaacttccatagaggctttgattatacaatgtgccataaccttatctgacctttacgtattctgcatgagattacaaaaataaacagtgaaactgcatgagtgctcagataatccagagtatgctatattattattattattattattattttgagatggagtcttgctctgctgcccagacaggagtgcagtggcgtgatcttggctcactgcagcctccacctcccggttcaggcaattctcctgcctcagcctccagagtagctgggactacaggtgcgtggcactacacctagctaatttttgtatttttagtagagatagggtttcaccatgttggtcaggatggtcttgatctcctgacctcttgatctgccctccttggcctcccaaactgctgggattacaggcaggcatgagccaccgcgcccagcctattattttttaattgtatcaaaatgaaaacacaacgttaaaaaattctcacggagaactcatgggccctgagaatatctctaccgactctacttggagaaacactacaataaagaatttattagatcaagagaaaaggaatctggccttcattaacagtagaaattaatgttgtttaaaaaatattattcgctagccctttaatgaagtgtatatagcagacaacagtgacaattttaaagtaacaactttgtttcacattttgcatgtttattattgtataaacaaatatgtgaggcaattattactatcatactatcatattatgttcactgaaggaatataaccttatctagataacttacacaaacttgtgttgaattgaatagtcttttttaatatagtgtggtagattctgtaccttttcaaacactcatttgggaaagtgtgtacattagccacagaattatgctagatttttcagaatgcttgtatatgtgaatgcataactgtgaaaagttacctctctaatagttgaattttctttttcattttagtccaggtgggttacatatttttyataygtaataaagctttcttcagcacttgggatattttctttacaaatactctaggaagcgtacagaaagtaatcaactttgaattgtgttatgttttaaaaaatcatttgaaaaattttaaataggaatttgtaatctatttctctatatatctatcaatggtacttttctgagtggtgtttgggttccagtctggccacccaactgcttaacatataatatagtttaaatataatgcatttgcagtaaaaaaaatcaatattcttgcagtactcataagggagggaaataaatgaatgtgaattaaaaattattggaaatgttagttttagagaaaaacagattcaattaaatatctcttgaggtgggataaattgaatcctgtggtgaatggtggagggaaaggggcaatcatggatataattttcaaaaaattaaaggaagattttgtgaaggctagctggaaacagatacatgagaagatcctacggttttgcttttttggtagatagaaggtggagaaaggctagagaatatatgtaaattagggcttataacttttagagtgtctattttaaacctctcgtattcttatacagtgcaataaaactacatttttagatagcatgcatttttagacacaatacctatttaaataccacaggttttttttgaacttttattttaggtttmgggggtacatgtgcaggttaattacatggataaattgcgtgttgttgaggtttgttgttcagatgagcacagtacctgataggctttcagttctcacccccctctcaccctcccctctctatagtccccagtgcccagtgtctatcgttctcatctctatttccatatgtacacaatgtttagatcccacctacatgtgagaacatgccatatttggttttctgtctctgtgttaatttgctttggatgacatccagctgcattcgtgttgctgcaaaggacatgatcttgttcttttttgtggctgcatagtattccatagtgtatatgtaccacattttctttatccagtccaccattggtgggtatctaggttgactctatgtctgtgctattgtgaatagtgctgcagtgatggaacatatgagtccatgtatatttttggtagaaagatttattttctaccaaatatttattttcctttgagtatataccgagtaataggattgctgggtcaaatggtactactgttttaaattgtttgagaaatctccaaagtgctttccacagtggctgaactaattcacattcccacaaactgtgtgtatgtgttcccttttctccacagccttgccagcccctgttgttttttgattttttaataatagccattctgactggtgtgacatggtatctcattgtggttttgatttgcatctctctaaaaattagttatgttgagcactttttaatatatttgttggcctcatgaaatactagttttaaacgattttgatggtgtgtagtccctaggtaagggtctcttctgtgttcacttttctgttatccgggttaggttttttagtttaaccacacaactcgtctcttaccagtatcctcacttctcctgcatattgttgttccatttcactctgtggcaaaactccagacctggatcaatccaatttcttattgtcttcattactgtatctgatacgttgaatcctgttaaagaaaaatcacgtaactacaaatatagatttaatataaatttatggtatccagtgtccactgggacttcaatgctgcattttctttttttctttagcatttctcgagtaagtttctcttttactctccaaaggccattttaaacttttggctttcctgcctctgtgcctcaagcttaacagggtacattgattcaaacctagcaatgattatataaatttattatcaccagaccaacagacttgcctgtatccacacccattgttttctctttccctccttttaaaatagaaggtaatctttctttggtctcctggagccattctatcaattctttttagggctcttgttctgttaatctatcttatacctatctcactgctggctctttctcttaaaagcatgcataaatkgtccgggcttggtggctcacgcctgtaatcccarcactttgggaggccgaggcgggcagatcacgaggtcaggagatcgaaaccatcctggctaacacggtgaaaccctgtctctactaaaaatacaaaaaattagccgggcgtggtggtgggcgcctgtagtcccagctactcgggaggctgaggcaggagaatggcgtgaatccgggaggcggagcttgcagtgagccgagattgcgccaccgcactccagcctgggcagaagagcgagacttcgtctcaaaaaaamaaaacaaaacaaaacaaaaaaaatacataaatgtttctactactagctagtttcttatctattttcattcactgattaacttcagaaaaatgccttttaaatttccttaccacacacataaccaaaaccctctaaaatatgctactgcctcatttagctaaggtaattaatgctttcttcttattaattccaataggtgttcaatattttacttcctctctttattatgtctaacatttttgtccattctctgccagtcttcacttaacttctatataccattctgccctcattttcctttctttcctgtgttcattctaattatccttcttaaatgcttcttttgcctgtcccttcactacctgcttctaggttgccttctttttccattttacacatcccgcctgggtgattatatctgcgccaatggccttttttgccacatatgtgatggttactcccagtggcaacgctggctattctcagttctgtgtcatcagcccacatctctcttctgatgttgagatcatatgcaggattgccgagtaggtgtctatacatggttgttccactagcgtctcaaatttaaacgtgtccaatgtgaatggcatcactttccaatcagttgctaaaacccaaactgtggccccattcttaatatttctcaaataagcttatttatttttacccctattacgcaataatcgagtttatgcaataatcattacattawtgattctagtttatrcaataatcattacattttaagaatgtggaaagcacttacttttaaagaggatgaacatttttcaattattacacattgtttttcgggttagtctaaactcgatgggcataacaagactcygtatcatrtctaatattgtttcttcatrcctttccagttcatctcacaacccacttcatcctgaatgttttctctctctatactaaactgccttcactttttcagccaaatggcacatgctgtgatgattagagatattggcagcaactctccagtgagtaaaagcaggagaaagttacaattacccaattattaatgtctatagtggagagatgttaaaatggtaaaaagtggatgcaatccttaattattctttgtctgtgtattttctttcctttttattgcatgcaccctagtcctgttgtgtgttaataacaggcatcaattgyattttccattcttttagaccttggacttctccttgacgtagaattattttctctgtccacaatggcctgttacacagaaatactgttttaaaattaacaaaatatgctttacaagatgtgatgaattctgatgattttcttgtaaattttaacataagtatcaaggaaatggaagacaatattccttatcaagactgagcacatatacatagggaaatacaggatttaactaattttctgtgaaattacagtctgaaaatcacagtagtcttgaaagcaaagattattgaaatactgattattttgagcttgaactaaagggattaaataattatctatttcactttgcttgtgaatacatagtctgaaaatgactaaatattgattgaaacccatgtgtgaagaaactggtaatgagaaaaatgataattctgagtaatggtatttactctttcatttgaagaaaattatttgagaagaaatgtgctagtaaatgttttctagaccactatcagataactattttgaatgtaagatagcgttttgtaattgttcttgaaaaatttaatacaatgcgattcttaaatataaaataagtattcctctgtgttttagataaataataatacattttacttgtaagtgtaaatgtaatgttttcatctttaaaagaaagatttttcttttttagataacatctctaactttcctggttttaagagacatatctcaaaataaattggcttagcatartatcatcttcaatgaaaattatttcaatgctgtatctaataaattgtaactgtctaaaaatgttacatttctagaagcttcttatgttatatgaaaatatttatattcctgaaaaattctcttccaaaaaagatagttttactatcattccagatcttaagcagttttagaataactgattattttcacagatatttacctgaatgcatagttaatgcatggactaaagaataagttgttcattgtagttaaaattttaatcttttcaatggctgcctgtatgtgtacaagtaaaacaaacaaaaatgtgtatgattaatatgtttaaaagtaaggtgcaagtattttatataactctttctatggaaattatacatattctcaagaacaattcatttatccatacttttagtaatctgtttcctcagatattwtaattggtttttaaattagttttattttttgttacggtttagaccagggtttgcaatgtaacattgtggcattttgaaaatatgcattccctgtctgctttttcatacagttttctttgatgtggttttgaagttgcccatgatcactgcatttttactacaatttggaaactagggaactatcttttttcgtacaagcatgattttccttaggtgagcacacttgctatttgtgaagcaagtgataatttgttctgtagaacatagctttttgccaattttgactaatctttatatttgagctatgagcatctggtcacaaagttatactaccccaaagactgtttttgaaagattttccagaatgataacataaaattttttattaatttagttttcattattcatagcaatatgttttcattttataactgaaatttaaagcttttacttctgtctkatgcattatatgttatatttatgttatttataaaccaaatatatgtgcataccattttataatatataaatttcagttgttgcattttctttacaattattattcctgtatgtgattttttttttccagactccaaatttctttggtgtaaggaccaaccatttccttcttatttttgtayctgtagacttaacctcagtttaggacatacagctgatactacataaattgaaccaatgacaggacatttatgtgttaaaatggctttaaattagtaccaaaatgattcatctaatttctagtgggaagagtcacacattgttatatctaaataaatacattttttcatttcctctaggcttccttcgcagcccagtaattcacacattggtagcatagtatcctcatgctagctggccttgctcccctgggatctgtattgcccttgatgtcagactgaaaatcaattttactggtctatccttgtgtaaaaccatcaagttattgacaaatttaaaaacaaatttaagaaggtgcaaagatgaatgtgaattgggtgaacggcacatggttaacttttcttcagttgaaaaactatttattataaacaacctatattaaaatattttcccttttgctaataatagaaattgtaactctacactcagacatttatggtaggataagaatatgtcattccataaaaataatacctgttttcttctttgataattttccacctgaagttgataaaaactaggtgaaccctgaaatagcagtatcaaatgccttctgttttggagttccaataatactttatttgagtgattatgaactcatatgttttcccatgcatattctcatacatatatatttagatttacaaattataatggaaaattttaccagagtgacatttagccctgaaaactactggaaaagaaaatcgtactattgattctgtaaaccttttgtctgtagaccagctctggtgtggttatcaggttatcaaaacattgaggagcagctgaaacaagcaaggccaaatagactccatctagtggttacacgggactggtgcagcctcatttaactaaaaattgttttcagggcagtggttgacaactcagatgcctacagaagagggtggatgggagaaaaatcaattgtmggtatgtatcacactttctgtatggttagggaactatggtgtaagcatataacataaaataaataagaggtaaaaaatatattttaaactcagaatgaaaaaaatgcaagctgtatgataaatgcccctgggaatagtgagttctatggcaaaccactaggctgatcatctggttcaattgattgctgttattcaagaacacaggcctggtgctgctagacttcacaatttttctagagaaactggagatctagatttgtatgtgaaacctactaaatttaatatgctggttcattttcttaaaatgtgatatggccccaacttaaatacatcttggtcacatttggctgtgacctgcgatttgagatctttgtttcacacaaggtcttgaattttttttattatactttaagttctagggtacatgtgcacaacgtgcatgtttgttacatatgtatgcatgtaccatgttggtgtgctgcacccattaactcatcatttacattaggtatttctcttaatgctatccctctcccctccccccaccccatgacaggcccccgtgtgtgatattccccgccctgtgtccaagtgttctcattgttcaattcccacctatgagtgagaacatgcggtgtttggttttctgtccttgtgatagtttgcttagaatgatggtttccagcttcatccatgcccctacaaaggacatgaactcatccttttttatggctgcatagtattccgtggtgtatatgtgccacattttcttaatccaatctatcattgatggacatttgggttggttgtaagtctttggtattgtgaatagtgccacaataaacatacatgtgcatgtgtctttatggtagcatgatttataatcctttgggtatatacccagtaatgggattgctgagtcaaatggtatttctagttctagatccttgaggaatcgccacactgtcttccacaatggttgaattagtttacattcccaccagcagtgtaaaaatgttcctatttctccacatcctgtccagcacctgttgtttcctgactttttaatgatcgccattctaactggtgtgagatagtatctcattgtggttttgatttgcatttctctgatgaccagtgatgatgagcattttttcatgtgtctgttggctgcataaatgtcttcttttgagaagtgtctgttcatatgcttcacccactttttgatggggttgtttgatttttttcttgtaaatttgtttaagttctttgtagattctggatattagctctttgccagatggatagattgcaaaaattttctcacattctgtaggttgcatgttcactctgatggtagtttcttttgctatgcagaagctctttagtttaattagatgccatttgtctattttggcttttgttgtcattgcttttggtgttttagtcgtgaagtccttgcccatgcctatgtcctgaatgctattacctaggttttcttgtagggtttttatggttttaggtctaacatttaagtctttaatccatcttgaattaatttttgtataacgtgtaaggaagggatgcagtttcagctttctacatatagctagccagttcttccagctccatttattaaatagggaatcctttccccatttcttgtttttgtcaagtttgtcaaagattggatggttgtagatgtgtggtgttatttctgaaggctctgttctgttcaattggtctatatctctgttttggtaccagtaccatgctgttttggttactgtagccttgtagtatagtttgaagtcaggtaacgtgatgcctccagctttgttcttttggcttaggattgtcttagcaatgcaggctcttttttgttccatatgaacattaaagtagttttttctgattctgtgaagagagtcattggtagctttatggggatggcaataaatctataaattaccttgggcagtatggccattttcacaatattaattcttcccatccatgagcatggagtgttcttccatttgtttgtgtcctcttttattttgttgagcagtggtttgtagttctccttgaagaggtccttcacatcccttgtaagttggattcytaggtattttattatctttgaagtaattgtgaatgggaattcsctcatgatttggctctctgtttgtctgttattgatgtataggaatgcctgtggtttttgcacattgattttgtatcctaagactctgctgaagttgcttatcagcttaaggagatttggggctgagatgatggggttttctgaatatgcaatcattcatctgcaaacagggacaatttgacttactctttttctaattgaataccatttatttctttctcctgcctgattgccctggccagaacttccaacactatgttgaataggagtggtgagagagggcatccctgtcttgtgccagttttcaaagagaatgcttccagtttttggccattcggtatgatattggctgtgggtttgtcataaatagctcttattattttgagatacatcccaacaatacctagtctattgagagtttttagcatgaaaggctgttgaatggtgtcaaaggccttttttgcatctactgagataatcatgtggtttttgtctttggttctgtttatgtgatggattacgtttattgatttgcctatgttgaaccagccttgcatcgcagggatgaagccaacttgatcatggtggattagctttttgaagtgctgctggattcggtttgccagtattttattgaggatttttgcatcgatgttcatcagggatattggtctaaaattctctttttttgttgtgtctctgccaggctttggtatcaggatgatactggcctcataaaatgagttagggaggattccctctttttctattgattggaatagtttcagaaggaatggtaccagctcgtttttgtgcctctggtagaatttggctgtgaatctgtctggtcctggacttttttttggttggtaggctattaattgttgcctcaatttcagagcctgttgttggtgttttcagggactcaaattcttcctggtttagtcttgggagggtgtatgtgtacaggaatttatccatttcttctagattttctagttyatttgcatagaggtgtttatagtattctctgatggtagtttgtatttctgtgggatcggtggtgatatcccctttatcattttttattgcgtctatttgattcttctctcttttcttctttattagtcttgctagcagtctatctattttgttgatcttttcaaaaaaccagctcctagattcattgattttttgaaggaaattttgtgtctctatctccttcagttctgctctgatcttagttattttttaatctcatttctttcagaggacagaaaattggtgggcatcttccatcaacactgtaaagtgagactggattataaagttactgaattattggtagtgtgggccttggttgaatgtcatttttattcaactggcataattcaagatgctgaagtcacagctttggctatgactagctattctcgttggtctctctcagtgtggtaccttaaatgatgtacctagtaatgtgataatgaagcatggtcactttctgcaggggttgcacactgagatgtttggatataactttccaatttttgtcttgtttttttgagttccatatataattcaagttcatgatttttattactttggtgtatctttctcataatcttctgctagcgtctttgaagttcttgaaacatagcactcaattatagagtttgcaatataaagtagaataaaacactaaaatcgtgttttttttttctttctgtctttcaccagatcccttaaccttcaccacacctgtccccatccatacagaggaagtgaataaatagaaaagagaaaaatggccaggattcagaattctttaaacttgtccagaaagtaggagagacaaaaatgaaaggagccataaatagacatgtgacctaatttcttctcccaagcctcctctgttcattgtgttggacagtcacattcaaaggcaagccatggtccttccaattgcccaccatgcccctacaggccctttggctccctgacctgatcgacaactstcttttcacttgtttcttctccaggcccctggtttccttgctgttccttgatygcatcacatatgatctcctttacctcttacatgtttgtatttcactgatgttctctttgcctgaaatagtacattcatagatatccactttttttcaacttctacatgtcttmcaaaactgttgctttcttagtgagctcccggtgagaattacatccaccccttcccctgcactctgaatcctctttactctgctctacttccctcctgcatatgattgaagattttttaccacaatagataatttacttatttattgtgtttattgcttattgtgagtattttctctgctaaagtataagtacttgcagggtagagattattgtcttgtcttgtttacttayctgatgtatctgaaaacagtgtctgacatataatagatacttaatatatatattttaagtaaaagaatgttgaactacttattcattaagatctgggagtacttcccacagccctctataattgcccatgggaaggattcttgcaataaattttatcatgtgtgggcttataatctgttttgtctttattgctagaaagtacaaaaacatgttacggggaagagacatttatatgttgaggtctcaaaaacagaaaaaaaaaaagaactgtgtatgttgtatccaaatacagaggaaagtcattttgtataataattagtgtaaaaaaaaactataaaggcagtagaaagagcaaagaatatgaggtcggaagacctgtgatcgtgtcctgttacagcatttgctagttctctgaccttggttagctgtttattagctctgaaccttattaccttatctttagatgtaaataataatatagtagaatttgtcttatttgctttattagtgtttagtgatatgttttctttatgaatatatacttgcttcctttaacagttacccaacatctatctaaatttgtaaatattttgtttttctgttcacctgacagattcaccttttrcaatacataggctctacagggacaattctgtgtctttcttttatcagtgttacattcccaactcttacatactatgtctggtrtataatagttgctcagtaaaaatgttgtgacatgaatggttaagcaatcttaagtcataaagtttatgtgacataataatagtaggttggtttataatcaatgattataatacaattgttattactctcaccatctaaagcattatcatcatcatcaaatatgtgttacttaggctcctttaatctactaccaagcgggtgatcagcttctaatattactgccttaagttagaagtttggtgaaataatacaaaatacactttactgatttaatggtcttggcataggtctccaagctggctggtgtcttggtcaagyatggcatcaagaaaggtgacactgtggttatctacatgcctatgatcccacaggcgatgtataccatgttggcatgtgcaaggataggtgccatccacagtctcatatttggaggatttgcttccaaagaactaagtagtcgcattgatcatgtaaaggtaagtgctttattttgggaaatcaagtagtagctatgtataatttagtcatatttatctgtggatgaatcatctgagaatgctctatacttgttagatcctcccttcaaataggatggttgataaatacttttcctagaaatcattatattaaatatcaaaaagacgcctacatgcatatgtttattgcagcttaatttacaatttcaaagacatggaatcaacctaagtgaccatcaactgaagagtggataaataaaatgtkatatatataatatattatatatattataatatatattatatatcacattatatattatatattataatatattatatatcacatatataatatatatcacattatatataatatataatacaataatacttaaatacatataataatatataaatayatataatatataatattataataatatataaaataaaatatatacacacacacacaccatggaatacttctcagccataacaaagaataaagtaataccttttgtagcaaattggatggaactggagatcattagcttaagtgaaacaactcaggaacagaaaaccagatacttcatgttctcactgttaagtgggagctaagctatgtgtatgcaaagacatatagagtggtataatggacactggaaacccagaacggggataarggatgaaaaactacctattggatacaatgtacactatttgggtgacargtaccctaaaagtccagacttcaagctatttaaataaatacataaataaaatgttttttatttcacatacacctgttaatcacacatttgttttaaagtcagtcctatgtgaaagacatcttgctaggtgccttggggaatataaactataagataaggtgtctgctttccaacttagcttgtcatatatttgggtgtataagacatacaagaaaaggactaataactaatttgttcattcaacatatattttattaagctcctgctatgttcctgacaytgtctttgcaactgggtaataagtaatacttatcaaatggatgggacatataactagttttacaatccatatacttccaggaagtatatatgtttgaatggggtacaaaaataacaatttagtgagtctgttgtgaaatatcaytgagctatttaatctaaaacagcacactgtctggcatatagtacacatttaaaaaatgttaactattattaatctatgaatttagtgcaggagttagaaaaattttaatggtaattgaccagatagtaaatattttaggcagtatggataacatgatctctatygcacctactcagctttgctgctgtagcacaaaagcatccttagacaacatgtacatgataggtgtgcatttttcaataatattttatagaaacaggctgtgtgccgggtttggctcacaaccatagtttgcagacccctgatttagaggaagaggcattttctttcagtcgggtggccaaagaaggcttcctgaaggagatgagatttgagttagatcttggctaagattcagctagttgaagagaatgacatagtaggatccaaaaaggcagaaaaagaatctgagtcaagcagtagagacaggaaatggtaaaattcatttggaaggacagtaagtagaccaatgtgactaaaaggtgagagaaggtgagcttgcaagggtaggttttgtctgaactggattctgttaatgagtaaaagtttttgaacaggcaagtgtcatgttttaaacaatgttaagaagaggcaggtcttgcagtatgtaagtgggagtgaagctggaagctgtaataaaaacctttgataggtggtctgtttgtgaaacagygggcaatatgaaggggaaaaaggactctgggaagattaaggaaggaaggtgcttatcagagcaagagatggttgacctttagagttttacaagcccaagatgagacattcttaatgggaagaragctaatatatactgaaggccccctgagtactaggtatagagtgaggctttgcatatctcactttatcttgtaatagattagttattaaaacaagaaagctgatttrtggacaaaccatctgggtccttttttatctttttttttttctttttaaacatgttgagttaatgcctatgaagaaaatctagggaaaaaatatcagtcactgacctgcaaaagaaactgtaaaaaattttgataagatatagggaaattacaatatgtaaaacaataaggatttaaaaaacttatggtgtaccacttaaggaattttcatccatcacacacacacacacacacacacacacacacacacacccctaatactcctttgttaaggggtttatgcaataaatgcttttatggacaaggcaattgggcaggtcaaatgtaaggagagaagatggagatatatatatctgagatagttgggtaaaattagtgtgtagttgaaattaggaatgattttgatgtcatgatcttcaaataaataggctaaagaaaaagttttattttaacagaagaagatggaaaggatgtattctaacaagtcagtctagactcaataagatctcccataagactgttaatagaaatgtgaaaggaattattttttcagaggaagagtctaattttgactttattaaattattcaagctttgatatattctatatatgctcctaatttgatatgtagcttgcttttgtttattcagaattctaaggaatgctatctagagctatttttgtgagtattatagatattaaaatgtgaattatattcaaatgtctgacctttaaaaatataataaaaggaaacaagactttctgctttttttttcctttttgttttaaggcagcttgatatggtggaaagaggttctgcaaccagacagaactggccttccttctgccttygcsacttgtaacctggggcaaactatgtaattgcactgagcctctgttccatgaatattaaattatattcaaaaagcaggcaatactatatatgcatatatttagcacagtataaacctttcctagatgaaatgtattataactagaaatcagaattcaggaatacatgcaatactttgggtcaattatctgccttccgaataatttattatgtgtctcttttgctttggatttcttggtgaagaaacaatgtacttaaaaatatgaggacttatttttctgcaaattaatgagttccgcaaacgtttactgaaagctcatgacatgccaagcactgtgctaggtataggaaacacaaaaataaatgacatccaaacttggccttatagagcttactgtgcagtaatagagatttatgaacactgactatagctgaacatttgaggcatgtccagaatgtactgaaaagagaggttaacataagctgtggttcccaccagggatacattttgcctacacctgtgtttgtcttgaagaawgacttaacaagttggcaggtaaagagtataaagtgtatcttaaggacaggggcaggtctaggctttgtggggcttgaaactttaatcatttgggagcctttttaagaaaataatataatgtaatatttggtgaacatgaatatatatttagaatgagaaaaaattattataaattattggagatttgggtctttttctgctgtaatctctttaggcatttagaagagaaatatatagaaaacctatgaaatgctactacaacctcagcagcagccagctcttattggggcctttgcaagtaaggggcctcaagatttgcattgtactagtttatggcaaatccayctggcttaatggattatttgraagggatttatacatttcatacatatgagtcaaaaacatcattgagcatgcagttttgaacaggtaagtgagatttgtgtagaagtgatcaagtctctaacaattacaaagggtttactggttttcagaccrttcaatagaaaacagaaacattcagacatttctttacaaatgttgaattgccagtctgcaactaaaatattgkgattacctaattaacattgttaaagctttctctccattattattttttaattgtagcccaaggtggttgttacagcatcatttggcattgaacctggaaggagggtagagtacgtaccacttgtagaagaagcgctaaaaataggacaacacaaaccagacaaaattctcatttataatcgtccaaatatggtaatctgaatattgaatttggttcttgcttatsgtaatatgctaagaatgrgtttagtttttaccatttaaaagagacatttgatttataagctattaagtatactgctgaatgttattgttatttctaaaaaatatatgaataagacttactgacttcatgaaaatctagcttaaaaccaaaagagtgaaacacagaaagatgtgtgagattaatgaattggattctatgtatattgctattgttgtgttttttattagctcagattatattagcaataataataacaaacacgaagtgactgcttaccatatgatttttaagacattctactaatgaatatatatatataaaataataataataataataatwattattatttttttttgagacagagtctcactctgtcgcccaggctggagtgcagtggccgatgtccgctcattgcaagctccgccccctgggttcatgccattctcctgcctcagcctctggagtagctgggactacaggygyctgccaccacacccggctaattttttgtatttttagtagagacggggtttcaccgtgttagccaggatggtctcgatctcctgacctcgtgatccgcctgcctgggccccccaaagtgctgggattacaggtgtgagccaccgcgcccrgccatattttttaatcttcctggtaactctattaactagatgataatattattactattttaataaaagaagactccagtgaacayggagataaagtaactttctcagtttgaaagtgccagtgtcaagatgcgaatgcatgcgctctgactgyatgcttaatccctcagctatmctgactcttggagtggtgtgattaatttgcatgcaattgtcttcttaaaattttgaagagtatttaggccagaaataaaactatgcttaggaaaacaaaacatgaatattctaagtagataaattattctgtgatctatgaaggaagggagaacagtataagatatcaatgaatacaatttaccgtacttttcctgtaactttgaactcatgatcaccttacttcttcacccaagcaaatctctagctatttatgataagaccaacttgggtttctagcagattaaattttttttttgcagaagtgaaattgcaagactgcaaagaatcatgtgcaattaatttatagaactcttgacaagttttctttgaaaatacttaaatgacaagatatgagaacagagtgttaaaaatatgtcattttgattaccacctagcaattcccattaccacattaaattcctgtgtaaagttttagtagtctgtggttcatgaactgctgcacttaatgattttaatgttcttatgatcttgaagaagaattttaagtttctttcagaagacctcaagcactttttttaaaaaagcttctttgctgtttaaatcaggcaatgcaaaatcagtaatatagaaggctttgggtaagaacagtttagaggaatggcaggaacacacacacaatgtatgcatatgtgagtatatgtgtgctgtttacattacatatacttayagtatataagtgctgaacatgtaatttgttcagaacttatgatgttctaagttctaggcccaatgctaagtacttccaaatattttttcttatttaattctaacaaacaaatgaaatacatgctgtttctagccttattttggagataaagaaactgagtaatggagaggtcatagcccaaagtcacggctactaagtggcagaaccaggatttaaactccagtttaatgatttgtaaccaacaagatatatgctatttctttcactataaacacattggatatgtgcaagtctcttctcttttcttcttaatagagattaactgcctgctcccctccaataactagcttactttctcagcttctctctttttctgcaggccctttcctctattgtgatatagatgagggctgtagaaatctcttgttctttctattagacctgctgttttggcagtaactaagcccagtggaatggctttgctttgaatttagagagacacaaattatgaggctcagtggtgtgtcttattaaccaggattgcatttttgtaagaggaggtaaaaacttggctgccacacctaagcctcaggcaaacaatgatggaatcaaaggatattgcatcaatcacccctatgctctcccaataccgccttttaagaattataagaattaggaaagacatatctrtagaagtaaatgcatatatgtgaaagtgttttttttcctctgtttctcagatctcctttgcacatacctctgtttcttagcctgaagaataaccatttattgaagtcctaatttcattagagtcctatcaaaattatcaacctgtaattatttttgtgatcctcaatttsatgtttgtattttgcagtgtgatgatttttatagatctctgtgttgtcaaaagtttgataatttgcaattagttgcttttatccattgtataaatagaaatggaaacgtatgatttggtcatagtcaactattttatttatctaaatggcagagccagtacctatcagagtggggctggagaaagcagtttggcctgaaacttcaacttgatacagggtcttcgattcagctataaatgtgttagctataaatgtgtttattcatacaggtatcatattcatacaggcatcatatttgtgatattatattgaagtattaattggtaaatgtacctatttaaatawatgaacagtttttacaaccctgattaatgtattaagcagcttagaaaatggaagtggcttgtcttttctaaatttttcaatctttgggcttatctcaggaatcactttaatgaaatggttacatacatctctagatagtagatctcattaactttcattgagtgttatataactttgcttgtgcttgtgctaacatgttcgccaattataaacttcctgatgtgtgatcttgagctcagctaacatctaagaaaaaaactaggcttttaatgggcattaactctacttaaatagctgtaattccccatcagagtaacttttccatcagccacttccctgcttttcacccatctggccatttcattgtcactgtttttaaaaaagactatttaatttctttaaaggagtatctgtttaactcatgactctattatcacaaagtttactagaaggaggaaaacttggattgtattttagatatatcacagactctgactaaatttcaaaactggattttagtcttcaaaaaggaatagtagaattcttccctactcctgaagaagaattaatgttttcttatttggaaaggtagctgtggtattactcctaaaggccattgtatgaagagaaattttaatagcttagttgacacatcattgtaaagataataaatgcaaaataaaataaataggctatgaaaaataaaaattagtttataaagttattagtgtacatacatctataaaaacatgaaacgttatttaagccatgagtgttgatggaaacattactgcattatactgaatttctaaaggatatctctagatttaaatgaaacatgcttttttgtcagtttagttgaagtgaatataaaacttttggactttttataaacatttatgttaaatcatgaacttgaactttttagtcataaatctgatgttcagtgccatataggcctagattttcagtcagatgctcagacttaaatagatttagctactttttgttctcttgatttaatctccttattacagtacatattcttatatttttgctgtgtaggaggcggttcctttggctccsggtcgtgaccttgattgggatgaagagatggcaaaagcccagtcacatgactgtgttcctgttctttcagaacacccactgtatattctttacacatctggcacaacggggttacctaaggtactcactctcttagagataactatctatagcagtagatttactttgcaccaagaatgtttgatcactgactggaaatgtttgcagactttactttgaagtttagagagttacttcatttgcttttatttttttttcctgtgcccagtctggagtgcagtggcgtgatctcacctgacacagttactccatatcttaaagagattttgtgtttagtgctaaatataaaaacatttattatttaacatcaaatattttgctctcatttcttccagaattgtctcaaatgctagaaatatacaattgctttagtagatgtttaattgaatatcagttggtttaataacattatataaaaatatattttaaataaaatatttttattcttttagattgaggtataagtttcatgcagtatagaattgattttttgatctaggggaattcaattatttattatgaatgtgattttgagaattggcctaggcagtttgaacagaggcaatttatccaaagtattgaactatttgatttacagcatggaagacactcaaggatttttaaatctgtttaccatgaaatgtgtttttacaaagcaaagttgaaagcatcaatattcattgatgygtcaaatagcaacaaataccacttttgcctggtatctccaaataacactgtttcttcatagacccttataaaagataacagtatcattttccttactcatctttattaggtggtttaatattcattgaattgtagaattttagtaggggacgggactttcataatcattctcttccttgaggacagtggcttctttattactgttagattnctatagcatcagtgttctgaaaacttcatttcttaatcttcttagaatagtggttctatttgattagttagctttttaaaaggaaatttaagatgttccatataaaccttgcttgtgaaaaggaacacttttggtagggtaatatattctctctgaggacacaggttatgttttagtatattttggtctaccattgtgctgtatgtagttggtgctcaataaatttttgttgaattcatacgtagatgcatgcacatgaagatatttgtttcattgtagaattgaagccttatgattttgttgcaactctagtgacttgaaaaatatttctgcatattgaagattggaagatttatttattgaagcatgccatataatctgctcracataattctcaacctccactttttccagttctgccttgcacactagccacctggagtccarctgaacatttggctataaaataagaggggactcagcaaagttatgatctaatataaaagtatcaacatgagagaaaactcctgaccctgaaaacacagtataacttaattttttaaaaatttagtttcttaaaagcctgaagaaatmttataaaaacatttgtgctacctcaagactttaagtcactgaaattcactgtgacctggaatgggatcttatgggaggggcagaagaaaaggttttcagaaattaaaagctgacttgccagtgtagtagaaatcaaataaaagcaatacacagagcattatattgaaaagtggttccaaataaggatggaccctagctattccaggttttcttttttttcttttctttttttttttttttttttgagacagtctccctctgttgcccaggctggagtgcagtggcgcgatctcggctcactgcaagctccacctcccgggttcacgccattctcgtgcsttagccccccgagtagctgggactacaggcgcccgccaccacgcctggctaatttttttttttttttttttttttgtatttttagtagagatggggtttcactgtgttagccaggatggtcctaatctcctgacctcgtgatccacccgcctcggcctcccaaagtgctgggattacaggcatgagccactgcgcccggcccaggttttctctgagaggttcttttctggattcctttcaatgcctaaatggaagatcctttgatatttctatcatcctcattttcctcctaatgtaccatcctgagacaatctatttcaataaatttgagagggcttgaattgtgtggagatttctgcatcacagtgaatttgactcaatataatgtatttgtattgagtgctcaacagatacaactatgagtaaagtacagtccttctagtctagtgagattgaactaggtatgaacataggtgatgcaagatagaaggtgatcctttagttgggaagataggtgactacacacaatggagacaaagaaattagttttcaggctgtttaattagtttgggactttacataggacagcatgcttaacagggaggaatcagatttggttcaaagttaggagtctaagactttgagaacatatgagggtgcttttgaatattcaytgaaatagaatcagaaggatggttggaggctagggaaactaaaagtctttgacatactcatcatgatgtgtcttcaggacatttaacatgaagatgcccagtcaagagttggtgatgagagtctgagcccaagagttacacatatggggttggagatagacccttgtaggtcactggggtacaggactggtgattaaattgtgtgcrtgagtrggctttgcaaagttaacacatacagaatggcaaaagaaggtagttatctctttaggtccctcttccttccagtggactttagggttgaaattgctttaaattttacattaccaacagaccttcatggcacttattttaacctatcttatagatattagtttttatggcacttattttaacctgtcttatacatattagtttttatttatttacttttataacaatgaatgttctctgaggtcttagaatatacattatcctttttggatccactgtagcactaacattaaaatttgacccaggtagagcagaatatttgttgaatgatctcttacttctctagtaagccagcttcttggacacctccttattcatacaattctcgtttcatttttcataggtataatcaggattaatagtacctaaaatcttaatatgggatccacagaatgtaagtataggaaaaataaacacacatgcattaatggagcatttagatataaatatgatgtcatcatatggtttgtttcctcaatccttgatcttcatgaggaaaaataatgttgtgagctcataaaactcttctgcctaaaaatgcttgtttctcaaatataaaacacacataaggcagtctgttctttggttagaatttgtagatacatttaaagcatatttgcatatcagcatttgccaaccctggagttgtcaagttgctgtatgacaggttaatctgttagctgctgtaaatattccagcaaccacatgtgagcttctttgcatacatttctgttttgttgtgggcttctattctgtttggtctgggtgcctatatttgagatagttcaaagcactacatgataaaagaatccctcatctgkatcagatgtccttttaggtatgggagatttagtgattataatatttatcttgttcagtttgatatcataaagggatcatgataataaaaaaaggaaaaatgttcagtgtcaaaagagaacagggggaaagaaatcaaaaggaaaagattgaaaagaaagcatgacaagaaagtggtagataaggccttttgtcctgatgggcacttacttcctgccccagaaaaaaaaaagagtgaaagtcaaataaaaaacagcagtgaacttttttgtttgatctgtggtacgctcttgcagttaaagtgctgaactggttgcacccttgccccttagctcacagttgttcagatcgacaaaaaaattatacaactgccaaaatatcctccatggacatagcttcagaatcatctgaaaacctgtatcaagatatttcatgtttgatgaaatatccygaatagaaactttttatgccttctaagaagattcaagattcactaagttctacaagtgtcaagggtttctcctgaacaaagagtgtttgttgaaataattgcattgttcacacgggtttatacactaaactgttcactcatttagacagtcaacaaatgtattaaatgcctattctatcccagacactgtgctgaagatacaaagatgttgtcctcactgtgctcaaagtggtggagaaggcacagcactaggtggggatatcagtcctctgatgaggtttgcaggccctgagggctgtgaaagaggacctgaaagacatttgacacaaataacaggatggggtgaaacttcccagaagaggtggtatttttgcaatgtcttgaagtactcctggtgaagacattggagttcatcaggtttagaaaaggggtggaggcttactctagaaaaaggggatgccatctgtcaaaccactgtcaaaacaaggtttagtgctgacgtgttagatcttttaaacaatcagaaccattcattttttttctctgacgcctgccatcatctggtgatgggtttcttttctttccttcaaataaaatttattttccccctttattgtttcttgtcaggctgaattgatacacacacacacacacacacaaacgcacacatgtatatatatatgtatacatacatatacataagcatataaatatgtacacatgcatggatacatgcatatgtttacatgtgtgtatgtgaatagacattttacatatgtaaatatatatatatatttgccttgtatgattctttattacaaaataaatgatagagggacttaatgtaggaaataggaagttttgtcatgtactctaagcttttctactctcagtattttgggatttgcctgtcagatatttaaagaccattaaaaaaaaaaacttatatttttacaatgaagaatcccaaattcttaatcttaccacacacttcaggcttccctcctcttctacaacacctattgttacaattgcatttttctttttcaagttgtggcagccaaaactgcacacaacatttacaccaacatgttttctgttttactttaatagccccatttatgacaatctgtragtttacttgtcttcaaaagtagctcagtaagctggaaattataaagaactatctgtgataactttgtggtccyatttctgagtaactaacattcaccctttacttttacttgcactgattggattttttaaacaccataaacattgtatttgtcccccactcccaaaagagagcaccttcatattgcttccattgctatgtctgagataggattcactttcatgtctttattcagggcacagagtgctagtcccatctggatatttttcaagttccgcagacatctttaagaattatgactgatcctaccaaaagatcggaacagcatattggcaggttacagggtttttatgagaatatatgagatcatctagtgactttacttttaaggtaggtagagtataagtacatagagaggccaggcgcagtgcatcatgcctgtaatcccagcactttggaaggccgaggcgggcagatcacgaggtctggagatcgagaccatcctggctagcacggtgaaaccctgcctctactaaaaaaaaaaaaaaaaaaaaaaaaattagctgagcctggtggcatgcctctgtagtcctgtagtcccagctactcgagaggctgaggcaggagaatcgcttgaacctgggaggcggaggttgtagtgagcaagatcgtgccactgcactccagcctgggtgacagagcaagactccatctcaaaggaaaaaaaagaaagtgcatatagaaggtaataataaataatagagattcgaaagactaaaatgaagaaggtttgtgttttaggggtaagcactggtattgagtatttttacttcatattcagatatactgtaaaagtgctatttttagtttacaactaaatttgcttagttatagtataatggtttgttttctggagcataatttatgtgttttcagaggctgaatggtgtttctcttttgcattttaattatcattacctggaaaatgtgattataaacaggaaacaaaaatgctttatcatcttatttttgttacaaattaatatttatgctaaagaaattctcttgaaatgtaaccttcgtgttttttatactttcaaacctcttacaaaacgtgaacctggagaatatgaaaccatgcatttcttttttctgcaccatatcaaatactcagaaatttgaaactgtattatctgagcatttgagaggcaagaccaaattgcagatctagagtctagattaataaatggtaaaaagatgcttgattaaaatttttatactcattctttaaaaaataaaagtaagtgggtatcaaagactaacgaaaaacagaaattacggctcttctcactccttcagcttcattttaattgttttaaatgagaatctttgatggcaacctctaattattttgacatttatgccttttgactgataggagcacagggtaaaataaaaagcaataattgctagaaccaaggaaataatattgttaatgaaattttaaattttagtctttacaacttttaatgctttttcacgcatgttctcatttttaagtctcttttttttggtcagatgggtttaagtattcactaatttacagacaaagtgacattggtaaatgtcgtttgaagaagtactcatctgagaggtaaatagaaatttgtcaacttatcctttacatttatgtttcaggttttacaattgaattactactcagttatgtcttcccttaccttttatttctggtcatcatttctagtcaatgcatcttaccctctgtaccatatggtctaaacatttacctagttttaataatgtttagagttactgataaaaatgggttctaaatgcagggacatgtaggatggagagaaaattttaaaacatgtttaattgaaattattactgatattaagtatcaccatctgtcataacacatggacagcatattgtctacaaaagctactttttctagtctgtaaaatgaatagtttttataaagtgtttgcaaattgattaatatcagattcatcaatctgttgagccataggaaaagatcttctcaatagaacaaactagcaaagtgcatggacgataggataggatacagtggaaaaataactgtttcgtttacatgggaaggtgcacgtgtaaagcctactggcagggggcttagaatttctaatgttcccatggagatcaacagggccagctgcatgctaaccatgtcatacaatctagaaaatagctctcaaataccaacaacactgcatctgatatttgctaagagaccaggtgttgttacaggtgaataaaataatgttccacagcatgatgcctatgttttattagtggcacctgaggagagcagcaatgttagtaactaacggaaagtcaatttctgtttcattttcctgatttgtgtatgtgtgttaaggtgcagagctatgctaaaaagcataactaatagcacagttattgattagatccatgtttgccctttcataaaaaacaattttttttgcataagagcagttataattgttgtactaaaagatgcttcaaaatacatgtgartggaatataccttctatctcttagcaggtgttcacctactcattctgagtattcactcagttatgtcttattgggccaatgatgattaatgttttttaaaacaataaatgaacttaattattaaattttccattagttcttatttatggtgacatttatacccagtgttcaaatattaatctttcatttaggttgaatatggtcccagtgttggggagagctatttgaaactgatttgtgaaaactttactacaatgatataatgatccctacttttgcccaaaatgcaatataagacaaattttttaaccttagattcaactcactggaattcagccctaagagttctagagttcataactaaagaattgctcagctttaaagtgtgcttgcatgatcctcagtgaagcgttgtaatgagattccagttagaatatgactttgtttcctccaagcagctattattatttaatcatcttaagaaatagaggtccttatgttagtctgcatttgaggtgtataactacattttacctttcttcgcattaaattttgttctggaaatatgtctgaaaatgtagtgttgataatgtgtggtgccattagaaaagtttgtattgcatgtaattttgtgaaatcatgttttctttagaagactaataatgttatgtgagaatggattctaaaaatggcactaatraggacaaattattttgtgttgactattgaaggacccaaagaaataatgattcaaagataattttataaaagccaaagtaacttgtagctaatatataaaatacttttgaccaggaacttttaaagtggatgctatgaagatagagagtgtttttacacattgtttattgattttaatttcactttttctctccttagggtgtgattaggcccactgggggatacgctgtcatgctacactggtcaatgtcttccatatacggacttcaacccggagaggtaatcgtggttttaaatttacattacatgacattctctgaataaaatatattcattttatyatcttattttttaggtgtggtgggcagcttctgacttaggctgggttgttggacattcctatatctgctatggacctcttcttcatgggaacacaacagttttatatgaggtaataaagtaaagttaataccacatataaatgatatttattttattaaaacttttcatgaagcagtcctgagtaggatcagaaaaattggggtggggacaggggacattattatatcttcttccagttaaaaatataattttgaaagggaaaaggatatgtaggaaatattagcctgttatttaaattttgttgaacagtcagaattaaattctgaagaacatacaaaaacaagctttatatctatccctaacatttctagaaattattggcaaactgatactgattttagagtcctagaaaatagttatcataaaacaagcaatgtagattcaccttttttattttcataggattaatggatttccaaagtcatgttgtctcaattttaaataaatactttccttggtttctaataaagctctgtgtataagacataggaatatagactgaccagatttatacctgaataaataactgtttaaaaattcgatgaatatatcagtgtcacctaggaataagatttctttgcatataggaaatttacttcatatgcctattccatttaactttatcaatgtcttgtataaagacttagaaaacatacctatcagatctgtagaagatcaaagtcttggagggataactaatatggtagtttgctaaattatcattcaaaatggccttggacttttgggacaaatttaacaagatggaaaaatacataaatatttacagttctatatttaaattaaaaaatacagaaatgaaatagggaaaacttgggttagttgtagtttatgtagccaaatctctgggtattataacatccataacttaaacataagctgttggtaggactgtttttaaaaaatacttaccatgtgcaatgatgtaatcttactttactcttccacatttgaaaatttgtattcagtttaattgagatgataaaaaaaatcactaaattactagaaagcatctgaaaaaagggagtagcatggaaataatgtatacaagaaagaggtgggctgggcatgttggcttatgcctataatcccagcactttgggaggccgaggcaggtggatcacttgaggtcaggagttcgagaccagcctgccaaacatggtgaagccctgtctgtactaaaaatgcaaaaaatagccagacctggtggtgcatgcctgtaatcccagctactcaggaggctgaggcaggagaatcacttgaacctgggaggtagaggttgcagtgagctgagatcatgcagctgcactccagcctgggcgacagagtgagactccatctcaaaaaaaaaaaaaaaaggtgaagaaattgggaatggctagtctgacaaataatacacttaaagtgcagatattataagtatattttgatgtttaaaaagttgctacatataaattatgtagtcttgaatgcggagttacagagggttatattttgggaataatcagagacaaacttaaatgcttggcagtagaacaaatggacaacttctcaaatataaggctctctctcacataagtgttctgtcaataccagacaaggattgtgaagtaaagggaattttatatgtggggtgtggagaatagtattaagtgatttcaagttaatttgcactcttaaatttctgcaagtcaatgaatttgaaaacatgagaggccattctcaatctttctggaatactccaggcctcatcatcacttaaaggctatttgtgttctttcatttttagctggctgattttctgtctctgaatgctaagaaatattaaggtagactttgacacaagtattaaaccatcatatactactctacacttttgtatcatgcttttatatcttgcggacttgatatgcatttgggaattcatatactactctgcagcttttgtatagtgcttttatatcttgcatactgaatgtgcatttaggtatttgtaataattaaaacaaaataatcttgagaaaacattttgtaccattgtctttgcaatataatgtttttaatttaaaaaattatttctcttgaagtaaacaaaataaacctctacactgaatagttattttgaattgtggcattgcttacataaatatgacaaagccaaagatgctaacatatttttggttataagcattaagctgctttagaattgagatacatacatattttgcgctatttaccatgggcttttattgtttctcaagtttatttgaaacatgatattaacactgtgatggagggttgtttgtttctatgttggaatgatttgctcaagaagagtgtagatgctctataaatatttgttgtgtgaataattgactgaagtaagctactatttaaaaccttttctctgccctctggcttgttttctacaacttataaatgtctttractttctctggtcacaaaaccaagtcttttagacctttgcctgcttcaactrtgccatctttattttcttctccactaaattccttgaaaaaatatcctgcccagattcctgaacctcatattgtttcagttattcctcatctcaccgtagtctgatttatgttcacatcatttcatagaagctgctgcagcaggggtcaccagtgacttcataagtgacaaagtcaaagggccttgtttaatctgattttattttttctcttactagagttcagccctgcagaccattcctttaggtgatcctttcctctctcttgagctccaggctctttggctaatgttcatgttgtttcttttttctggtgtgactttcctcctgtctttcctttcttggttaactcctactctccttgtagactctgcttagatgttataatttcttgaaagttttctctcacgttcttgggctgtgtgcagtgcccctttttgtggtcccgttgctttcgagcatatgtctgtcactgagctggccacactatactgaaatgatacatttatgtctagaagagggtatcatctagaagaggataaaagccagtttcacagcacagtgcatagcacacactacacaattaataaatacttgtggaactaaattatactctactcctcgttttctttcttccatcctgacagcttgttcttcttttcttctctttgtttctttcactttggtccttaacattagagtttagcaggatcatagtctttgctctattttcttattctgcttacgtttcctggataatctccaagcagtttatatttgaggatcattaattaaatcatggcttctaaatcccctttttatatctgcctttcctgctgagtactaacctattgttagacatctctgaatagtctgtgcacatcttatgcccaagatgacatgaactgagttctgtatctccaccccaccctgcaaaccatatttccttcagtgcactctgtgtttctgttaatgttacctccattcatgcagtaatgcaaactgagaatctgcaagtgattcttaagttcattttccttgcatctcacactctgctggtcattacagtttgttgaatctacttattcagtacttatcaaaagtgtcctcttttttccatgcctcttgacatgtattcagggctgatattcagctcatgcacaaatatgtcatgttgactkatgtccattctatgttttggcttctgatatgatgtgtgcctatacattccagttacatatttcaggttatcattagatacacttctctcttaatattgataaaacaacagacagaaagtcagtgaagatgtagaaaaacttgacatcatcaaccaacaagatttaattgacattcatagaaaactattctcgacagcagcagaatacacattctttttaaatgcccacagaataattaccaagataaacgaaaacctgggccacgaaacaaacttcaactaatttaaaaatatttgaagtcatgcaaagtctattttaagaccacagtattttcaaactaaaaattaaaaagagttaacaggaaaatccccaaacaattggaatctaatcaatatacttctaaataaataatccataggtcaaataggaaatatccaggaaaacacacacacacacacacacmccccacacacacacacacacacamgtctctgggtgtatatatctcaaactgattgaaaaagaaagtacatcatataaaattttggaggacacaactaaggcagttctgagagggaaatttatagcactaaatggatatactagaaaagaggaaaactctcaaatcaagaatataagctcctatctcaagatcctaggaaaagaggaacaaaatatacctaaaaccaggaaggaataataaaggtaaaagcaggaatcaataacattgaaaacataaaaacatagaaaattaatgaaaaagaactatttctttgaaaagataaatgaaatggacaaacctctacaagcctagcaaagaaaagagacagaagacacaaattaccagtaccacatgtgaaacagtagatatcactaaagacsctgcagacatcaaaagtgtaataggggaatactatgagaaattcaacacacataaatttgacaacttagatgaagatgaaatagactaattcctcaaaaaccataaactcaccaaatgagaaataaattactagaatagccttattactattaagaaaatccaatatgtaattaaatagactcccaacaagaaatctccagacacagatggttttactggaaaattctaccaatgtttaaaatagaagaggaggcaggtggctggtatttctgtattccatgtgccatctactaatgtttaagggagaatcaataccatttcttcacagtctctttcagaaaatagaagaggagggaacactctccttatcatttaatgaagcttgtattgccctaataaaaagtcaacgacaaaaaaamatactacaaactaatgtccttcataaacatatagatacaagaattcttgacaaaatattagcaaatattttgaattcaacaattcagcaatctataaaatgaattatacactgtgaccaagtgsaatttattccagaggtacaaggctgcttcaatatctgaaaattaatcaaggtaatctaccatattaataggctacagaaaaattatataatcatattaattgatgtagaaaaagttgtttaataaattcaacattcattcataatgaagagctatcagaaaactagtaattgaaaggaacttcctcaacctgacaaaagatcacctatgaaaaaacctgctgctaatatcatacctaatcataaaagcctgattgtttctcctctgttgttcaggaacaaggcaagtatttccactctcaccctctattcaacatatctgtggaagttctagctcatttaataaagaagtatagggaagctgggcgcggtggctcacgcctgtaatcccagcactttgggaggtcaaggcgggcagatcatgaggtcaggagttcaaggtcagcctgaccaatatggtgaaaccccatctctactaaaaatacaaaaattagccaggcatggtggtgcgcacctatagtcccagctactcgggaggctgaggcaagagaatcgcttgaacccaggaggtggaagttgcagtgagccaagatcgcaacactgcactccagcctgggcaacagagcaagactccctctcaaaaaataaataaataaatataaacagaaatatagaggaagaaaaggcatacacaccagaagggtagaaataaaattgtctttatttgcagatggcatgattatttgcataaatgattacagaatacacacacacacacacacacacacacacacacacacacaaatcccataactaataagtgagttcaacccagtctcaggatacaagattaacatacaaatattcattgtgtctctataaatcagcaatggccacatatggccataaagggcatcacgaaggatccttgtagagatgaactggtttgtatcttgactgtatcaatattctgattgtgataacatattgtagttttgcagtttttacacctggggaaaactggttaaagggtatatctctgtattacttcttacaactgcatgtaaatctgcttattttcctgataattaccacattttcaaacaaattcataaaactacctcattaaaacaaacaacaacaaaaatctctaatcccttatctcctgacagctacaacattctctctttaaggccttgtctacactcaacagcttcaacagcaattggagaagattgcagagtaagttcctgattaagaaatggaatttactctgcaatcttctccaattgctgtcaccatcattccatagctacagcttttcctaacatccccagtcatctctacttgccaaagtcaatgggcattttcagtcttcactgtgcttgactyctcagcatttgaaagtgttggccatttgctcgatcctaatcattctctttccttccaaggtacaacgtgctcctgtctaatgtaccacatgctcctgtttccctgcagttattcttatgctcattcctgtcccaggaacattgcctgaaatatatgctacttgtctgttagatttcagctggtgtcacttcctcagggaagccctccttgacctccctgattaggtcaaatccctttatcatggtcttttagcacattgcattttcccttggtggtttgtataaaacttgcagattcatattagtctttaggctcctttgatgtgttcgtttgcccttctttcctctaactctactaaggaaggagtcatctgagtttgtgtccaccgtcaattctcagctccttgccttaatgacacatattcagtatttaatacatatttgttaaataaatgcctgaatgacaatatcagaagaaaacttgatttatacgtaaagattttttctatcaatgagtaagagtaatttaaattttcttttttttacaacaggactgcatgagcaacttatataagtcaggttatatgttttatagacagagatttacttttatcagtggaattggacatatttaaatacagaacacctgtatttaagtagtttattttctgagagggaaatttatagcactaaatagatagattagaaaagaggaaaacactcaaatcragaatataagctcctatctcaagaacctaggaaaaraggaacaaaatatgcccaaaaccaggaaagaataataragttaccaaataataaaggaataagtcaggatatatgttttatagacagagatttacttttatcaatggaattggacatatttaaatacaaaacacctggccagctcagtcagtgcagtatgagatgtttaaagtatgcaattcttgaaggaaaattggattgaccagttaaaatatggaaaccaattctgaataatttagtctttacttttgagaggaaaaaattgaatggtacttctttagaaatctacttcattaatagagcagtgattccaatagatctaaccctaaccgtgtatgaacaagaacagatatttggtaggatggttttgccaaagagaagggataaaacacaagcaatcttttcacataggaatgcaatgtacaaacaaatttagctaacagcctagtgtgtatgcgcattcacatgtgtgtgatggcaaatggtgattatacagagatatgctcccttgcctctctcttctttctagtatttcttccctttacmagactgtcatctgcagaatcaaaatccaacacatttctctaaggcaaataaatctttccgtgtcctgcctttctccttatctttgctgtctaccaatgtgcaaaagtgtgtgttgtacacatatttcaatttcatgatacagtaagcccaggcttccacaatgacagtggtgtggttaagcaagaaatgagattactgttccttggctagagtattacrtargtctaaaatggaatgttagtagttactgtttctccttaaatccggctttagagtaagccataaactggttggtataattggtcttgatatagcagttgtcatttttatgtaataacagtcttcttttccagtcaagggatataagtttgctctcattttacatttgtttgtatttcacatatggtatacatcacagcaacaagccttttcaataaattcttcagtatgtttactagattagcaagggcagatggctatttgttaataattcaacaattaactttgaaggtatatgccatactctgccttctcaggcaataaattgaattagagaaaggtgaggatttaaaattctgaatgatggtacaggagtatggtckctggactagaaatactaacatatgtgtggttatcttgctctgcctttatgtacctatatgacttaagcaaattaattaaacctctttggtagttcattttttaatcattaaaatgagagggttgacacacactgtctcaattttcacttttgtgaatcttcttcactttaattggttttcttgaataaatatattatttggtaacttattttattttttaactctggaatttattccaatttcttttcatagttagggaatgctgattcttcaaatatatttactgaagaaaactttcactttaaattagtgaayacttttagtgtttgagaggaagcatactagttaaggctgccatggtatgatttctgacacttctgtttattaattgtgtggcctcaagctgctttactgctttctgccttagtcttctgaactataattatcagtagtaataatacctatggcattcaattggttaatctgtgaataaatatttagaataattcccacgatataatagtgtaatcagttctggatattataagctatagttattattcaaaaacacaaatgtattatttcccagaatagaattctaatatataaacactaaacataaattctcctgtaatccagtcacttaaatgcttgaatattactcacatttcttctttcaaagtctgtttgtcctcataacattgaagaattcaaatcagagcactagaggcagctccctttggagcccattaattctcctctcagcaccaagaaaaaagaaatcagcatacarggatgtgttgattcagctactacgaattttgaagaatgagcagaagatataggagaaaactcggtggtctctccccttgtagatctatcctttaagtgtaggacttgtgagttaaataaaagtgaactcgaaggctttaatcagtgaataacacagagaattccctggctcaccattaccaagcattttaatgtttcacttctatttttttgatggrcattatcattgctagtttttcaactttgcataaaagtttgaaaacttcatagtattcagcttgataatctcttactgaatgctttttcttaaattcatagacagaatggagagtttagataaccctaatgtcacaggacccttgggatgttgcttttccagccagaagcctctgcagctggtgatgctttgtcttgagttttacttgagcctgctgggctctctctgcccacttgtcctggcaggctgtgctcagcttgtcctactggcctggatcccatgcctgccaagggcaagccaggaccaaaatggcaaggggtgtgtgagcatgcaagcgtggsrtscagccactgcacacagtcaggcacactggttgttaatgctggttgggcagctccaggagccactacggacctgtgtctggacgagggaaacatggtggcacatggaagcttggagatgccaggaactgcagagccccaaaaagtttgtcacagccctggcttggggagcccccaggtctgggctgctcaaagggccacagcccttctctccttcttgtcacccataacatgacaagcagggacggaggccgtgtttcagccctgtttgtgctatagctctttcagttcagccatttggtgaatcctgagttcttgtcccatgtcaaggatgcatgagtatgcagacaactggagggtgagcaaggcaaagaggtgctttaattgagcaacagtacggtctctgaagacatgaagtgggtaggtcctgtccacaggcaagaggagacctggagagggtagctcctatctggaggcaggtcatcccaatatctgtgcagcttgcagctgagaggacacccagagtgggtagttcctattggcaggcaagtcatcccattgagtctgcagccctctggaatggataactcctmtctgcaggcaagctgtccctcaactctgtgagtctggctgagtctggggtttttatggtcttcagaagggagaaagtgcatgctgattggcctattagcagccatggatggcctggaaaaagcaccataagttctcactctgggcctgggaccccacccagaactgacagccctgctctcaggtttcaggctgtccctgccttgaaggggaggcttcactggggacccacccctttccacccagaagcctgtctacctcctgctgtcattaacatgttgtccatggcaccctggctgtccatgctgaggggcacctgcaggcatgtgctgaaccatcctcagccccctttgatccccctcctgtgctcgttgacacccagagttcagagggggccaaggaggtagggggctggcatgtttgcagtgccctgagtgtgcacacactcggctgtgttgtgacatcacctggacagggccacaactttgctatgaaatcagagcaggcaccaggagcagggagaggccatgcagcaggagcaggcacttccaagcctgtgtggggacaggggcttcctgggcctccgagaacacagggatggctgggtggctgcagctgcggcccagaggactgggatcctatcccaccagcttggaaagttgtctccacagtaaccattccagatgggccactgctgctgccactaacctttctttatagaatgatcggtatagaaatgaactctgtagtctttatatttgtttaggaatcaaatgggatagtgtagttgaaagtagttcaaacgtttcaaaaatattatttttttataaagtccaatcatgtgttacataaaaatgttttggtcagtgatagatcacatatacattgtggtcccataagattataatggagctggaaatttcctatcatcataatgttgtcacacattgcatttctcacgtttgtgatgctggtataaacaaacctactgtgctgccaatggggtaaaagtataacacatgcaattatgtgcagcacattaatacttgataatgataacaaacgactgtggctggtttgtatatttactatactataccttttatctttattttagagcgtactcctacatattaaaaaaggttaactctaaaacagtctcagacagatccttcaggtggtattccagaagaagtcattattgtcataggagatgacagctctatgcttgccctagtagagcttccagtgagacaaattgtggagrtggaagacagtgataccracaatcctgatcctgtgtaggcytaggctaatgtgtatgtttgtgtcttagtttttaaacaaaaaagtttaaagttttttaaaaattgaaatttttaaaatggaaaaaacttatagaatgaacatgtaaacaaagaaaataattttgttcagttgtacaatgtgtttgtcttttaagctgtcttattacaagtcaaaaatttaaaaaactaaaacatttataaagtaaaatagttacagtaagccaagtttaatttattattggagaaataaaactacttctttagaaatttagtgtagcttaagtgtgcagtgtttatacaatatgtagtattgtacaataatgtcctacaccttcatattcattcaccactcactcactgactcacacaaagcaactcctagttctataagctccatttctagtaagtgccctatgtaggtgtagcattttttatcttttataccatatttttactgttatttttctatgcttaaacatgtttaggtacacagtcacttaccattgtgatacarttgtctacagtattcagtacagtaacatgctgtacagatatgtagccttggagtaagaggcaataccatatagcctcagtgtgtggtaggcttcaccatctaggtttgtataaatacactctgtgaggttttcacaatgctaaaatcacctaaagatacatatgtcagaaagtattctcatcatcaagcaacatgtgattgtacattttatacatgtgtaaataagagtaatcattatcactttatatgtgtggactaaaactctaagccatttccaaatatgcaagtctcatatttgaaaatattgagggtaggaactgctcgcaagttattttttgcatttaatactcttgctaaattatccccaaagtatctttaatgaacatctcaattctgtatttccctgtatctgtaatctccactaagtcatcctatactgtatttttcacatgtacaccttctgaatacttaactsctcccaggcttcattttcacagtgtaattttacctacatggakgtagttatcttctctttgcaagaattttgtatttttatttatattaaccagtttaatttgtttattcctttttcaaggacagggatttgcttcttttaaagacagaaatatgctatttccttttaaaacaagtagccatgattctgctaactagtatattcaactggacacatcatagtccttttcttcccttcatgtaatgggaaataacatttaaaaaaatctagtatatagcaatctgccttctgtgtatatagaatgagaaaaatgatgactcagctattactctgatwyaggctatataatttgatcttcccaattggaaaagattataaagctgatgctagcatcttttagatttttcccatgactagttgttaaaaaaatatttatttttgagttcctttttccctttatgtatgtctatgttttatgttggagctagcaagctcagttattgtcatagctccatcaacaatatttactaatgtctattgtcagctccaaatcatgctagaaggtgatggggaagcagaataaatatcagatatggccttccaccaaaggctctgacaatatattcaaggaattaagattaatataaagtacagaggccrggcgcagtggctcatgcctgtaatcccagcagttcgggaggccaagacaggcggatcacgaggtcaggagatcgagaccatcctggctaacacagtgaaaccccgtctctactaaaaatacaaaaaaattagccaggcgtggtggtgggcacctgtagtcccagctacttgggaggctgaggcaggagaayggtgtgaacctgggaggtggagttckcagtgaaccaagattgcaccactgcacttgcagcctggcaacagagcgagactctgtctcaaaaagaaaaaaaaaaagattaatataaagtacagaaagcaaacaaatcaagacacacctaacaaactcttacactgtgtagaagatgacaatttatttgtaaactacatggtgtcatcacctatgataaatactctacatttaactcttgcatgctggcttaaaaatctgcactaggtttttaagggatgtttgcaactagtagataggaagaactttgtgaatgagacaataacaattaataataattattattgattgagtgttgagtgatcagaactcttctaagcactttttatacattgttttaattataagtacaaactcatgatgtagatattttaagtaccccatttacagctgtagaaactaagaacagagacagcaaataaatttgccagtgacacaatggggctggagctgggatttgaaacaagcttctctggattcaaaagcaggattcccttgccataatctggagagggacaattgggaagtccaattggacttggattgttgtgtagtccaagatacgtggccaggactagaatatcagtgatcagaatattgagaaggaggttagggtgtcaggtggctattgtaagagatgaaaagggagctgaaaatggctctgatgtcttcagctaggacaaccaatataatggcagttatcaactgaagtactacagtaggaggaacaactggtggagagggaagcaatactttttgttttgataatactgagtttgaaggttgtactcagatgtttgtatgacattgtgaagtaagatttgatcaagttaccaggtgaagattgagaacagaaacttaggaaattcttgaggctgaggaagagaaactatataaattgagagttagaaattggagtcaacaggagaatccgaaaagcaaagtgtactaaagaagggtgacragaaggtttttcagaggatgaggatcaacagtgccaagtgctacagagaaaagactgataagacaactgaagagcactttggtgatcagggtatcattagccccttttatgagggcaatttcacaggaaagtttgttgtttcatttttgacatggagaaatctgagcatgtttgaaggttgttttggacaaagaattggatgttatggagggaccaggttttgtgcaacctcaggttgaatcgtagtatgcatatggaatagccacacttcacttcctgggcagaagtctggcagtgtgattaagcaagaacccatttaatttctctgcttgcagcaaagtctcattaatcacactgaataagaaaaaccttaatttgtccctccagtacaggatggcagagtgactgcacatccacatgaaataactcagagatgaaaacagtcctgctagaagcaatgagctacgagctgtatactaggggtaaatgctctctgtgactactgagaatgttaaatatgtcagagtccctaatttgcttagcactgcatctgcagaattagcagtttccattctctgcttcatttacttgacattaatacttccaaaggtaaactttttttaaaggggattagatagactcttatctgctagatagaaacaatggcttattcattgggggytggcttcattataagaccccaaattgtcaactctcagagctaggaaaggacgagagaagaaccaaaccaaaaggatagatctagaccatttaggatacacaccctgccctagtttgttttatgctgctataacaatacaacagatggggtaatttatatagaacagaaatttatttctgaaatatatagaacagaaatatattctgttctatacagttgtgtaggctgtgacattcaagatcaaggtgctggaaggttctgtctcttgttgcaagatggtgccttgtttctgtgtcctccagagaggaggaccatgtatctgcacatggcagaagaacagaaggacaaaagagaacaaactcactcccacaaaccctttgttttagcaccatttgtccattcatgaaagcagagccctcctaacctaagcatcttccaaaaggccccaccttccaacactgttgcactggggattcaattttcaacacgtgaattttgggaggcatgtttcagaccttagtacatatgtatcttcaaaaataatagatttatagatatttgtgtcttggagctttagccatggagaagtctcaccttctcaggcctggacacagagttgtatccttaattgaagaaaggaaatgactcaagcctgaggaattgcaactatgtgggacctaccacaaggagatagtgaagagggattgtcaaaatagcaaactgatagaaagtattaatctgaaccatgtgacattgctgatatttgctttgacttatgaaaatggtgattccatatgattaaagtaatggggagtggggaaagaagacaggttggttggagacctcagattgaccaataaattgttggttctttgagaatatttataactctttaatagaagtgcattaaaagggtagtcttggcaatttacctatcttgtggaacagaaaatgaagggatgttatggtctctacatgaccatctgcagtcttgcttcctccaagctgtttctgagaccagtagaaaatctttaaggagcattttgtgttttgagaggctttcatatacttcgacaatttttgtttatagacgcttattagaatcccatagaagctattgactcctcttccataggaaaatgaacatatgtacataccttaatttaatttcagaatatccatgaactcctctgaagttcgagtcaggaactccgtatctatgaaattaacatataatcttctcaagtagtgatacaaccaacgaaaacactggatgagagtgatactctttaaaggtctctgggtaatacataaagagcttctgggtcagagctaatccttccatctttggagaaaggtcagttgtactcagggtgctatgtcctataaatcatgacatttatgtccagtctagagtctggtttatagggcaaggcataaataattaaggacagtgaagcatttctccccagtaatttcccctgtatatggtcataatcagatttcagttatcattatattcacttgttaacacttggatttagctcatttatttataacaaatggagaaaattagaaacagctagtgttacattctaggctcatccattagggcaaccaggcaggttggtattgaaaaatagccttgtctgagataatgtctatcgaaggaccatgtatcagttctaaatcctggccgcagattagaattacttggctgcagattagaataactaaaacacaacagtgctcagcccaaatcaaggccaattgaatcagaatctctggaagtgtgaccagacattggtttcattcaaaatcatcccaagaagttctactgtatatttagggttagtaaccactggatttgagtaatgttagatggtggtgtgaataagatggagaaaggcaagatggcagcctatccttacaggtgaggcctacagaatgatggtacatcyctagcaagtaagaatcaaggaagtcagtctgatctgaatcagattgtatttataagtaaattttcaattattaaaggagcgtctgccataacacaaagtccttcatctgaggatcttaaggcataggacaattatcccatttggctttaaagcaacataatgttttgaaaattggaacaaaataatgtgagttatagagaaaggggcattgagaaagaaaaggcccatttttgaagagattgtacaccctcttttttcatactttaaaacttacgaaagggaaaacattggaaacctcaccatcccctgttccagttttacaatttatctcccttgaaggttgtcaatcttatatgttatgatagttaattcatatatgagcaatgtcttttattgttttttaatacaaatggaattgtryaaatgctatgcatactattctgcattttaatttttttttcactaaatagtatatcctggataactgcttatgttttaacaagttttaagtttaaatgttgctgtcccaagcactcatcccttgataaagacacatgacctatagtagaaattcaacaaatgctatttctagttttatcactctcctgaaataaacaaaacaactctctgcatcacctatctgctgaaataaaatttgctactagtcgataaaggatgctgctgtcttcaccttagaactgctgtggaaacattccttgggtgacatttctcaaaagtagtgctcagaaagagactaaatgtatytctaatcctgccacaaaaaaagaggcaaaactgcagttgactcaaaaagttttatatcagtgtctgggaaatcacaagtagycttaacctcaagacctgaagaaatgggatcataggattaatcataggattaataatraagcaaatttttttgcccaaagatttaactctagtgtttaattataattttattttgctaagtggttgtatttcactgctttcctgtgttgaaaacttaacctcagtagcaaatatgtgagaagacagtaactggttttctgactggggccttgtcatctacaatacatattaatacaatgaatcataactggtagaaaagtatatatggatgttaacattaaggcattttggtaactgttttggtttctgtgctttgtaccattgttagccacattataaatcttgctaatattagcarttgatgttttataaatctctgaggttaaattttataatttctaacagctgaaagcttagaattttggcttcrtcattgtagacatccctttctgcctttattatctaggaagcaactaataatgtagacttagtttgggagaaaggaattaaataaacaactggtaaccacattgatttgagtttgaggagctttaaagttggtatttttggctgcattattgcttttggtgtgtatgttgtttgtttaaaatccctgcattcttagaatcttcttatttctaaattgaatattgtctgggttatttccccttaatgaaaaccaagttctagaatcaacgtctttttctttaggcagttcagtatgcttagtgtgttactggctacctttaaaaagcattgtgaagagattttattgcttatgtgtgcatgcttgtctatgtgtgtgtgcgtgtgcatgaaggcaggagagaattttaaataaaataaataagccattgagccwcttttatttactgttaataataaaagattcttacaggctttgcttcagctttctgaagctactagtggtggtaggtactgagaacatataagtcctctgtttattactgcattctttctgtttattggacacaaatagcttgcagcatatattatgcaatttctaataatattatcccatacacatgagaatgtatgttccattaaagcaggaccttatccggcttattcacaaaatcgttcccagaatatttattaaataaataaatataccagtgttgctcactttattatttgtttgtatgtaaacaacagtttctgatgaaagatcttgttctatgctgcattatattacctgaagtgtttacattattcagggcttaatatatatgttaatcatcagactatttttgaaacaggtaatttccttaatttcataattgttttaattgaatttgacattgaatagaaggtcttaagaaagaaaaaactaaagtatataaatattaagttaattttaaataggaaaacattttattcataacattgaattatcttctggggaatggacaataaaacacaaagcaattgaactttttctatgttcaattaacttatgaaagaacattgtgggattttatgaatcgcttctttactattctaayagtaatgctacattatcatgatttttataatccataagtataatattgacgaaaattagtttggtacagagtcagacttgcaatagaagttaaaatcctatattataaaaagtatgatgtagtttttttactaatacagtcatatattacttaacaatggagatatgttctgagaaatgtatccttaggagattttatcactttgtgtacatcatagagtatacttacacaaacctagtggtatagcctactacatagcagggctacatggtatagtctattgctccaaggctacaaacctgtacaacatgttactgtgttgaatactgcaagcaattgtaacacagtggtatttgtatagctaaatatatctaaatatagaaaaagcgcagtaaaactatggtatcacgcctgtaatcccagcactttgagaggccgaaggcaggcggattgcctgaggtcagaagttcaagaccagcctggctaacatggtgaaacccagtctctactaaaaagacaaaaactagctgggcatggtggcaggttctgtaatctcaggtactcgggaagctgaggcaggagaatcccttgaatccgggaggcagaggttgcagtgagccaagatcctgccactgcactccagcctgagagtgaggctctgtctcaaaaaaaaaaaaaaaaaaaaaaaaaaggccctggtgatccatgcccttttttttagtgtaacaatggactgctaagacactcgctcttttaaaagagcagacaaaattttgcctatcacagcaagtttacactgatgtgtgcctgctgtatgagcacatcccagcacagttgttctgtccctggaatccttaattctttaggggctgtctcatccgctgtagtatttcgggcatgcacctgtgtctttctggcgtgcacctgtagtcccagctactcgggaggctgaggcaggagaattgcttcaacccaggaggtcgaggttgtagtaagccaagattgcaccactgcactccagcctccacaacagagcaagacactgcctcaaaaaccaccaaaacaaagcaaaaaaatatggtgtcataattatctaaaacattgctatatggtataggactgtattttcaatatttgatctgcatttaatatcattaaacataagaaattggaggcactgtaaaatactgtgtcctccttgtaggtggtcttacatggtatatcattttaattatgatattaatatcaccctttaatgagtaattattttctcatgacactggcactgtcgtagaattcaatttcagttggctataaaatatctttcttcagtggaggttaaattatcctacattattatctcagtgcctttagcttattgagaaaatattggcaaaatgatttattcttatttagcaggcaagtaaatggaagcatagacagggtaagtcagttgcacaaggtcaattaataaatcattttcacttgggtgagatcacgttttctaaggcacagtgtcatactcaaggaactgatcagtgcctgagacatatcnnnnnnnnnnnnnnnnnnnnaaaaataaaatgtttaccttgtttgttagaaagaataaagttgtagcactcatttcagactgatgtactaaagccttcaaaatttgtgagtgaaattatgtacatgtgttgccaggctgtattttgcagctttttgtattatttgcatgtgttgatttgtatgaagagtaatgaaataatttgaaatagtgctttagactaaacagttgtgataataaaaatgaattttcagctgcaggaaatactttcttggtattaaaagagcaaaatagaaagcaatagaacataaaacagattgaaatagttttttttaagaaaagaggaacataattacactaaataatattaaagaaaaccatttaaaaataataaaaaaatagtgtcctatcaatgatctaatcaatgagtattgaatctaaattattggacaactatcttatacctcatttatagtccattcctttttctaaattaagaaaaaattaataggtctaactgtcatgatatcatcatttttttgttgttccctatttggggacattgttgagtttgctactagcaaatcctttgctctttttaccttagttcagtgtttcctacatgtcatttacagagtttcatgggaaacagagatcgagaatttaatcacagaggtttwggaaatattagatacagttacccttctcgtagaaattagtaatacatcttaacccttttaaggtttcaagaaatgatctaagattaaaacaccctgttgccatttgtttgcctccaacttccacaaacggattttggwtatatatatatatccaagacatttattaacattgcaggcatcttgctttagaaacacaggaagaggtagcagtgatgaggactgattatggaagaaggggatgtggcttggccaagataggttttatgggttagttagaatgtttggaragttactgacttatttcagtaacttgcctattttccacttttcagaaacatcaactaaacctttctttgtcttttgaattgtatggcttgccaaattgtgagatttttatgcatgattttccattgaacatatacaatgttattttgagtctgtggaaaacatgcactttggcacatcttattggattatttttaattcataggagttacttttcttggagtgagacatttaactgaaaaggtcattgctcaggaatcactgctttttcagatttttcttttttctcaaatgttttgagaaatactgttgtcatttttaatagtgatcatgaaaaatacattaaagttcaaaattcataacaaccatatatagttttttttggcaaatacaagaatgttttatattcttaatttgaatgtggtatgtatttttaattctttatttttcaaaacttgatgaagaaaaaattgtaatttgaaaggttttaggatactaaaatggagcaaacagtctctgttatgcctgggtatttggtttgctttatttgtgatagaacatggaaatattttaaaactaagatttgttgaaaaccccttattattaatattgttgtgttaaatgtataactattgaactgtcagtgaaatatgacacattttatccagtgacattttaaatgaatctcattgtaggggaagcctgtgggaacaccagatgctggcgcttatttccgtgtgcttgcagagcatggagtagctgccttgtttacagcaccaactgcaattagagcaatccgtcaacaggaccctggggcagctttggggaagcagtactctctgacaaggtgacgttgggatgcacagggcaaatgacattagaaagtgcaatcaaaatgaataagtgaacattattttttttctggtactggaatactcttataggaagagccaaaagattcagagtgttattaagaacaacttgtctaaatataattttgaaatagttggaattttaactctgcttagagattttaaaatattatatcatgttaatttcagttcaaatattatgaaaatatttctttttaaaatcactcttgttatattttccttaaaaggtaaaatgccaattctgacttaaaatgcacagatagatggatacagatgtactaacatctgccttttgaaaatagaagaatgggttaaatgaaggggcaatatttgaatgcatgtatacagataaaatgtgaaaaattatagtccaaattaaatatattaaaaaagtgaagaacaaagagacttaggtaaacacagaataatagtgggagacatcaggaccacactgacagtattcaatagatgattgaggcagaaaactaacaaagatatttgggactccacactcaatcaaatggacctgacagacatccacagaacactccacccarcaacaacagaatattcattcttcttatctgcgtatgagaaatactctaaaatctaccatgtgctcagccataaagcaattctcaacaaattaaaaaaacataccagtgacactctcagaccacaatgaaataaaaatagagattaatatcaagaagctctctgaaaatcatacaattacatggaaattaaacaatctgctcctgggtgacttttgggtaaacaatgaaattaaggtagaaatcaagaaatcctttgaactgaatgaaaacaaatgtacaatataccagattctctgggtcataactaatgtagtgataagaggaaactttatagaactacatgcccataaaaaagttagaaaaatctcaaattaacaatgtaatgtcacaccccgaggaactagaaaaaccagagcggaccattcccaaagctagcagacaaaagaaatcaaccaaattagatctgaactgaaaaaaatttagatgctaaaaaaccatatgaaagatcaataaaaccaaaagttgagtttttaaagaataaaaatcttgataggccactagctagactatttaaaaaagagagaagatccaaataaacataatcagaaatgacaaagggaacattagcattgattcaacagaaatgtaaaaaatcctgagacaattacaaatacctctatgcacacaaagtagaaaacctagaagaaatggataaatttctgaaaacatacaatctcttgagattgaaccaagaggctgggtgctgtgtctcatgcctgtaatcccagcacactgggaggccgaggcaggtggatcacgcagtcgagaccatcctggccaacatgatgaaaccccatctctattaaaaatacaaaaattagccaggtgtggtggtgtgggcctgacctgtagtcccacctacttgggaggctgaggcaggagaattgcttgaacccaggaggtggaggttgcagtgagccaagatcacgccactgcacttcagcctgacaacagaatgagactccattacaaaaaataataatagtaatacaaaaataaaaaaaaaattgagcccagaagaaattgaaacccttaatgaaccaataaggagttctgaaaatgaatcagtaataaaaaaaacctaccaaccagaaaaagccctggacgagatgaattcacagatgaattctaccaacataaagaagagctggtaccaaacctactgaaactatttcaaaaagttgagggggagggattccttcctaactcattctataaggcaagcatcattctgataccaaactctggcagagatgcaatgaaaaaagaactttaggccagtattcctaatgaacatagatgcaaaaattctcaacaaaataccagcaaactggaacgagcagcacatcaaaaagctaatccaccatgatcaagtaggctttactcctggaatgcaaggttggttcaacatatgcaaatcacaaaatatgagtcatcacataaaaataactaaaaacaaaagctgtgtgattatctcaatagatgcagaaaatgacataaatawaatttagtatcccttcattttaaaaccccaaacaaggcatcaaaagaacatacctcaaaataataaggctcatctataacaaatctacagccaacaatatactgaacagggaaaagctggatggattccctttgtaaaccacaacaaaacaaggatgtgcactgtcaccactcctattcaacatagttctggaagtccttgacaaagtaatcagtcaagagaaaaaaataaaaggcatccagaaggaaaagaggaagtcaaactatctctctttgcagataatatgattctatacttagaaaaccctatagtctctgcccaaaagctcctagatctgataaacaacttcagtaaagtttcaaratccaaaatcaagagcctctgcacagcaaaagaaactaccatcacagtgaacaggcaacccacaaaatgggagaaaattttcacaacctactcatctgacaaagggctaatatccagaatctacaatgaactcaaacaaatttacaagaaaaaaacaaacaaccccatcaaaaagtgggcgaaggacatgaacagacacatctccaaagaagacatttatgcagccaaaaaacacatgaaaaaatgctcaccatcactggccatcagagaaatggaaatcaaaaccacagtgagataccatctcacaccagttagaatggcaatcattaaaaagtcaggaaacaacaggtgctggagaggatgtggagaaataggaacacttttacactgttggtgggactgtaaactagttcaaccattatgaaagtcagtgtggcgattcctcagggatctagaacttgaaataccatttgacccagccatcccattactgggtatatacccaaaggactataaatcatgctgctataaagacacatgcacacatatgtttactgcagcactattcacagtagcaaagacttggaaccaacccaaatgtccaataatgatagactggattaagaaaatgtggcacatatacaccatggaatactatgcagccataaaaaatgatgagttcatgtcctttgtagggacatgggtgaaattggaaatcatcattctcagtaaactatctcaaggacaaaaaaccaaacaccgcatgttctcactcataggtgggaattgaacaatgagaacacatggacacaggaaggggaacatcacactctggggactgttgtgggatggggggaggggggagggatagcattaggagatatacctaatgctaaatgacgagttaatgggtgcagcacaccagcatggcacatgtatacatatgtaactaacctgcatattgtgcacatgtaccctaaaacttaaagtataataataataaaataaaaaaaaaacatttctatacaccaattatatccaagctgagagccaaataaaaaatgccatcccattcacattagcaatgaaaagaataaaatacctaggaatacacctacaggtaggtgaaaaatctctacaattggaattacagaacactactgatagaaattagtgatgacacaaatgaatggaaaagcattccatgctcatgattaggaagaatcaatattgtaaaaatggtcatactgtctaaagcaatttacagattaaatgatattcttatcaagttaccaatgacacttttcacagaagtagaaaaaaactattctacaattcatatggaaccaaaaagagctcaaatagccaaagcaatttgaaacaaaaagaacgaagccagaggcattatactacctgacttcaaactatattacaaggctacattaactaaaatggcatagtactgcctctgaaacagacacatagaccagaggaacaggttagagaacccagaaataaagctacagatgtaccaccatctaatctttgacaaacttaacaataacaagcaattgagaaaggactccattcaataaatggagctaggataactggctagccatatgcgtaaggttaaaaccagaccccttcctttcaccatatacaaaaatcaactcatcatgaataaaagacttaaatataaaacctaaaactataaaaatcctagaagaatttatacaaaatagcattctggacataggccctggcaaagatttcatgatgaagactccaaaagtaattgcctaaaaaaaaaaaaaaaagaaaaagtaaaacaaacacaaaaaaaaacccagaaactgacaagtgcaattaaactaaaaagcttcaggacagcaaaagaaactatcaacagagtaaacagacaacgtagagtatgggagacaatatctgccaactacgcgtcagagaaagatctaatatctggaatatataaggagcttaaacaattcaacaaacaaaaaccaaacaaccccattaagaaatgggctcacgcttgtaatcccagcactttgggaggccgaggtgggcagatcacaaggtcaggagatcgagaccccagtgaaaccccatctctactgaaaatataaaaaattagccaggcgtggtggtgggtgcctgtaatcccagctactcggagaggctgaggcaggagaatggcgtgaacccgggaggtggagcttgcagtgagctgagatcgcaccactgcactccagcactccagcctgggtgacagagcgagagagactccgtctcaaaaaaaaaaaaaaaaaaagggcaaaggacgttgcattagtccattctcacattgtwtaaagaaatacctgagactaggtcatttataaagagaagacgtttaattggctcatggttttgcaggctgtaaaggaagcatgatgctgtcatctgctcagcttctgagaaggcctcaggaaacttggcaaagacatgtgatcaagctaaatgcccatcagtggtggactggataaagaacatttggtacatatacaccatagaatactacacagccataaaaagagtatcatggccttcatggcaatatggatagaggtgtagaccattatcctaagcaaattaatgcaggaacagaaaaccaaatactgcatgtttactcttctaagtgtgagctaaacattgagtatgcatggacacaaagaagggaacaatagacacaaggggtagagtgtggaggatcaggatcaaaatactacttctcaggtactatgctcgttacctggattacttgataatctgtacaccaaacaccacaacacacaatttacccatgtaacaaatctgcacatgtgacccctgaacctaagatacaagttggataaaacaaagtgaagaaaaatattttatttttgttttgtaataatgtgctttgaatagtctaggtatttttctgctggcttatggatatatctatatctatctatccatctatgtatctatctatgtatctatctgtctgtctatatttttaaatcgagacagagtctcactctgttgcccaggctggagtgcagtggcatgatcttggctcattgcaacatttgcctcccaggttcaagcgattctcctgcctcagcctcccaagtagctggaattacaggtgcctgccaccacgcctggctaatttttgtattattagcagagacagggtttcactatgttggccaggctggtctcaaactcctgacctttggttatctgcctgcctcagcctcccaaagtgctgggattacaagaatgagccactgcgccaggtcatggacctacatttttatttaatctgatgcataatcaaagataattatagcaagttgcatcttcaaggagaatgccaacatcaatctcattgaacctctttgaattagtttactatcctataactaaaagaagagatttatagtttactgaagtcaaaaagtgggcttgaattaaggctgcttatattgtataagtgaaatgccagagtattttacttttatgtttctgtggcccaagggaattaaaatagatattatgccctgaatcccagtgtcactgtgactgcctgtgaaccatgtcagaaccaatatcaacaaaggcctcttcagctaagacttcccagtgttagaaagacaagaacagtaggatctctaaagcccttatcataatagcctacacaatcaatatcactgccacaaaatcatgcagccaggtcactaaggcatctgcagtcatcactaacactgatctcacctggagaagctgtatggagactacaccactgcacccacctagtaccagaacaactgcactctgcccaaccgatgccctccagcctgtcgtcaggtgaaagtttttccctatgaaagtcattctctgaagtttggaagaggagactgtaccagaagatgcgcaagcattaatgtgggaataccagaaacatgaaaatgcaagggaacatgatgccaccaagggaacatgagaatttcccagtatctgacccccaaatttacagaaatttatgaagttattgaaaaggaatttaaattaatgatcttaagaaaaccaagagagacaaaatagtatacaaatagaaaattcaatgaaatcagcaaagtaattcatgatctcaatgacaaattcaacaaagaaatatatatcataaaaaagaatcagaaatcttgaagccaaagatttcaatcaattaagcaaaaaaaaaaaaaaaaaaaaaaaagcaatagagagctacaatagtagactagataaagccaaaaaagaatctgtgaacttcttgaaaatcagtcttttgaaatgactcattcacaggaaaaaataaaaaaagaatgaaaaggggtgaagacagcctatgagatttatgggaygtcattaagtgaagaagtattgcattatgttctttaagaagggaagagacagagaaagggactaacagcttatttaatgaaataaattatgaaaaattctgaaaactaagtcttgggagagatatggatattcagatccctaaagcgcacagatcccaaaatagattaatctaaagaggcacattataatcgtattatcaaaagtcatatacagagagaattttaaaagcaacagagaaaagcatcaaattacatataagggaatttccatagaacattagcagatttctcagtagaagccttacaggccagggkaaaatggcatggtgctgaaaggaataagaataaaacaaacacaaaactgctagccagacatgctgtccttcaggaaagaaggataaataaagtgtttcaaaaataaacaaaagctgaaggaatccattatcattagacctgccttataagaaacaattaaggaagtccttcaaggagaaacaaagggatgattattactaacatgaatacatacaaaagtataaaactttcttctagaggtaatggtggtgcataaatcatacctacacctagtatgaaggtagaaatcaattaattcattaataatagccaatacattggttagaagcacacaatgtaaaaagatgcatattttgacatcaaaaacaaattgtgtatcaggaggagcataaaaatctagagattttgtatgcaacagaagttgagtttttatcagcttaaaaaagtatatctgtaagattgtaaccaagctgcttagcttcaaactgcattttaaaaactgtttttctttctttcctcttctctccccagtctcaggacacagcattgagacaaactacaaatgcattttctagaacgtactgtgaacctccattctctttccctttccactttatccaaccatgccttatgcacatttatttacctaaatgcttgtcaaatgcacatcatgctcacttatctggtcatgtattttcttagaagcttcaggacatgaatactgacacagaacagacacctccagaattctctccccatacagaccaccaaaaattttaactggcaaagggtccagctgctcactgcttgtagaaagaagccaaaataacaagagtgaggtgtgataaaaagagaggagactttattatccatgctggcaaggggaaaagtggaaattattttggaagaattccacccacttttccccgtgttagcacagacaattaaaactcctctctttttatcacactttgttttgtgattttggtttctttctacaagcggcaaacagccggagcctttgctggttacaagatgttttatgtaaacctcatggcaaccacaaaacaaaaatctacaacagatacacaaatgataaagagaaaggaatcaaagcttagcactacagaaattatcaaataacaaaggtagacaacaagaaaggaaaaaggaacacagaagctacaaaataactagaagataaataaaatggcagtagtaagttcttacctattaataataactttgactgtaaatggattttgttccctaaccaaaatcatgtagttgctgaatggattaaacaagattcactgaagtgacccacttaggccttaaggacacatgaaggctgaaagtaaaaagatggaaggggaacatccatgtaaatgccatccataagagagcaggagtggttatacttacatctgataaaatagacttcaaatcaaaagctgtcacaagagacacaggtcattttttaataataaaagggtcattcattaagataactcaaccactgtaaatatttatacacccagtattggatgagctaaatatataaagcaaatatcaatgaacatgaaaagacaaatagatagcaatacaatatggtacttcaaaatcccactttcaacaatgaatagatcaagcagacagaaaattaataaggtgatactggacataaattgaacttttgacaaaattgccctaacagacatatacagaacttcccttccaacagaagcagagtacttattttcctctagtgtacacagaacattctccaggatagattgcatgttaggccacaaaaaaagccctaacaaacttaataagattgaaataatatttagtataattttagaccacaatgatatgaaactataagttaataactggagtaatcttgtgtagttcacaaatatgtggaaattaaacaacatgctcttgaacaatcaatgggtcaaagaagaaatcaaaagaacaatttaaaaacatcttcaggcaaatgataatggaaacacaatataccaaaacttatgggatgcagcaaaagcagttccaggaggaaagtttatagcagtaaatgcctacaattagaaagaagaaagaccccaaataaatattctaacattacccctcaaggaatgcaaaacgaataaacaactaaccaaaaattagctsatgggaataataaatatcagaacagcagtaaatcaaatgaagtacagaaaaaccataaaaataattaataaaactaaagttcactttttgaagaacaacaaaatttacaaactcttaatgaaaagaagagaaaagactgaaataaataaaatcaaaaataaaagtgaagaaattctaacaggcttctcaaaataaagaggatcgtaagggaatattacgaagaattatatgccaacaaattggataaactagagaaaatggataaattcctagaaaaatataagctaccaatattaagtcaattaaagwgatttgagaagwaatcaaaacccttcccacaaagaaaagcccaaaaccagatgattttagagctgaattttaccaaacattcaaaaataatttatatcaatatttctaaaactcttctgaaaaataaagctagaagtgtacttccagacacattttatggggccagcatcatcttaacacctaagttagataaagatatcacaagaaaagtatggttaatttctctgaggaacattcatgcaaaaattcttagtaaagtattatcaaaacaaatccaacaacacatgaaaagattatacattgtgttcatgtgagatttttccatggcatgcaaaactgatttawcgtacataaatctatcagtgtgatacatcacattaacaggatcatcataattaacataaaaaaagcattcaacaaaatccaacatcctttcttgataaaaaccttcaacagtttaggtatagaaggaacgtttataataataaagactttatgaaaaacctacagctaacattataatcactggagagaactgaaaacttccactaagatctggtaaggcaaggatgcctactcatgccacttctattcaacataatactggagtactagcaagaacaatcagacaagaaaaagaaattaaatgtatctaattgaaaaagaagtaaaattatctctatttgcagatgatgttgtcctatatgcaaaaacctccaaagataccacaaaaacrttattactaataaatgaaatcactaaattgcagaatacaaaatcagcatacaaaaatcagtggcatttttctacacaaataatgatctaactgaaaagaaataaagaaaaaccccacatacaataacattgaaaagataaaataaaatactttggaataattttaaccaaggaggtggaaaactatattggtayggtaaaactttacattaaaactataaaatattgatgaaagaaattgaagaaaacacaaataagtggaaagatagcccattgctcatggattggaggatttaatattattaaaatatccatactatcaagagcaatacacagattcaatgcaatccctatcaaaatcccaatggcatacttcacagaaatagtaaaattatcctaaaatttgtatgaaaacgtaaaagaccccaagtaggcatagctattctgagaaagaacaacaaagttggaggcatcacacttcctgatttagaagtatattacaaagctatagtaatcaaaacagtagcttactggcataaaaacataaacatagatcagtgtggcacaggacagagaccccagaaatagatccaaacgtatatggtcaactaagtcttgacaagcacaccaggaagacacaatagggaaaaatagtcactttaataaatggtgttggtaaaactgggtttccacatataaaagaaggaaattggatccttaacctacattatacacaaaaatcaactcaaaatggataaaagacctaagtataagaccagaaataataaaacttctagaagagaacatgggggaaatgtttctggctgttggacttggcaatggttttctgtatttcatatcaaatgctcaggccacaaaagcaaaaatgaataaatggaattacatgaaactaacaagctctgcacagcaaaggaaacagctaacaaaatgaaacagctgcctatgaagtgggaaagatattcacaactcatatatctgataaagggttaatatccaaaattttataaagaactcatacagttcaatcgtggaaaaactaataacctgatcaaaaaatgggcaaaatacctggaaacacatttctccaaagaaggcataaaaatagccagcatgcatatggaaaggtgttcaacatcattaattatcagggtaatgcaaatgaaaaccactatgggatatcacctcatatccattagatggctattatcaaaaagcaaaagataacaaatgttgacaaatgtgtagagtaaaggaaactcttgtactctgttcttgagaatgtagattgttacagccattttagaaaacagtatggaggtttctaaagaaattaaaaatagaactaccatatgatccagcaatccgtcttctgggtatatactcaaaggaaatgaagtcaccacctcatgaacatatttgcattcccatgttcattgtggcatcattcacaatagcaaagggatagaaacaacctgtgtctgttgataaacaaatggataaagaaactgtggtacatatatacaatggaataccatttcgttctaaaaaagaatgagattttgccagttgccacaacatagatgaagctggagacactacgttgttaaataggtcagacacagaaaaatattacatcatctcatttatatgttaaattttaaaacaacaacaaaaaaaatcaaaaatacagatatacagaagaaaaccatggttaccaggattggaagaaaggggaaatgaacagatattcagatgaacaggtcagaggatacaaagcagcaggtatgtaagatgaacaagtctagagatctagtgtacaacatataactttccaactttagcaaccaccattattaaaattaaacaagaaaatgtacaagcaaaaacttaatttcttcataaagttaccaatatttatttctaaaagctcttagagatacctatgtcttatctactgcacaaatatgagctcatattcagagctaatactccggttagaatgataaaatgacaatgcctgtatgtctggctgtctttgagtttgtggtggagttgcatatcagcatttcaaatatccagctctcattattactaaatcatttttttcatatagctaccaattaccacaacagttgtcaaatcagacaagtaaataatataaacccgttttgtgaaaaaataaaaaaaattatagtttatacaagttaaaaaagcattacctctatctgtttcctatattttaaagcaacaagggttgtttgagtatatttttatccctctggtgcttagaataaaaattttagtttaggaggaagttttttattaaattgagaaagcaagttgaggctgatagcagagaaatggttgctatcttatttgtgtatgtatgactcaaggttacgcaggtaagcctgaggctacataaatatgaatgtgcccaaatctggaatgattttaaatcctctaatgatgtagaaagcaggaaagcaaattagaaggatgacattattgctaagcaaatttgagaataggatacctctaaagggaagtaaattatattcactggctaaaaaaacttatacttttttatttagtatttttttgaatttagagatattcagagtatctcttctgtgatatgcttgataaaagatattgaaaagtgttgttattgaacaaaccttaaaatttaaagatgrtatatatctctgataggttagtaaataatgaaactgatctagccttaggaatatgagaattttcatatattatatcaaaataatatttatggtttcaagtttatgtcattactttaaaaaatatttcatatgaagtagaagtaatttaatagggaactatrcatacatttatattttaacttttattgaggtatatatacagaaaagaacataaatcagaattttaaaagttataattattacaaagtgaacatatccattgaacacatccagatcaagaaatagcacatatcctgcatcgcagaagccctcccttttgtcctttcccaaccattatctcttcttggcttcccaaaaatatgccttatcctgacctgtatcactgtatattagttttgcttgtttttttgaacttgatataaatggaatcatacagaatgtattctttgatacctggcttctttcatttacttaatgccttgagcttcatccataagtttgcgcgtcaaagtggttcttgcattttgattgctggttagatcactctttatgagtatttcagtttatttacctattttgctgttgaaataatttttacttttattttttaagttggcagatacagtcatacatttactccgtacaacatgatgttcaattccaaagtatagatacactgtggaaggactaaacctagctaattaacacatgcattacctcacaaagttaccatttttgtggtgagaacactttacatttattctcctagcatttttcaaaaagaatatattaactttagtcatcatgttattcccaaatcatcttggagttattccccctatttaactgaaatattgtagcctttggccaatacctcccaactaccctctccccctccaaccaycctggctgctggcaaccaccattctattctctatcagatcagcagttgmattcttttttgattgtttctaattttttgactcttatgcagttgcagcattaataatacatgtctttttggtgtccatacacatatagtgctgttgagcatatataactaaggtataatggttacattacagagtatgtcaaacagttttccaaggttattcaccaatttacacactcacttgcagtgtgtgattgttctagagtttccatgtcttcaccagaacatgatattttcagtattttaaattctagccattctgattgtcatgtagtgatatctcattatcatttaattttcatgtcaaagttgttaatgaggttgaatgaggttgatcaccttttaataattttttggccattggaaggtcctcttttataacatgcttattcaagtcttttgcaaattttattttctctttcttgttaatttgtaggagtttttcatactttattttggatccaagtcctttactgacttatatgtattataaacaatcttctccaacttctgacttaaattttccttttaccawcacagtggtgacttctgataaaaagatgtgccttcttatcaatagttttctttttgattactgcttttcaagtcttatttaagacataggtgtttktcctgtatttcattttctagaaattttattgttcattttacctttcatacttacaactataatctacctggaatagatttgtatgtatgacatgaagtaaggcgctgagttttatttttttccttatgtatatccatttgatcaatttcgatttatttaaatggccgtccttttctcactgctgtgcagcaacacttttgtcatgacagtgcctacaaatacctcatttgcttcttgattctattctgttccatcagcctacttgtttgtattcacattactcttacattgtctttatcattatagatttataacagatctttatctactattaatatatcaagcttattctttttcaaatttgttttgaatattcttggctcgttttatttctgaacagattttagtatcagcctagcagtttcaaacacaaaaacatagagatagagagagagactttacattgagtttacagattgatacagtgaaaaagtccatgttaacaagtatatctctttgtttatttaggactttaatttcactcattaatgatttttggcttactgtgtgaaaatcttgcatatctttttatatttaagaaattttatttttatgctatggtcaatggtattgtttacatttgcattgtttggtcctgatataacaacatgtaactgtttttgtataatgacctactttctgaagctcttccctaggtcacttactaattgtagtagttttaatgtatatatgtatgattgtattatgtacagagtcatgtagtttgagaaaagtatcaattttatttcttcttttatgccgtttatttctttttcttactttattcctaggatcctccagtaaagtatttaatagaattggtggtaaagctcatttttgtctcatccagattatcaggaagaaagctttcaatattcattattaaggaaaatgattttagcgttttttgttattaatgtattatttgtttggagaaaagctatcaaattaacaaagtttctatttttggtgtttgggattttatctatgttttttcttcatcttctgatgaccatgtgacttttccccctcttattgtattaggagttaatgtggtgaattatagtgactgatttttttaagtgtcaaataattcttacaatcttgaaataaatacatcttggttaatatattatgctttttaaatatagctgaatttaatttgctgacattttgttgaagattttttttttggtagaccttgtttttagagcaattttagatcacagcaaaatcttgtggaaagttcagagcttctatataacttatgttttcatacatgcacagcctcccctactatgaacatctcacattatggctgtatctcctttaaaattgatgaacctatattgatacttcattatcatccagaatccataatttaaatatattttcattcttggtattgaacattctatgaagtttaagtattgtgacatgtatccatcattatagcatggttttacctgccctaaaaatcttctatgctccacctgttatccccctcttcctttctatttttggagattcctttaaaatctagatttttagtcaagattgatctctaattttcctttcttatactcttactggttttggtttcagggttttgctcgtctcataaaatgggcatggaagtctttttccccgctattatctagaagattttatgtacaattaattttatttaaatgttttgaagtatttaaaaatcaaataaaactctctgggccagaagtgacattatgggaaggtttttaagttatgaattcaatttcctgtgatgcagactgcttcttaaatctgtggcttggtatctttcacttattttcagaacttttccatctcttcaaatacttctactttattttcccttcttaaactttgatactttaatgacacatatgttagaactttttaccatatcacctatatttcacaggctctstttgatgatttttctgcttttttttcacagttgcagttagatgattttattgtaacctctagttgtatctaaactttcattgagtttataattcctaaacatttttcagtttaaatattttcatttgattctttattataatttccagttctctgctaatattctacgtatatttcctgaacatattcatccgagttatatttaagtctgtagcaaaaataactgattttatgtgtgtctttctaatgtctcttttttcttttgagagtttaatcatatggtcttgtcttccattatatcactgttataagaaaatagctattttggccgggtgcggtggctcgtgcctgtaatcccagcactttgggaggctgaggcgggtggatcacgaggtcaggagttcgagaccagcctggccaacatagtgaaaccccatctctactaaaaatacaaaaaattagccagacatggtggcgggtgcctgtaatcccagctacttgggaggctgaggcaggagaatggcttgaatctgggaggcaaggttatagtaagccgagaccgtgctcttgcactgcagcccgggcgacagagcaagactccatctcaggaaaaaagcaaacaaacaaacaaaaaacagaaagaaaaaagaaaatagctatattgagataccagatgttttaatatccccacagagtggttcttattctgacaggcaattgtcttaagggaagatcacttctattcattaggaatggagctgacttgaagctagactccaatatttgagagggttggtttctttccagtttacctccattattagctatacctcttcaggtgtgcaaactgaatacctgggtgttttatgtcaccttttttccattgtgaattttaatcttcgattttcctttcccaagaaattattatgactggatttaccatttagtttcaacgcctgtcagtcagccacatagtttttgttcagtttctcagctcttcaattactgtttccaattagcaagtgtcccaagaaggaaaacagttaagacaatcagtcttatgtctctctacatttttctttttggccttttgatgccttaagtgctattgcctttgagttctctgatgtattcaaaaggtatttcatttttatattttttccagcttgtttggttgtacttgagaaaaagagagagatagagggttgtacttgaaaaagggagagagagagagatgagaaagaaatgagaaattgttgggcaaaatgctattcagccattcacagaagagtcaaatacatgtgtgatattaacactagcgtctttacattttaaaagtgaattctaatggggagcaaatagaagaaaattgaatgtagggaaaaggaagataaccacagatatattgatggcaaaaaataatgataatctgtcatgtgaaccagaagtcgacgaggcatcactgaaataatctatttttatttaacatctgttggcacaagtgaagagtaatttttgcttgtttggtagtttatggaccttgaaggaaatattcacttttattttttatttttttgccctcactttattccctgaaaattcttcatcagatttgtctttagctttttattcatttctattttggaccaaaattaatttgacagcattatcatttttccatttcccttttgcttaattttcagcttcattttagtcttgtgttcaattttatataaaattagggaaaggtgcataggtctcatgcccattcattttctctcctctcctttttttctattctgaatattattattttgtttagtttatagtattatagattttaaagtagataaatctttccatgtgttaccatcatcagaaattatctacacatttaatagtcaataataatctatgacagcattctccaataaactaatctctacaatatgataggcacatgtgattattaaactcttgaattaggttagtattactgagaaatttatattgtaagtttttttttaattttaactaatttaaattttaaatggccacatgtggctagtagctactacattgtacagtcagatctagaacatacataattaacttaggtaaatttaccatccagagggcccaaattactctacaaaaatgtctaattttaacttttgtaaaatgtatatttacacaaaatatatttttgaattttctacggtaggcrtttattcctttgtattattaataaaataatgtcaaggtcattaatgaggaatttagctgttgaaaaggttactattttttttttataaaccactgtacttcttgaaacaataggaagatacctgatgcctaagataactataaaatatagatttatactaagatttgttgtttcaattattatcatgtttaaaaaagggcaaatcacttagtgtagttttgtttactaaaaggaattgagagttaaattatatttgattaaatatttatgatattatattgtttcattaattatatcttattcctaaattttatttagatttgtattctgtttatgttccttagtattatacaattagcagtctgtaattgataaaataacaataactttttgatagtttgaggaattttaatacaaaaataaatggatagtttctagcatatttagggaaagaagtcatccgtaaagtctttgacatttttctaaaccactaatgatctcacaatttttcctttgcattcaataaatagtaaagtgattttaatggaaatggaagggatttttctgactttcagagatgaaaccacttttgtcatccattgtgtaatattgtacctttcaatttattagtgccagcatgacgattgctataataatgatattaaaaagaacagtaaacaagtttaggaacaaaagcaataggaatatactgcaaaaacacagtaataaatactaagttttaaaatatataatagtgaaatttgccatcagataagtgctcaatgctaatgcatggtttattattataatcacttacttagattaattgtagtttgtgtggtagagactgggggatagtcaaaaaaaaaattacagcttgcaaaaatgctggtaatatcaagatatcaggtgtcccttggtttgctaaaaatctgtattttagttttttagttgacaatgttgtacatcacatttttaatagtgagtgtttttgaagttctcgatctctagtttcatatataagccaaagacatgggcatttgaaccatctagatttctttaaactaatttatggcttaacaggcattggaaatgtgatattaagacctgtagaattattcgttttggttgctctttgcctacactgctgggatcagccaaacctatcattttataaattttaatgtgttatctaaatgtatgatgtctttcatcacaggagttttctaaaatatcagaaaagtgtttgaataacatatgattaaaaacatggcactacttttcagtcctaggattatcaacattatggcctttatattttttattttgtcttgtttttacatagcatttaaagttataggtatatyaacctcattttaaacgttaaaactttacactaatctttgttatactttaacctacttttaataatttaatgtttaaataattttttcattctgctataacagttccctcagatgaggtcatttttgatcatcaaattttaatctcaaattacaaatatatacatttgattacttaaattttatctcaaattgcatatggatatgtaatttgtcaaaaaaattgtgtggtttttttttcctagtctctgtctcttattcattctcttccttgctctcccattttcttccttactttttatcccccttccttgttctcaaaggtttaaagattaccctagcagcattgcatactgttagagggtactcacaaaagttattcaaaaaatttcttaacaatgactagtaataggttatgctcttatctgaaatttaaaatgatgcttctgtgtctatatcaggacacgcgaattttacctttggcatttattgtgctaaagaactgctcctagataattttgaatatgcagttgagaaatataccagtgggcagctactcaaatattatttttgacagtggattgtaccattatgtgaagtcctataacgatgcctaattattaaaccaatcatactctaaattttgaaaatctgttgagataacagtttacttataaaacattaagtaatagattgtcttagctgcattccgtgacacttgcatacccacacatgtacatgcatacagatccatgtcagaataaattattagcataatgatttgagcaggaattgagtatgtaatattaaattaaaatttttcttcctccaggccagtataagaattctgttgtttcttcagaaagtcatgatctacctctacactctcccatatggtagcctctggcctcatgtggttattgaactcttgaaataccctcacgtggctattgagctcttgaaatgtggcaagtccaatttgagatttggtatttaaaaaagactggaagatgtctcaccagtaatttttatattcattgcatgttgaaataataacattttggatatatgtattttaataaaatatattattagagctaatttgwccttattcttttttttctctgaatgtggctactagaaaattttaaactagatatattttttggatttgcagctcacattatatttccattggaccatgccaattgtattagcccattttgcattgttgtaaaggaatacctgaggctggataatttatatagaaaagagatgtatttcggctcatgggtctgcagactgtacaagaagcaaatgccacatctgcttcttgtgtgccctcagacagcctacaatcatggtggaaggctcaaggagagcaggcatctcacatagcgagagaggaagcaagagggaggagaggaggtgcctggctctttaaaccagctgtcatgcgaataagtagagtaagtgaggacttattaccatggggaggacatgaagcctttccactaggccccacctccaatactggggggtcacatttcaacatgagatttggagggaacaggtatcctaactatatcaccaatttagttcatcctcatggctccaactacattattgcaaaaaataaaatgtaataagataattttattctgtgaatatctttatattagcagatttttttttaattttctcagaaaacgaacgtggattagtaacagcacattggatgttttatcacaatttaactaaaacctttttgacayccttatagatttaaaggtattatcttctatagatgaaaattaccatgaataattctaggtgattgcacttcacatatagacatcatttatcagtgattcatttatactcagaaattaattattgtgtatttttcaatcgctgtttaaaacctctattttctgtagaataattaaactgttatttttttctcactactgcggtcaaatgcaccttcagggccaagattatctataaaagttggggaagatgttaaaataaaattggtaacgtgagaacttgagaattttctttgttttgtggcccatcttctgttgaagttcatgctatctctttgtaataccctctccccactcttcagacctcctttagcctctttaatcaacaagtcacagactttctttgtactctccactgctatgatacttgagtgatttttaatactatcttgaagagaatccttctatgaaaatactcctctttccctctgtgtctttcactgttagaccttgtcagctaccataaacactatcatccttcagaacagacacgttttcaaggtctgtaagtttgaaattgccttctgtctacaatgacaccctatttttctcaccttgccttcattttcatcaaactttttcttatgtgacttctagtcatttacctcactatttttccttgtatttttcttttattctggttattactgccttgccttcctataattcctgcctagtctagagtttacaggcagcttttccagcatcgatttcccatcccctgtatcacaccccaatatgtgctacccccgcttagcctcccaggtcactgattgagtccataaaaaacaactggctgttctcaagtcttttcacatttatgttgtgtactgaaaatatcctagattagtaattccagaattttgccctcctcagggcactgttctttttttctcaatttccacactctaagaaaccaacatgactcttctttcacttagaagaataagtcaaactggtgttaattttgctaactccccacctctgtactttatcattctgagcatctagaaatgtttaaatacctaaaaatttcatgtactttgattggtcttgggattataaagatacatgttcctaaagagctcatagtgcagtgtgggaaatagacaaaaacaaaagaagtctagaatgagatacatgttcatagcaaagacagaaacagaatgttattggaacataggagtggaagtatttgaatctccatgaatctttatgaaatgatatgaaaaattaagcgaatagtaaaatatactacgttgttcaggatcagtagacaggtttttgtttgtcaactgtttgtgttttactttgatgataaatgaattaactctttgaacacacacacacacactttttatatatatataaacaggtcctgagggcatttgaaaatgaaaaaaaaaaaacccataaacacccatgctctcaacgaaccactaatggggtcaacacaattgtattttcctatttcgttttttccattctgcgatacagtgctttctgccaaagatggttattctccttcatcttttagtactcttgtattccttttgattgaagaacctttttgacttccaaggccacagtggcatttacttctttaccagctatttctcctacatatgtccttggaataggaaaaatatatactcaaaattagagtaatctttatcataggatctcacaagaaggaacaaattcatatttataagaatatttgctgccttagccaacacttatgtatgtattttttgtgtatatccttacttagaatatagcaatcaaatttggagctaaaattagcggagacaatgtcaaggtgaaatatattttatctttgatcattagatgaacatggcagatcgattacagagatcaactcaattgctcttttataaactgaaaagcactagctgtgaattctactttggaagtacctcactccaattctgtgatgtatgtttgtttacatttgggcccaaacaagaaatgactctcatcattatacagtgtgatgtattggttatattgctgtattcctctgacataatgagtgtggttaaccaatgtttttaaaatgtaaatacaattatttagatttattttccaggaataatttgaattcactgtctcatattcaggttcaaaacattatttgtggctggagaacgatgtgatgtagagaccctggaatggtccaaaaatgtcttcagagtacctgtcttagaccattggtggcaaactggtaagcattttcctagcatgtacataaatagtaaagaaatgttccaaaaagctgcaaggattggaggaaacttttgagctacgaccagcagatcagacacaaactcgggattcgagtggttcaggtttcagtaaaaataagcaatttttttattgttgtgttattaataatgtcttcataagtgacattgatgccaccattctcttggtccctaggtataaagcactaaagacctctttatcttctcttctttgtttcttatatctggtaagttactaagtctcagattttcctttgaagtgtctgttgggttcattccaccttcagtattccccttgcctttgagctctggcagctgcattatcctctgtcctgatttaaagtttcctaatcactcatctctattctctctgctttttgatacacactgcacactgctcccagagtccttttatgaaggcttgttcctctcataggactctctggccaccttcttgtgttctataatatctaatatatyctgcctagcattaaaggcagagaaatttatttttcttcaaaacaattgtcattacatatgtaatttgttcatttaatttattttgtttattccctatagtcctccctctaagtgttccctgggaaacaaattttcatattaaatggatcaactataaactttggaataagcagacaaccaccacaacaataactctatctgctgcttcttttgagggatggctatatatatgagaatgggtacattgtctagaagccatttacctcctcacaaagtacagagattttaaaaaatttgactcactgaaagcagctatgagccatgggagccctacaacctttatatgtacatattttattttagtcccacttagttcaatgaattagatcaacctttttatatacatattttcagtattctcaccttctctgcatctggggcagaatatcaaatttgggttaaaaattagtgagattactttgcaaaaaattagctctgattgtaaaaatgattttcatgtaaaagattaactgaatgactaagcctgaaatgcagtgtttgatacttcagaagtttctgattctgacaaattatactttttatattatgtccttgaatattgttctttaaaaatgtgttttctgactgggcacggtggctcatgcctataattcctgcactttgggaagcaaaaacaggcagatcacttgagatcacttgaggtcaggagttacagaccagcctggccaacatggtgaaaccccatctctacttaaaatacaaaaaattagccaggcgtgatggagcgtgcctgtaatctcagctactcgggaggcagagaattgcttgaacccaggaggaggaggttgcggtgagccaagatcctatcattgcactccagcctgggcaacagagcaagactgtcaaaaaaaaaaaaaaaaaagaaaaagaaagaaagaaagaaaaaaatgttttctacatcctttgtaatatgaaatataaaatgaataatcagagcagaggacactttccttacataagatgaaaatcagaaagaagctttctattccttccagttttatttactaaggggaaaattatttaaactcagatttgtaactctttagaaaatacaaagtataagaaggaattttgagaacaatcaatgctatgtgtagaaatacataaaaacaagtgaagaattattgcatctgcaagaagaatgtttacagtatttatgtatcccctattagccaggaaagctttaacagttattttcttggtcatgaactagtaaatgttttgtcacctttaagataatttctcttatctgttcaaaatgggggactactttccacacaaacgtgacccgacacaaacgcttgcagaaaagttctgtttttccctcttcaaggtgactgtgccaaaactcactgaagaaaactagcacattcacaaataaaattataaaattcttttactttttcttatagacacctttgtacataatagcctgtgtgggtttatgtagttagtttattcaggcttacaaaaaaggtcactgaagcctgtgacagaagcatatgaggtccctggtggatactcagttccatgagaatttgcaatttttctttaatgtattgttccaagggaattaatagctacattgtgtcagtgtgctgtcactgtaatcaggttggagtgactgttaattgccatggaaaacatgtggattttactaataaaatgaatgattctttccatttccattgtcctcatcccgtttgcttttacagcctttgtttggtattctgtcctattaaactacacaaatatatttgaatgggtagataggtagctagtagctagatcgctagattattttgtgctttgtaaaataatttcattataggtgatgcagaggttggctaacaggacactagttaggatctctatacgtttgcatagaaaaaaatcaatttatcattttcaaagttgtatgttgtggtaagtagttataaaatgatactgaagggctgggtgcggtggttcaagcctgtaatcccagcactttgggrggccgaggtgggcggatcacgaggtcaggagttcgagaccagcctgaccaacatggtgaaacctgtctctactaaaaatacaaacaaattagccgggtgtggtagtgggtgcatgtaatcccaactacttgggaggctgaggcaggagaatggcatgaacctgggaagtggagcttgcagtgagctgagatcgcaccactgcactccagcctgggtgatagagcgagactctgtctcaaaataaataaataaataaataaataaaaataaaaataaaataaaatttcaaccattctttcctaaggtgctatcaaattgatgtttgattctgggtgaaagggcaagtatgttatgagttattatgaaatattacaaaaagataaacatctggtattacaagtgcattaatgagtttcctagttttgtatatcaaatagatggtggtacatttccccaagaagtatgctaggaaacacatgttaatgtttaagagaaggttagctttaaccaaataatactttgctttatttcaaatttcaagttttctacagggtccctttttcttgttattgacttagaagttgatattttttacatacttgcacacttttatgagcctttcatataaattcatatgtgtatgaataattcatgaatttgctctctgattacactgatacatgtgtacaaatgagctgcttagaaactgtgatgtgtaatttgaaattagtaagggatatgttaagtaactaaaacgtatgaataaaaattaagtagttcctgtgacttgagttgtaagaagggactccgcagtcagttcatttatatgaccatgttttgttaatcggggttctccagagagacagaatttgtagatatagatacagatatatgagaggatactttttagagagattggctgacatgattatggagactgagaagtcctgtaataggccatctgcaagtttgagaccctggaattctggtagcatggctcagtccaagtccaaaggcctcagaatgagggaagccaacgaatgatgtcactcttagtttaagaccagaggcttgagaactcagggggccacttatataagttctggactccaaagatgggggagcctggagttgttgtccagggataggagaagaagagtgtattccaacttcagcagttggatgcacacattcacctttcctctattcttgttctttctggttctgcctgcttggatggtgcccactcgcactgaggaaagatcttctcatcttgtccattcagactcacatattagtctcttctggaaacatcttcacagacacaaccaaacataatgctttaccagattgctaggtatttcttaattcagtcaagttgacacctaaaattaaccatcacacattattattgttgctctagtgcaacttgtattagtaccaactgattttagtgactaacatcctctttatttcattaaaaagacattcttttatatctgattcaaataatatctaataatctaaactgagacctaatctgtagaaaatacaagaacagattagcaccctccacccctcataggaacattttaataaagaattgttgttgttcaccaccactgaagcatgaatctcttgctttggagtataataatgtaaatatttaatgctgtcatgaaggaaattggtcttgtcaagtttagagaggagagttgtctctatttgtttctaaatctgtataaaagccaaattgtcattcacccagatgtattatcttcacagtaactcatccataaaaagattaaaaacatctggattattgactgaacttttcgttttattttttacccagagatagagaaacagaggttttacaatcataatttaaaaagggaaaacaaaaagataatggtttcattaaaatatggtaatccatgtgccaaaaaaaagaaatgaacagccagaacttccttatcctcagctgtacgatccccaaataaaacactatattgttatagaggtcagacaggaagcacaattttagaaggaaagaactgtcagtgcagtgcatggtggccttcgtgggattttttttttcttgtgatttaagatcactgtaaaggaattattgtttttatgagtaaatgagctagtacaaaaaaaagatttgttaaagttcagagacttactgttaaatcctaaacacagtagatctacttttttctattcttccttcctcctcttcttccttcctcctcttcttccttcctcctcttcttccttcctcctcttcttccttccttccctcccttcctccctcccccctcgttctcttcctcccttctttcctccttacctctcttccacccttcttccctccctcccttcttttatttcttctttccttcattcattcctatttgctataagatatggtattggtttagaaatgattgtaacaaaacatcctggagtcccaatgtttaatgttatttaatcctagataaaaacgctttgttctttctcttgctatcactcagttaattcatgacagctacaaagatagaatactcaaattccacaatggcttttataaggggcaacttagtgaagggtttaattcaacaaaattcagattatttttacctgttgacaggacactacctgtgtacttaccatcagaagatctagagcttatattgaaagtgtttcaagtgtccttatgtccaggtactgatgacatagttgaaatgaagtaatraccaccaacttgagcagcactaggtgattttgttgtttgtttgttttcatcactttaatggaggaataaaattcttagataattcacagaatttgttaaactctaaggaggaatttcaatgagaaaacagtagtcatctaatgaactgagacattggtgatgattgaaatgtttgatcttactttatctgccttgagccatctttgtggagttcttctatcttggtgtaatctgagtatttcactccataattgattgaactgcttcggttttaattgtaactgcagttctgaagtaattatagtctatatacagcctaactcttcctcctttggggaataatctgataattctggattttgttaaagtggacccaaaggctcctccaaacttcagtcatgccagctcctaaatctaaactattgattctaagggtacacatacccttatactatgttattaaaatgtgtcagggctgcttgttatgatttcttatttttgcatagcttggcaagttagaattcctgacagtagacaactgaggcaagacttttaactacaaaagttgacgaggttgatcgaatttaatccttattcttagggatatctggagaagattcactagcccagaaattgtttaagacagcaatacattctatttacaaaaatcaaaaccacaaaatagaataattactaagagtttgataacagagatctctgtgggaaatgttacaggcacaactacagccctgtctcattcctcctaagtaaacacattgtaaaacacttaactaggatttgaggatttgctaggtaaggtatcaaagtctaagtcacttttttttccgtgatcatcctcttccattgttcctcctgaattctcagacatttttctttcatgtgtccatgttgatacactgaattgcagatggatttaatctgtcagcctgcagttctctatatttaggctataatarggaattttatatccctggaatcagcattgagaacattatgcctcttgttatttttacactttttaaaacgtttcacaactgtgtgttagcgtgtgactttcttcgaatttacttagcttgtgtcctgtgcaaaatcttgtatakttactgcaaaatacattcctaggcatacctaggcataagaggcccatatagctgatgtgacaatgaagaaagcacattcttggtgacttgaggactccatcttgatttaaaaacctgttttatgtggtttgagtaccaacagccattagcaaatattcctctgtctgcagatcagggagcaaaatatttccatgtgctatcaaatgctgccttctggattttgctttttaactacttgttattctctgcttctgtattttactcagtaatttctgagtctatcaaaattgcactatggtgcgagggtttctttaaagtacatgtctgtgtttcaaagataatggattgagctagtgtgaaatgcaaactgtagaactcaaagagttgggttgtactgaaccggcaaaacatgaccccatgaaccaggttacccaggagataccctaggctactttcaaatagtaaaatgcaaataatctttcagtaatatgaatgacttaactactgtctgatacatctttgtttttcacaatttaatggtcagaaatacatttattttttttctttcattcatagaaaagatattttttggtaaatttaacatgagaagttgtgatgggggaaaaagcagttatatagacacagtgtcatctcagcaacgtgtaactagagatggcgtgacagcatccatctggtgagagagaaaagaagccctatgtcattattgttgcctggcaacagcattttttctcatttagagtagtcttcattagtttaaagtaggtgatttttactgataatttgaaaagccagagcttagaagtaagctacatgaatttggtttgtggaaagaataaccttttgtcaaatgtaaggcatgcttaataaggctttctctttctgaaagtgaataactgtttacaaactgctaatccacctgagaatgaattcccaaagcaaacaccctcattgaatcagacatttcatctttatagcattataatgtaaaaagaacatcattttttaaaaaatatattacacaaattagttcagagatgtagaattgtgttttggaatcactatttgtgctcattattatatcagtgacaatgctttggcaagggactaaacgctgggaaatcgattaataacataaagttgttttggcctttgaaatatctgttctaattctcctcctactctgggcaaggatcacgtataaaccatgttagaaagttgaaaatatgtcatgtttttatagatcttcacaagagcaagagttatctataccttcccttgacaaactttactgtctggaaatttgattccccctgatacacgtaaacccctgcactgggcctactgcccccacaaaacaattcccaattcctcttttgctgtgaattttaatttggaaaacagcaggtggctattctccttggagaaacaatgtgggtagcaagaagtgatgcagaatccagtaggactgcctttacatcccaattcagccacttactctatagccaagggcaaatccttgatcttaagtttcctcaggactaattgaaagctttaagtgaagtgaaatatgtactaacaacctagaagaattcctggcatatagtcagcactcaaaaaatattatttttattttcctttctataaatagcccttcattaatgtaaaggccatctttagaatcttggcctgtaaataattcagattcaaaaaaacttggactgtaaaagcggaacttacktttgagaaaatgtaaccgtagagattttactttccttgagtcaactagctagttgacattagaaccagaactctcattcttctgtgctgtcctgggtcctctccccatagcttttatctcatgccttcattaactcagtgtttcttatctagttaaacacagggttatttatgggcttctccattgagtcctccacagttagaggcaatgtgctataagggagtaggataagaccagtgtctcatagctcgaattaatggtcttcttcctatacaaagaagcaacctataggttgctttgaattaactattttaaactaaaatcctaccatctcctgaacacaaagattacattgattttctttcactagtgtacatctcactgtttctgctttctttctgctacctattcaagttatttatagttcactgtaaagattcagaggtggggagaatggtttctttacaaattgcctctatgcccatcgtgatgctgtgattaatatgattcagcagtactaggttgctgcattgatttattcgtaagtcttccactcgcagcatggactaccgacttctaaatccatattgttttaatgtagtttctggaaccactgtaaaggcagaatggcagattgccagatgcagcgggagctctgatttatagagctggacttgtgaacttgccaccacatcttcctcttaaccctcattcacatctagtttcctttaacttttgagtcatatcccagggggttaacttggccttttccctcttgcttttgccccgtatccagacaatcaccaagaccttttgatcttgagtataattaaaatttggtcttatcttccactgccagtcacctgcaccagaccatccacatctatctgatttattgctttgggttgggatcatcagtttagtgctccagttagcaactgaagagatttttctataatgcaattctgagcaaatcgcctttacraaaccccccatgtctcccattgttcctggaacaatattcaaatttcttaacatgggattttcatcccgctgtttacttctttcacttggtctctcattatctccctaagtacacttgcctcccgcaagctttgctctgcggaataactcacagtcctttggtggtctaacttctgaacctttatacatgctgcaatttctatttggcatgttatttataccctcaacactcccttttccccagaagaaataccttttagtgaatagaatatattcgataaatacttattgaatgactgtcctttgaatatcattcttggaataagaaaatgttgtaaaggaatcataatggtaacatatagcttttatcttcctggagtcctctatttttttctctctggttcattttgggattacattctgtgatttgctacttattttttttaggcccctgatctttatcawgggagcctaaaatcatgttagaagtatgcattaactagtcagcaaacatttcccaagcacagaatgtcagggactggactgttggtcctgctgatacaaatgactctcaggcacacagactgatttcagctgcaggctaggagaatgttttttgttaactacatgcactttttttttgagacttgcactaaatctttttaaaaaggttatataacatttttaatgggaaatgttcctagtatttattgctatgtaaaaaaaaaaaaaaaattactccagaacctggcagcttaaaacaacaaccatatctcatgattttgtggatcataggcagaaatcagccagggattctggtgctccaagtctccaagtattgttgactaaaacaacccggacagtattcagtgatgaatttgttayctgaaagagctcctgatccagaccccaagaagggrttcttggacctcacacaagattgaattcagggcaagtccatagagtaaagtgaaagcaagtttattaggaaagtaaaggaaaaaaagagtgctactccataggaagagcagcccgaacggctactggttggctatttttatggttatttttaattatatgctagacaaggggtggatgttttatgagttttccagaaaaggggtgagcacttcccagaagtgcgggtccctcccctttttagaccatatagggtaacttcctgacattgccatggcatttgtaaactcatggcactggtgagagtgtcttttagcatgctaatgcattataattagcatataatgagcagtgaggatgaccagaggtcaatttcatgaccatctttgttttggtgagttttggccagctgctttacctcttgctgttttatcagcaaggtctttgtgacctgtatcttgtgccaacttcctgtctcatcctgtgactaagaatgcctaaccactttggaaagcagcccagtaggtctcagtattattttactcagcccctattcaagatggagttgctctggtttgaatgcctctgacatattttccccttcccttttataagagaaacctaatcctaagggtcgtagacagattaaaatccatcttctgtaacttcttcaggctgaatggggtgatgatattcctgcctattagggtctctcgtattcaggttagagaggagcttcgtcagaaagcatcagtatgttgaggaccactcataactcttggattccatcaaarggtgatatctgaaagatttaaacgtgttcaatttaagaggacattgagaaagcttatcctgcattcctacacatagagtacaacagcaatatattccacaatagtatagcaaaataagtaaaaactatcccaagtaaactaaataagaaggctttctatgaacctggcaactgttggaaccaaactgatatggggatgctagctgattccaatatatacccagaattagaatactaatctggaattttacattacccatctctkttgtttcttctgagctgcagtcagagatcactgattggttcacaggaataatcaaggtcagtctaaattacaggaaaaaactcagaaacaagtgatgagactggaatctaataggtataccgtagttcttgaaaaatagttttctctctccagtctcccatttttactaaagataaatcatgataagactgatttgcttgtaaaaataagctttagtcttatacttggcctaattatttgtataaagtgcagcaagaataattatttttcacataggcttttaaaatttggctttgatggaattttaattcatttttaatttaattaattaattttccattgttgttgtttygagacagggtttcactttgttgcccaggctggagtgcagtggtgctatcaggctattgagttcacagactcaagtgatcctcccacctcagcctgcccagtagctgggactactgggtgtgcaccaccatacttggctaatttttgtattttgtattttgtgtttttgtaagatggggtttcaccacgttgcccaggctggtatcaaacttgtaggctcaagcagtgcacctgccttggcctcccaaaatgctgggaatgcagtcaggagcctctttttttttaatttttaatttcaatttttgtggatacatgatgtatatatttataggttgcatgagatatacaggcatgcagtacgtaataatcacatcatgtcaaaatgggtagattaaggattttttataagaactgccaaattctcttttagaaatgtatcaattttatgcatgctcacacttacataacaaaagggattatctttggtttatgtggaccatctacccacacagtctgtctgtcatctgccacccaactgggccctagtttttctgtcagtcttgtgaattatcatgtgaattggtccctgatgtttagaaagccacagaaatctattaaccagttattctaatacagcctctgtcagtctctgcatttcctactacacatctctcttgcagcccaaataaattaaacatggacatagaacctgaatggtgtgtaactatttaaataaattatatttacattgttatgattcattaattttttgttcagaagccctcattagcttacaatgtcactcagactaaggtcttaggatgactttgaagtattcctgcatgatctgcctcctcactatttctctgaccttatttcctatcaatactttttgttaattctgtgattctatttcagtcacattggctgcctcactgttctcaaacactctaggtatgaaccgacctcaggacctctgaacttgagtttcccttctcttatattcttttcccctaaatatctatgtgtcacatgtcttctcttctttcagatgtttacttaaatgtcaccttctcagggaggtctttcytgttcaatacaaaattgaaaaccctctccatgacatttcatactcagtttatgtttcctttttccgttagtatttatcactcttttacacaccacacattttactcttgtataatatgttgttcattatctccccagttagaaattgggaggtctccatgcgggtagaaattttggctacttttgtttattgtatctccagttctaacaacagcacctagcacataatagctgctcaaaaactatttgctagtaagtgatttgtaccaccagtaatgctatttgcaagtatgggggactgggctcacttcctgccacagggatttttcttcctctactgagacacagtctaggtgattttattcctttctcatcctctgtctgttacttgagagcttcagaagtggtacttgtctattccattcttctccttctttgaaagaactatgaaaactagaacaagttatttaaattttcttggctaatcctcagaatttttcatcagtaaaaagaatactcccttttctctctgtagtcttgtagtagtgggaataaatgcaattatatagattaaaagcactcgactcttggtatatagcataattcatattggaaaaatatgtatctagttgtcttccctgtttttacttcagagtcagaaattttaaagtaaattcatttaggtaacagcttattatataataaagtagagtgagtcagtaaagacatgcagtaaagataccatgaagtttgtccttttttaaaaacaaggaaatttctctattagcttctaatgcagggtgagtataaatgtgctaaggtgacattcttcatacccttcaattccctgttcatcttcttcctagctgtctcttatctaaagaaactatgctggtgatttgctgaacattttgtgtttctaaggtgaggtgcttttgtaaagttttgtctaaatgaagtatcccatgctcttctacaaagagaatgctctagtttgtttattgtagctatttcccaattgcaacatgacatctagatttcttgtctccataaataactgctagccacttaattacagcccgggtagtgtgaagcagatgtttttagaacatcctggaaatggggctttgggagttcataggatttcagttaaggattgcagcatgcttaggggttgtcactaatcagaagcctattctgcacgtggaccagtttgagagcaagagtgtttatcttgtctgtgtgcataagtgtgtgaggaaatatgtatatgtttatattgaagatgcgtcagtccttgggtcctaggatgttcagaggtacaaagaaggataaccaaagtatctgtaacaacaactacggtctttttcagctcacttttgttctacctatgattccttagtatgcttagagtcctaggaactgccattttgtctgattgtattttctacaagtcactagcaatagttctctttcctcctctcctctcctctctcctctcaatgccttgttgtaagtagataagagaatataattttttataggatggtatttgannnnnnnnnnnnnnnnnnnngggggggaagggaaaaggaaaaggggggagggggggaagggaaaaggggaaaaaagagggaaagaagaaaaaaaagggaaaagaaaaagggggggaagggaaaagggaagaaagagggaaaaggggagaaaggaagaagagaagggaaaggagggaggagggggagggaaggagaggggagaagaaaggaggagagggaaaagggagaaaaaaaaaagaaaaagaggagaggagaaaaaagggaaaaaaggggagaaggaagggaaaagggaaaaaaaaaaggggggggaagaaaaaggaaggaaaaaaaaaagaaaaaaaggggaaggagggaggggaaggaaaaagagggggaaaaaaaggaagaggggagggaaagaaaaaaggggagggggggggaaaaggggaagaggggaagaaggaggaaaaggggggagaggggaagggaaggaagggaaaaggggaggaaaaaaaaaaaagagaaaaagaaagggaaagagaaggaaaggagggagggagggggcctcctcccctcccctccccttccctccccacccacctctgctgccctcctctcccctccgctcccctccgctcccctccgctcccctccgctcggctcctctcctctccgctcctctcttctctcctccttctcttctcttttctcttctcttctcttctcttctcttctcttctcttctcttctcttctctcctctcctctcttctcttcctttctttctttctttctttcctttctttctttcttttgtccttccttccttccttccttccttccttcctttctctctctctctccctctctctctttctttctttctttctttctttctttctttctttctttctttctttcatctgtctgtctgtctttctttctttctgtctttttttaatggagtcttgctctgtcacccaggctggagtgcagtcgtgtgatctcggctcactgcaacttctgcctgctgagttcaagcaattctcctgcctcagcctcccaagtagctgggattgcaggtgggtaccaccacgcctggctaatttttgtctttgtagtagagatggggcttcaccatgttggccaggttggtcccaaactcatgacctctggtgatccaccagcctcgacctccgaaagtgctggaattacaggcatgagccactacgcccagccagcaatagttctttttctaatcctttgaatgaatcaatcaaaataaagtcaacaagacacttgaattactaatgttcaaagtataaacatatattatctactttaggcaacctgaatgaataatcattttcagcaccctaaagtttaagactcaaattaattatatagaaaaataagcttttaatagttgtcttataatcataatgtataaaaaagatgaagaataaaggttataaataaataattactatagaaagatgcttgggaatctcaggaggttcgtatatcagcttacttaggcagtgaagaaggacaacgcttcattaatcctttcttgctgtcttgcagctttatttaagactaggttatactctcaccytcttttcctacatcccccttctcccagtgcgataggaacaacagagtgataacgtctttcatgagaatccacactgtaagaackgtagagagtttgaactctaggtaactggtgtgtccctattgacaaactgaacttaataagaatacttctaaaatagatttactctagcagcttccttgcaccaggtagtagaagtaacaaaagcatcttgaaggtggtatctcctttcctaatgtgtctgagaagcttctcttcctattatcatcttatttgttctgtgtaccttcttttaagcacctcactctacaagactgcttcctgtcatcaccctgctctggtctctcatatccatttcgaaggatagctgaggtgagcacctggacatttctgaaaaaacagagggggaaatgctgttaacacttctgaccatgcagatgtcctcccttgctttgattatgctgtggggaaaatcggcaggagtattagatggctatggattgccatttcataaaataccttcccccctgccccccacctttttttttgtcatgcttggaaaatactttagaactctttgttaaacatcagaaatgtctgctctggttacttgccgatgatcctcagcagtgaccatatggcttagcatcttgagcactaaactgtgacttaggaactrtgttttgatgttcaagagttcatcctctgttattgatgccagctgagcctccatccataaaatgtgaataataaaatgaactactctggaaggtaamgagcagtaataaattcttcccatcattctaaagtgatatcaatatgtgataaattatggtagagcccatggtagaaggaacacattctgagtactttagaagatggatgcctttaatttttttggattactttagatatgatgggtttggcagttaattccttgggtatatgtatgtgtaggttatgtgtgtaatactaagcaagtaattcccaaacttttcactaaccaaatactattttcctgccctttcgtacatatatattttgtattcaaaagattgtgttaactccaaacttgcttttatgaatgttaataagtgcatccctccattaaaaataaccactttcagaacttgtggtaatcaggtaatagctaatattctggctgttacaacttgagacacagaaaacaaatttagcatttttgtcaatcattgcaggctagttgtgagaaagttcgtggttttgatgaaatagtcagcagagtatagtcatcttcctccctgtgttttggggcttctaacatccaggaacagcagactgaacaacttgaaaaactattgccaaatttagctttaaatgcaggttctctaggcaagtgtagctcttaggaaattagagcatgatattatccatatatattatatatttttttaatttataaagacattttattaaaatgyttttttctgtgtgtaatctttttttatttttattattattatactttaaattttagggtacgtgtgcacaacatgaattaaacaatgagaacacatggacacaggagggggaacatcacacaccggggactgttgtggggttggaggaggggggagggatagcattaggagatatacctaatgctaaatgacgatattatccatatattaaaagtaatggcagaaaccgcaattacttttacatcaatgtaataatttcaaaaatctttgggttacttattccggagaatgagctagaaataacaaaaatgttttgacacaactgtaattaacaatgataaacgaaataactttaggtgagtcaagagaaagcatcttttctagtgatcattttagcttttagtgtgtgttatggaaccgtccaagtcacataattttccattctacacgcctgctgatccacaattgcaaacgctagagcagcctttcttttctttagaagaaacactactatataaatttttctaattatgaattcttaagttttaatactgtggatatgttataagttactagatagctttaaatttttaaataatatatttgcactattcatctattcctaacacagctgcattgtatgacaaactagggtggggtagagtgtgcatgtactcaagaaacattatgattccaagttaaaacatgaagtgataaataacatttctttttccagagactggatctccaattactgcrtcatgtgttggattaggcaattctaaaacacctccaccagggcaagcaggaaaaagcgtcccaggatacaatggtaaggaatgaccctgataatacgtaaagttaataaatttggyattttcttgcatctagtgtgtattatgttgcatgaaacaaactaggggcttaattagaatctggttgaatgaatgccttgtattaaaaatgaatgccttaatttttgctatcaaaagtatgttgtggatttccaggatatgttctaaatgactgtcataaccacaaaaataatatcattaataaggtatgttaggaatatgggtgtgaaattactatgaaggaaacacctgctgggagcccagtactttatatatgtcttttcatttcatgctgaagtatatttaattcagagctatcattactattttagagatgagttaaccaactggttaacagamtaaataattttcttgagataacactgctggttagatcctggggacaatgcaaaccattgtcctcagaatttgcttgctttgatttcaaaagctgcagtttcttactgtatattacacatgctgcattttaatttaggattgaggacaaagtttttaaaccttattgtttaataataaaaacaggccggaagtggtggctcatgcctgtaatcccagcattttgggaggccaaggcagacggatcacatgaggtcaggagtttgagaccagcctggccaacatggtgaaacctcgtctctactaaatatacaaaaattagccgggtgtggtggtgtgcgcctctaaccccagctacttgggaggctgaggcacgagaattgcttgaacccaggaagcagaggtttcagtgagctgagatcrtgccactccagcctaggcaacacagcaagactctgtctcaaaaaataaataaataaatataaaaataaaaataaaaacaaagggggaggatcccaaaagaaaayatttctttgatgctggctttatgtgactaaaagctataatatyctgtcaatttttgtttttaaatttacagtagtaaccattattattaaacaatttatcttggatggctctctctaggtgtataaattatacaagtcacataactttttgaacactgtttccttatttctaaataagagtaacatttttatatgctttccagggcttctgttttgtgatgwtatgcaataaagcattaacacagtgcctaccagtagaaaggcagaatatgtcttagctagtagtgctactaatatttcagaaaagtcagaggactgacttgatttagactaacacattcattttacagacaaggaaaatgaggcacagaggttttgtaatttgcttaaggtcacacaatttggcttagtagacctatgaagaaaacctagctttgggagacaaaatatgattcctaacatatgtttcttatttgcatataaactacaaaattcagagatttgwcttttgcttctctaacataaaaatattggatttcccttctaggacaatggctagttacaaaaacgtggatcatttggtttaacctagcagatacatttataaaaagatacttcagattttttttttattcaaggcggaaatagatattctgtgaagtcagtgacttctccagccctggaaaggtgaacccagatttagtgaaatcctctgtttaaacagtctgtcatctctgctccttttatcagaaaaaaatgttttgtgttgagacatttttaggggtttctgatggtggaagacgttaaacacatttctctgttagtatttcagtgccatttttatatctagttgtaagaaatagttaagctttcttccctcatgtaacttcagtacagaagtttctcaactggcttgcagacagtacaggttaaacatttawaaccaaggaatcagtgactttatgactgataatttttatgttttgtgattgtttagagattaaaatcataatgtaatattaaatagtataataataaaaaaaaacgcaggatccttttaggaaagaaaagaaaatcctttttgtctaaaaaacaattaatttaatataacacatttattgagtaccttatgcaaacttgtcactttgcatacatttttaaaaatacttcttgcataagcactatgagaaagagatttctcccatttcatagacagggaaactgaacgggttacagaatgtgcctggggcatatagtgatttggccactgtactgagatttagggaaacaaagataaattagccatggcctccgtgaactcacaatctagttagatacagatacttctactaactgtcaatacagaattttaaaacaaagtgctccaggaacacaaagaagggaacaattaatttttttctgagagcaacaaccttcttttctcatatctgcttaaggtagaattacctggatgaatgaggccacataaataatctattaaagcctaaaagatgatgacttatcttcatatttagtttgcaccaagggttactgaatgtggatacaagctttaatctcctaaactcttttaggattctatcaggacagcacagaaagtattgagataatatttgggaagattaaattgaccaaatttaaagctcctaagtggatattacgctttaaatcagaataaggggtttttggtgcttgtaagtattttatttttgttgcgtatattttttggtgtgtttgaaaacttcatttcctttactttttaaaaagctgaacatgtttttaatgcttctaatagattacaagggtatatttagtggacatagacatagagatgaaattaccacgtttgaaatatgatgtcttcatttaagggatattctgaaggaaaatttctgatgttattaggaatcagatacatgtgctctttatttttttgtaagatattttagtttatatttgttcatggtctcacaggaattaaaagattactctcttaagctagagctttttgggttgaatataaaaatatagaaaaatgtttaagctttaagattatgaatttttattcaaatatttatattttactttgtagttatgattttggatgacaacatgcaaaaactgaaggctcggtgtttaggaaatattgtggtaaagtaagcaaaaatttcaatactactatattaaagggcaaaaactggtgtatatactaagaaaaaatggggtcattgcagtgttactgctactgaggaagttgtagaaagaacttgtgtgttgcttaagaactgtgtcagctgtgttgtaatttaaacatagaagccccataaaatacgaccaatttaaatgcaattttcaaaaaccacaaattttgcatatttttaaataacttttttttcattttacaggttatgtatagatgataaagttaacttacatacaaaaaaaatatgaataagtaaataaagttcctgtactctcacytctcagcaattacatcattaacttcataatatacatgactatctacatttttttggtatagattcaggggtacattacaagttcgtttcatgggtatattgcataatcctagggtttgggcttctagtgaacccatcacccaaatagtgaacatagtactcaacaggcagtttttcaacccttgcctccctccctcacaccttttggactccccagagtttctagttttcatcattatgtccatgtgtacccawtatttagctctcagttataaaagataacatgcagtatttgattttcagtttctgatttgactttccactttttgacaaacattttacaatggcgaatcaatttatttttgtgtattgctgttttcccttaaccttgtctcataagcacatttaatttttactctgtttcttaaaattttcatccccagtataggcttcttagcattttttgaattttgatgattataaataataccatattaaatattttttcgtcttgtttttctgcttttctgataatagcaatagtattgaagagatttctggaagtataattactgggtcaaacagtatcatcttataaagttcctgacttagcaaatatcccatcttcttgttaacatttttttaaattattgttcatttgataggcaaaactgctatcatttaaagtgaaaatatttaaatttactttaattacatcaagacgtgtactttaaaatttatatgctagtggaagcagaaatggaagttgattaagttagaaggttcacagtatgtgacattttaataattgaaagagagattgctttagtccctctgattaacatgatattgacatctttactgatagagtttaagtagtagaattcaccagattgagctactataaatacagagcatcaggttttaaaaatgatttgctttcgtatttatttctattggaagtcaaaagaactcattacttggcattctgagattggtataagattgcttcctgtaaagaagatattttaaattctatgaaaattacatggaaaacagtagttaaaaagaggatgtttcttcaggtagagatattttaactatatagaaagctaatagaaagcatacaagttatgatgtaattcttctcatgcttttatcagtaaacatgtaagcactatattactttgttaaaagtttccattttaaaacaacatatccatcaagatgaaaaaattaaatattgaacatgccatttgtattcgcagttctctgagccagaatctgtgttaacatagagctggttcaaatttgacctgttcaagggaaaagcagcaggggaagaagggaagggctgctaaagaaattaataatttgaacacgtttgtgggtggatgtttggcttgcttagggaatagaatggtttttgagagcttttcaaagcactttagcagcatacatttttatgtaacctcctaactttgtgagtcatctatttcataaaacaagatctcagaggtggcatttgatgccagcacagttttaaactcctcatgggttttgtcactctaattatgggctgcttcaccccacatccattcagagataataaaatatagcagtgtcccacataaactgtaatttttttcttatagccattagtgttatttcaaatacttaaaagtaacaactattgccttaaagcattctatggtttagattgtcaccaattcacaattattttttccctctgtattcctaaaagaattttattgtgcagatccagggttctgagatttcattataaattacttgatgatgtaatatgttatgacaaacagtagaatttgattcctctcttaggttaacagtgaaactagatatttgaatatattataaatctttttgtattagaaaggtaaggtagaaataatcggaaaacaaaggttaccaccaagatttctctcyctcctgctctctctttaacaaaacagattttgaaaccttttttcagaaactccttttatctataagagcaagaatttctttttgaaacccacattgccagcagccattccactctaacttatcaacttaaaaaggattcacatattccaatggctgcctgcagtatgtgtaggatgtttttatatttaacatctataacatttcacattatagatcttaagactcatttgtgtaggttcatatttagaaatagtaatatgtggaaacaaacaaacaagtaaacaaaaaccaaagaaccttttgatccacctagatttttctacattcttctttatgacagtccgcaaatcactgatttgttctcctggggaccccttgactagaagttggccattttagcacttcctaaactactataggtcttaagatataataaaaaggaatcctgcaattttagtgctttattagattacttacattcatagaatttatctttctagtagaagtgagaacttcatgtccacatgaatgttagaaaattcttttgatttggaaacctactccaggcagttaatttagtaagaaagttaagggatctgaattcctatgcacacaaaatactgatgaattttagaaggtattcgtgtaattgcatccagagctccaaagtgcagaaataaaactatgagtcagtaatttccaggcaacagagaacagggcatgaaagaaaattttaactgcaattgcctttcttcctagcacagtgctcactgttattaaagccataggtctctggctctttctctctgatggacaaacgttttyctctgaccagatccattgttgctattggaagtgtggcctgttcaccctgtgctgtgtcctgcaagccatggtggggtgcaagggagttgtatggaattgtctgagtggcttttactttagtgcctgacaatttctcattcttcagatatggttaacgatgcctgttcacatatttacagcttcacgtaaatgattcagtcactgcgttgccatcttgggaaagagccaaggaagctttcttttcatctgggtatcctttgagtataactaagcatgtcacataattataatcctgctcctttctaaatctcatatacagttttgagtgtgatattttattagccttataacagcactatgagttaggcaatgggcagacattatcctcctcattgtagacataacaaagtatgcaacattagtagttgcacagctagaactcacattattgcccagtcttttgtctgccctgagggaaagaaattatggtcaatctcttctggggagataaaaataacttcatatgaaaatctcgagaaaatcctaaggaccccataggaaatactgagagtgcaaagttgggatttaacccagatctctctagggaacaggcttcaatttatttctattgctatggaaattccagatggagaagtgaaaaatagaccatcttttatctaggataggaggcatctaggagtgtaatatttcgattggccaggaatgtattattttccagggtgatggacatcctttgtcctgccctrgttatttaaggattgctcagcactctaatgcttcccttcccacatggctgtcactgctgcctcaattattcacctttccccttcagaatgatcttttaggaaagggaattctctaagaggactctcaattcataattggatgagttgtaccaaaactccctctttcactctgcttggcagaattggggaaggtatcacgtggtgatagcatttgctttcaaatttgaaggatgagtataggtattaactagttcatttcttagtatttttgcatctttcccttccttctgccaatccaatgcacttttacattcttataactacagaaaaaaatattctttttctataactttagaaaaagagctccagtgcacccactgttccagaaggaagaccttcacttaatgtgtaataatccttagcaataagaagaaaggtgttaatttggaatactgcaaccaaaaaaatctgctgtagctcatatgcacctaatgtctatctggatcttattgcttctttccccatgttttctttcattgatcacattttcttatcacatgtttacatatatatatgcatatacatacatacatatatatatacacacacacacaygtgtgtgtgtgtgtgtgtgtgtgtgtatgcacatgcagtagtccctattatccgtagtttcacttcatgcagtttcagttacctgtggtcgaccatagtccaaagttattaaatggaagatttcagaaataaataattcaccttttaaattgcacaccattctgaataggtgatgaattcttgtactgtcctgcttagtcttgccaggatgtgaatcagccctttgtccagtgyatccatgttttctacgctactgcccgttagtcacttagtagccgtcttggttatcagatcggctgtctaggtgttacagtgcttgtgtgcaaccaacctttattttacttaacaatggccctaaagcacaatagtastgatgctggcatattgttctaagtgttctattttgttattagttgttgctgttcatctcttactgtgcctaatttataaattaaactttatcatagctatgtatgtataggaaaaaccttattatatgtagggttcagtactaccatggtttctcaggcacccactgagagtcttggaacatattccatgtagataaaggggaactactttgtgtgtgtgtgtgtgtgtttctgtatgtgtgtgtctattaaaaacacatgattccaattatgaatccttttttcttctccccttttctttaggaatattgtatgtcttcctttatgagtctttctttagagatttttctcaatatccaaattaccacatctgattttttaagataccacatcttgttagtgaggawcagaaagcatgcacttattttatcctatcaattaccaattgcaatttcatatcttgcttttcagactgatcctcagttagacttgtgaatgatgaagtagttttctgagagcatctcaaaaataacttgggacaaacacacatgctatttccagcaggtccacaccttggatggggataaaaacttctcttccaagcactactggcaaggcagagtttaactaccttctgtaaagttcacctgatgaacacttgaatcgttgcatttgatgtcatttcattaacttaatggagtagacatcattcactatcttccctatcagtattctaaaaatactaaatttctttttcttgtagttcacaaagtgctaggatctccacgtgtctgtgatcatagtttatatccttgtatcgttaatgtgtagcacagtgcatgaggaataccaaacacctaacaaatattgatcgaaggaagaaaatgaatgtttgtgttaacgcataaataaaagagtaaataaacaaggcaattgaataattcctctggtgttttcttctctactgttcaaatctccatcctctctctccactggctacttccactcaaatctttctcatactaaatcaacctgcctttgtgcattaagccactgacatatacatctccttccaatcgccacaaattttaaaaagtatagtctaaccttactgtctctacttacttcctgtttatttcttaatcastctagctgttgctttccccactccattgaaatgacaatcatgagaaaactcaaaacatcttaattactaagttccatgatcactgttgcatctgctttcaaacaaaatttacacttcatttaaccttgtttaatactaggtcattattaaaactgtattctagtggcttcttagatactactttcccctggttctcataatatctctgattttcttttctttttttttcctcagtggagttttttctttgatatttctgcaacactgatatttagccgtagaactatttttcctgttttatactctctccacgaatcatctcaccaatttctaagatttctgtaattacctagctacacatagtgagcatatcaatatatccacccaggctcatctgtcttctgatttcagacatatatttattgacatattacttgataactccatttatgatgccacaggttgctaaaactcagtaactaaacaaattatttgtcacctctctacttctacaaatcccaaaatgccacctctcctgaaaatactgcttttactrtattgcgctctttgcrttggcatcactattgatctagaatagaaactttctgtttccatctagaatataaactttctatagaaactttcaaagagtcagctttgatttttctcttttcttcaaccctcacacttaattttcatcctcttaaactgtggcttcttgttatccaattcatcacaccagctttagcactctttctagaacaaagatccaattacatcttttgtttttaaaacacatttggtaacttggctttaacatgtcccattgtactagtcagggttctccgaagaaatagaaccaataggatttacacacacacacacacacacacacacatatatatatacatacacacatatctatagagagggagaaatatttgttttaaggaattagctcatgcagttgtgaaggctagcaagtataaaatttgcaggacaggccagcaggctgaagacccaggaaaagttgtagtttgagtctgaaggcagaactccctcttcctactgggaggtcagactttcttttctattaagttcttcaactgatgggatgaggaccattcacattatggaggataatctgatttactctaaatctactgacttaaatgttaatttcatctaaaaaatgccttcacagaaacacctagaatgcttgaccaaatatctgggtaccctggtcaagctaaattgatgcatagaattaaccatcacacctattcataatgttgaggactatttacacacacacacacacacacacamaagtgttgattagactgagcagaccatttatacttgtgcactcattattcacttcattttgaagcccttattgctataccttacatattttaagaaatcaatatctatttgctgattaactgactgaatagaaagaatgaatgaaacaaagaaaygcatgaaaggaaggaagggtttaggtacgttggtcacacagcatgaagtgtctttccttcttattcctttttcagcttcatgaacctattcttcaagatcaaaatcatagatcagtttctgcatgtcaaattctttgagcttactcctttctcatgttttcttttgtacaaaatgtctaccacatattgcatatattgaattctttgttagatgcctctacaggacgatttgaatgataccatcacctgcttttatcctttcactattctgggacctcattcttttagttttatctcttttatttcttcccccacttctcactctttttcttattctcttcgctgccatttcccagcaccatgtgtcatatttaatagcaatcacctctgtaatccaaagggaaccagctagacatatgatgtccctctataagggtggctttaattccagagagaaagtgwagagctgagattttctattcttaatgattaagattaaaggtacttttgatatgattaggatgayctatttttaccactgaagtacattttaggttgggcttttcattgaacagaggttttaatatttggtgattgttaccaaccttcgaataattagatgaaagccaaagacattctcctgggaaacatacagacaagttctacgttaaatttcagggggttcaaaagagtcctcagtgttcatgcaccccatggtgtgttattcttaatccccagggtctacaggtatatataaacttactcagacctttcttgtaagaatgagtgatggtatgaaaatgtgtattgtccttgttcttcaggaactttgtgcagatatttaaagttttgtgcaacagctctggaagccygtgtccttaaggcttagttttttctgggagacgacgtatgctttcatcctgtaggcatcaattaattataagaatatattctctctattacaaattgctagcaccttattttttctcaggaagcaggaggaaatgcaggttagcaggacatcttcttttaaaaatagaagttgctaacataattgacttctggaaagaatgagattttccctttctctctagtaatattctttctgtaaaatgcagtcctcttggtcctatctatacactctggattaggtacatactaggctaccaggacactcagctgttgtaaagagcactaaatactaactcatttaggttatgattgcaaacagttaggagtctttgctgtgagcagatagtgtgtggatgctggtggaccaaaatgtttgatttggggtacataaaatgggaaaaaaatacctgtttaatatatattttttgatatgcatagctctcatcatgggcaatattacatgttcagatatttggatcagcactcctgtataccagcaatcaggtggaactaagaaacagctgttccccttgtacctggcatgtaaactgtaatttgcttcagactccaccattctctatttccctcaatccatcataaacgtcagctgccattgattatcacagatacctcttctttttctttagtataatagagcaataatttccaataccaatgtatatgtcaaaaatggcaccataaaatacagaaaaaccctatatatcattatatatttcttgggagcaactgaaaattgtctcttatttaatatgcaagcagaatgcatcttcatcaggtttattatcatttattttacatacaatttgcttcactcactaatgttatctctctttgtccatattgacatgtgatttgccacttttttcctaagatcctctttgctttttcaccttcagcatcctgaaagtgctgctaagttgatttttagtatttgttatagtcatattctatttcaatgcttaaaaaatcgatgattttacacttttctgtcaaatattaacaattaaaacaaactgatgtagtgatgttatttgtattgttatttacaagtatttacataataagctcagttaagagaacccagagggattattggcttcaacctattgccttcatacagatttagcaaacagtaataatcacaacagcaacagcaaaaacacaacagcatttctctggattattttacagattaattaaaatacccttacgtgcattttatgtaattacatgaagtccagaaatactgatgtagtatatttcctctgtcttaaaataatttgaaataaagagcatctagcaaaggagaactccgcaggatcactactgggaggctggacattatagaagtgggcgatatctgctgggctgcccaaagaggcatcggcagctgcttccacttgtaacagcattttgttcctgacagaatgtgagagtaaaattcagtgccatgaagttctaatgttgaggtggccatgtgaccacactgctttcttttgtactgtcagacccgaaaatcctgcttgtggggaatgtgtgagatgtcatcttatgtggacactagccatctgtgcttcattttcaattttctcagcatgagaactacgaatttacaactccatttagtatgtttttattgtgtaaatgtgggagtgtaggttttgaaagcccctatgttttacagtattgaaaattccaaactaaaggatctaaaaggtttctgtgttcagaaatcaatttgagtggttgtctttgttagtaggcacttcctacaaggaacaaatatgagaatttcatttatttatgtaaacacagatagatacatagttagataaacaagkagatagatagaggttaagcccttgccatgcatataacacctgtttgaccctataaatgaaagaagtataaggaggaaatttgctgaaaacaaaagatacatagttctgtatattttctacgctgaagcatttccatgtgtttatagaagtgagaaatcgcataagtctggatgattatgagaagaaaaaagaggaggaagcagtgagagagaattcccagcggagggaggcatattgattatgaaataagtttttacactgggtgcttaattagaatattctattacacagagagacaggcaaagatgacaatatcttagtacttcaaaaaataaattaacttttcaatggtgaaataatagttttctaagaaagtaattcaatgacacgttttttggttctttttttgcagatattatgtttttcactgaagcaatgcttattgctaatagttatttgatttccacatacttgtgccttttgtgcactttccagagactaaagtcattcttcaacaattctgctgtacaatggtcagctacataaacctctgttagacatgatctgtccagcagatttaggggttatawttcaatgtaggatttgaattgtaattatctgtcacagtagaaaaataatagttctaatcaacctgtctttattaccactttcrtcataattttaacttctctgtttttatataaggttaccattgccacctggggctttttcaggactctggaagaatcaggaagcattcaagcatttatactttgaaaaatttcctgtaagaactttaatatgcttttttatcttcttatgtacttttctatwattcttgcctattaaattgagaaacttgctcctagaatcgtagatcaaaaagaaacttttaaaggttatctggaccagtttccagctcccagggataagaatgcccaactcataattatctaaatacgtcaattttatagttattgtcagtctctagacatagaaatttattggtttttcttagcagcttttcctagaatttaatagtcttcagtatcaggacattatttgttacataaaaatgttttttggactttctgtatgtttcctctactggattcctctgtatcaacagacagagagcagcaaatcagaattatataatgccattaggaccctttaacctcttactggttatatgagcaaaatccattcagcttgcccagaagttgtatttttccacttctttatttttgacaccattttttgaatgttctctgagctctttatttttaaatctcattttaaaaatacagatacaggacagaaacagtgtactcaaagcccaacacccagcgtcctggataacaaaaagtgccttcctgtttcacattctgtcattgtgtgaaacttgttactccatgccatggtgatgtgtgttatgtttataacagcacttcattaataaagcacatcaggttctgctcacattatctttctgttgtccctctactaccaccccccacccccaccgcctaaccccaacagggacacctggtcctcatttttcactaagtaaaattctgaatgaacagaatttcactaaaaaagtttgctgaagtacttagcattttatctttattatttgttagtgaaggacagataacctaatcaacgaaatgaaaataattaaaatagctttctttagaaagaaattgcagcattgaatgtcctcaatagccaagattaaacatcccctgatagagtgtggcagggaagatttgtcagtatagttgactccagtaagcccaatctatctgcatgatgggccacagttaaatcatcagagtgcaggtggtgagatgattgattatagcctgacaatggcaaatgatatgtgcatgtggtattaacatgatcacctttaacactaaaagctccctcaaagcccctgtttatgtctacactatgtgaagtgactctgtactctgtctttttacctgatctcaaacctgttatttgaggaataataacagaataataacagcacagaagggttgagtaacttcccgtgagttcaaataagtgagaagtgatggaactgagatgaaccaaaatagtcaggcttgagagttcatactcttaactactactctagattgcctctctaatattaataaaagtattaattgcagtaaaattattgagagctcaggatgtgccagagtctgtcctctttcatttatatacactgtttcatgcatgcttcacagaagctttagaaggcagaactcattttcccatttaacagatgagaatactgagtctcagaaagtctaagaaacacaatagtggctttccaggatttgtactgaagtccatgttcataaacataggtatcaaaataactcagaagcattaggaaaaataatatttattttttctactttttattcttattattcttattctactgtcatttctagaccagcaaaaatgttttactttgagtgactaaaaattaaatttcatacttactattaaatttcactgaagcttgagtccaatcctaacccatattaataaactactgctgtattgggaaattattcattgggagctttaaagcttttaaaagttaatacaattaaagaagaaatgtatcaaagaattaytttgcaatatcaaagtatattagaattagtattgagctatkacttctccattaaaaaaagaaattggattcataaactttacaactctatattcaaacacttaaacatttctaaaaacacttcaacttattcttggctgttagaggagcaaagagattctagtacagtttccagataaaaagtagtgtaatttcctagtctagttacgaaaaacggcaaatgttcacagtaaatccatttctattacattgtgtgttttaccaagtttaaaatgattacattagttaacagtacatgctaatcaaatgttattttttcttgttttcagggatattatgataccatggatgctggttacatggatgaagaaggctatttgtatgttatgtctcgagtggatgatgtaataaatgttgcaggtcacagaatttctgcaggygccattgaagaggtattgatgaatattggtattctattccaagtagtgcttaggcacagagctgcactgaagacaatattgaggttatttcacttggaaaattaccacacccttcatttgcagcagaggctaggttactcttacatctctcccacctcactttctcttttagatattcatattccctacactcccacatccctgggtggtagtgaagagttttaaacacttacatatattttttgtttatgggaaagcctgtgtacatttgcttcttaatacttgctacttgaatgcctctagcttcttgatttactcgtgtttaatcatcaggtttgcacatggtctttaagtggtatgggattaaacattttattgtactcttaaatcctgagaattttcttccaatgtaagtcacataaagtctccagaagaggttttttaaaatgttttaaaaacttattcctatggagtaaaatctacattattgttatacaatactatgagtatttatactaatacagtttcttgtaaccatcaccacagaaaggatacaaaacaatttcaacgctgtcaaataattccatcataatgtcacctgtctattctgactctggtaccccttatttttttctttgttcctatgttttagtcttctctccaattttatataaatagatgatacagtattgtaacctttgagactgggttatttcatttaggaaaatacattttagattcttccaagttgttgcatttattaagaatttgcctttttatgttgctgtatagaatttcatcgtgcagctgtactaacaagtttacgtatccattcatgcattaaaggacatatgggttatatctagtttgcagcaattataaatagggctgttatacacattcaaatacaggtgtttgtgtaaaaaaatattttatttctctaggataaatacttagagtgggttttctgggttgtatattaagtgtatgtttaaggttatgagaaaccaccaaagagttttcccgtgtgactgtgctattttacatagccaccagcagtatttaagggttcatacttcttcccattctttctagaacttggtcgtgtcattactctttattaaaccattctactcggtgtgtaatagtatctcattgtgcatgtgatttgcatttctgtaataactagtgatattgagcatcttttcacaagcttatttgccatccatataccttttttgatgaggtatctgttaaaatcttcagcccatttttttaaattggactgtttcttttttattgttcagttttgtaagttctttatatattctatatacaagtcctttatctgatatgcagtttgcaatttctttttctagtttctgactgatctttttattttattaaaagtgtccataacagagaaaaaaatacttttcattttgatgaattctaatttatcatttttttcttttacrgattatgattttggtattgtatataaaaatgctttcctaactcagcatcacaaagattttctcttttgttttcatctaagagttttatagttttatgttttatattcagttttattgttttacatttatatcattttaaatttaaatttgagttaattttttaatatagtgcaaggtgtaggttgataaataattttttaagtggatgccagttgttccagyatcatttgttgaaaaagctgccctttctctattgaattgccattgcaactttgtcaaaaatcagatgataatattggagtgggtctgtttctagaatatctttctatttcattgatctaygttttttttatgatgatcatggaaaatatttaatagatttttttatgtagatcaatataattgatctacattatatttttatgaatatactgccttgacactgtagctatgtagtgtatcttagagttgaatattgtgagtcctccacatctgctcttctttcttagtcttgttgtagctatactagttcctttaggtattccacatacatattagcataaaattttctataggtacaatgaacccatgcataaattttgattcagattgtgttaaatccatatattgattggagaaaaattgctatttcaaacttactgagttcaatccatgagttttgtatatttctttctttaggatttctttggtatgtttcttaaatactttgtactttctagcatacagattctgaacaagttttgttaagtttatatttaagtatttaattttttagctattatacattttttaaaaactttggtttgaaatttttcattgctagtggatagaaatactactgatctttttgcagactgatatgtaacctatgatcttgtttaacttgcttgctagctctagcggtatttttggtagacttgttgagactttctgtgtaaacaattatgttacatgtgaataaaaacagttttattacctcctttccaatctgaatgctttttttggtctttttcttgccttttggaactggctagaacttgggataggatgttgaacaagactggtaagagcagacacccttgtcttgatcctgatcttagggtaaaggcaagaatggtgctaactgtaggtatttctgtaaacacacactttatcaaactgaataattgtttttgtatttctaatttgctgaagtgttatttttaattatgaatgaatgttgaattttatcaaatgctttttctgcctctattaataggaatatgtgatttttctttttaacaatgttacgtgaattacattaaataattttcagcttttgaaccagtcgtgcattcctgggacaaactttaagtgattgcaatgaattactgtttttatacattgattcgtataattaataattattgttattattattaatcaatagtaattttccttattctgaaatctactgtttgtagtaatcatatagccattcttttctttgaatcatgtttgaatcatagatcttttttcattttttcatttttaatctatctgtattatgtttcatgtgggtttcttgtagacagcacctacttagttcatatggacagcatctatttgtttttatgtttatccaatctggcaatctccatcatttagtgttttcagataatttacatttaattattgatatagttatatatctgcctaccagtttattattattctttttgattcttctctttttcattctcttatttcattctcccccttctctcttttaacttattttggttctttttttgtagcttttattaatttgtgagaacgtctatgattccattcataccaagagtttttgcacattcttcttgggccatggttattgcttggtttttaatattcatctttgacagttttttttataagagtgtcatttccaccttaccctaggtcttattatgacccaatgaaagctaatggcaatttttcctacatgagtagccagattctccataaatgaaagtttaaaaaatgatttttctctacttaaaagggagggaggcagccgtccttcctgaaggctcttcttaaaaacataatgtctttaatcaaaactctaattctttaatatataagtaaaatagccccaggagccagaccgccctgtgcatctccagttttacaacatagaaatgtttctaactcctgggaattaatctctttttagcaggtaaatacccaagaagatagtgagccaatctccccagcttcttgggagtttatactagggatctagtctggactatacacatttggccttgacagataaattaaagttttattatcctttaagatctgagcaattcattaggcaaatcactataggtctaatttttcagatgtttcaagagtctcaggaggctagggcttttataggagcactggtaaatttagaggtttatttctccatagttataatatttaagttaaattttctgataattctgatatttaggtaatgttgggtttggtatctagggattgtctttttttcttaaaagatgtttagattttcctgataaatgtctattttaaatcttatcccgagtattttgaatattacatcatgaggttctggatcctatttawatcttctgcatttctgttcttgtggctatttattttaggaagtggtcagcccagttaggatcagactacatagctttacccactttctgtggactgtggtttcaatgttaatttgattttcaaagcttttgtctatttggatattctacatatatacgatcaggttgtttgcaaacaaatacagttttatatcttctttctcagtctgtataccttttatattcctttcttgtcttattgcactacctagttcagtgttgtctttcttgccttgttgcactagccagtatgatgttgaaaatatagttgagggtggacatccttgccttgttccagatcttagtgggaaagttttgaatttctcaccattgagtatgatgtaagctctaggtttgtttgtagatggttcatcacgaaattgtggaagttcccctctattcgtagtatacttaatatttttatcatgaatgggtattggattttgtcaaatgttttactttttctgcatgtactgatatgatcatgtaatttttcttcttcagcctattgatgcgatggattactttgattattgaatttcgaaccagctttgtatacctggggtaaattccacctggtcatggtacataactctttccacacattggcatctatgctcatgayggcctctgtcaatagttttttttaattgtcttattttagtattaatacaatgggaatattttctaacttattctatggggccagcattgttccagttccatagattgagttagaaaatattcccatgacttctgtcattggaasgacagattgtagataattggtctaatttattccttaaatggtagaattaactgatgaattggtagaattcaccaacgaacctatcttcacctggtactttcagttttggaagtttattaattgttgatctaatttttaataaatataggcctattcagattgtcaatttcttcctgtgtaacttttgtcagattgtgtctttcaagaaattagtttattttgtctaggtaatcaaattggtgggcatagacttattcataatattccttattatctttttaatgtccatgatctgtagtaatatgtcctctttcatttctggttttagtaatttgtctcttcctttttttttccttagcctggctagaggtttattgattttattgatattttaaaggaatagcttttggttttatggtattttctattgatttatttttgatttaatttatttctcctctaatttttataatttattttattctgcttactttgaatttaatttggtcttccattttctagtttcctaaggtgaaagtttacataattgattttagatctctcttcttttctaatatgtgaattcagtgctataaattttcctgtgagcatgctgttgctgcatcccataaatattgatgttatattataattttcatttagttaaaatatgtttaaatttttcttgaaatatcttctttgactcatgtgttatttagaagtgtgttgtttaatctccaataatttgtgattttacacctatctttctgttattgattgctagtttaattccattattacctcagaacagatgttgtatgatttatattctttttaaaattttaaggtgtgttttatggcccaaaatgtagtctgtcttggtgactgttccatttaagtttgaaaaaaatgtgtaatcttcattcaacaatttcattcagagacaaggaaaaaacataaatcagatatttagttcaacaaaaataaaggaagaacatcagaaatgaataaatgaaggtgtattagtctgttctcacactgctagtaaagacatacctgagactgggtaatttataaaggaaagaggtttaattgactcataatcccatatggctggggaggcctcacaatcatggcagaaggagaatgaagagcaaagtcatgtcttacatggcggcaggcaagagggagtgtgcaggggaactctctttataaaaccatcagatcttgtgatacttattcactatcatgagaacaacacagaaaagattcacccccatgattcagttacctcccaccaggtccctcccatgacacatgggaattatggaagccacaattcaagatgagatttggatgggtacacagccaaaccgtatcagaaagtaaaataaaacattttaattttcttgttctcaatttatctcaaaaataacagtttgttcatactaataacagcaacaatatgtgtgcatatatgcacatacatatatatatgcttatgtataagcaaaataaatgacagcagtgatacaagggctagaagggaggaattaggaatttttgttattataaggtacttgctttgtctatgaagtgttatttgagtgtggacttttttttcttattcttaattattagttgttgaatgaagtggcctattgatgtcaattttattcagttgattgatggtactgttgaactgaactatgtccttactgattgtgtgcccagtggatctgtaaatttccaacacaggagtgttaaagtcttgaactataatagttgattcatctgtttctcctcccaattctatcagttttgcctgacatactttgatgccctaaggatcatcatgccttctcgggttattgacctctttatcattatgtaatgctcctctttattcttgatacattttcttgctctgaagtcttctgtgcttgaaattaacataactactcctacttataaaaattagcatggtataactttctccatccctttacttttaatctatatgtattgttatatttaaaatsggtttctttcagaaaacatataattgagtcttgtttttgatctactctctgacattctgccttttaattggtatatttagatcattgatattaagtgatcattaatataactgaattaacatttaccagatttgttacagttttctatttgttgcccttactctttgtttctatttctgtctttctttctctgcattttgtggttataattgaacattttatattatttcattttgctctcctttcttaacatattaaatatacttcttttaacttgttgtggtggttgccctaatgtttgcaatatatgtttacaactaaccaaatccagactcaaataatacatattacttcatgggcagagcaaataccttatgatagcaaaatatttctttttttttattatactttaagttttagggtacatgtgcaccatgtgcaggttagttacatatgtatacatgtgacatgctggtgcactgcacccactaattcatcatctaatattaggtatatctcccaatgctatccctcccccctccccccaccccacaacagtccccatgtgtgatgttccccttcctgcatccatgtgttctcattgttcaattcccacctatgagtgagaatatgtggtgtttggttttttgttcttgcgatagtttactgagaatgatgatttccaatttcatccatgtcygtacaaaggacatgaactcatcattttttatggctgcatagtattccatggtatatgtgtgccacattttcttaatccagtctatcattattggacatttgggttggttccaagtctttgctattgtgaatagtgctgcagtaaacatacatgtgcatgtgtctttatagcagcatgatttatagtcctttgggtatatacccagtaatgggatggctgggtcaaatggtatttctagttctagatccctgaggaattgccacactgacttccacaatggttgaactagtttacagtcccatcaacagtgtaaaagtgttcctatttctccacatcctctccagtacctgttgtttcctgactttttagtgatcgccattctaactggtgtgagatgatatctcattgtggttttgatttgcatttctctgatggccagtgatggtgagcactttttcatgtgttttttggctgcataaatgtcttcttttgagaagtgtctgttcatatgcttcacccactttttgatggggttgtttgtttttttcttgtaaatttgtttgagttcattgtagattctggatattagccctttgtcagatgagtaggttgcgaaaattttctcccattttgtgggttgcctgttcactctgatggtagtttcttttgctgtgcagaagctctttagtttaattagatcccatttgtcaattctggcttttgttgccattacttttggtgttttagacatgaagttcttgcccgtgcctatgtcctgaatggtaatgcctaggttttcttctagggtttttatggttttaggtctaacgtttaagtctttaatccatcttgaattgattttcatataaggtgtaaggaagggatccagtttcagctttctacatatggctagccagttttcccagcaccatttattaaatagggaatcctttccccattgcttgtttttcctcaggtttgtcaaagatcagatagttgtagatgcaataaaaaatgataaaggggatatcaccactgatcccacagaaatacaaactaccatcagagaatactacaaacacctctacgcaaataaactagaaaatctagaagaaatggataaattcctcgacacatacactctcgcaagaccaaaccaggaagaagttgaatctctgaatagaccaataacaggagctgaaattgtggcaataatcaatagcttaccaaccaaaaagagtccaggaccagatggattcacagccaaattctaccagaggtacaaggaggaactggtaccattccttctgaaactattccaatcaatagaaaaagagggaatcctccctaactcattttatgaggccagcatcatcctgataccaaagctgggcagagacacaaccaaaaaagagaattttagaccaatatcattgatgaacattgatgcaaaaatcctcaataaaatactggcaaactgaatccagcagcacatcaaaaagcttatccaccatgatcaagtgggcttcatccctgggatgcaaggctggttcaatatacgcaaatcaataaatgtaatccagcatataaacagaaccaaagacaaaaaccacatgattatctcaatagatgcagaaaaggcctttgacaaaattcaacaacccttcatgctaaaacctctcaataaattagatattgatgggatgtatctcaaaataataagagctacctatgacaaacccacagccaatataatactgaatgggcaaaaactggaagcattccctttgcaaactggcacaagacagggatgccctgtctcaccactcctattcaacatagtgttggaagttctggctagggcaattaggcaggagaagggaataaagggtattcaattaggaaaagaggaagtcaaattgtccctgtttgcagatgacatgattgtatatctagaaaaccccattgtctcaggccaaaatctccttaagctgacaagcaacttcagcaaagtctcaggatacaaaatcaatgtacaaaaatcacaggcattcttatacaccaataacagacaaacagagagccaaatcatgrgtgaactcccattcacaattgcttcaaagagaataaaatacctaagaatccagcttacaasggacgtgaaggacctcttcaaggagaactacaaaccactgctcaatgaaataaaagaggatacaaagaaatgcaagaacattccacgctcatgggtaggaagaatcaatatcgtgaaaatggccatactgcccaaggtaatttgtagattcaatgccatccccatcaagctaccaatgactttcttcacagaattggaaaaaactactttaaagttcatatggaaccaaaaaagagcctgcatcgtcaagtcaatcctaagccagaagaacaaagctggaggcatcacgctacctgacttcaaactatactacaaggctacagtaaccaaaacagcatggtactggtaccaaaacagagatatagatgaatggaacagaacagagccctcagaaataacgccacatatctacaactatctgatctttgacaaatagcaaaatatttctaattcctcccttgtagctcttgtatcactgctgtcattcacttgctagsacattagcatatacacatgcgcatatacacacattgttgctattattattttgaacaaacttatctgtgaggtaaattgagaacaagaaaaataatttttttattttacatttgtttattcatttctgatgctcttcctttatttttatttatacaaatttctgacgtatattattttccatgtctccaaataacttaacatttcttgcaaagcaggtctacgggcaacacattacctcaatttttttcttttgtctaaaaaagtctttatttctccttaatttttgaaggataattttccacaatatagcaatctggaattctgtaattctagaattaatggtgcttttttccctcttgacactttaaatatttcgctccactctcttcttgtttacatggttcctaaggataagtcacatgtgattcttatctttgcttctctataggtaaggtgtttctccctccactctggctttctctagaatttttttctttatcttagattgtttgaaatttgagtatgatatgcctacatgtaggatttttttttttacatttatcttgcttgatgttttctgcaattcctggatctatgattttgtgtcagcattaatttgggggaaactctcagtcattatttcttcatatattgcttccatttctttcttttcctctcattaccgctattatgtgtttgttacagcttttctatttgttttgaagttcttggatattttgttctgtttggagatttcttttccatcttttttctctttgatttttggttttggaggtttctattgatacatcctcaagcaccaagattcttctttcacctacatctagtttacaaataagtccatcagagacattctttatttttgatacagtgatattgctttgtagcattttaaaaattctttcttagaattttaatctctctgctcagcttacattaatcatctattaktgcaagttgtctactttttccattaatgcccttaacatattaatcgtagttttaaaaaatatcatgttcagataattccaatattcctgtcatatgaaactctgtttctaatgcttcttcagtctattcaaactgtgtgtgtgtgtgtgtgtgtgtgtatttgtgtggtttgttatttattttaccttttagtatgccttgtaattgcctgttgaaatactgacatgatgtactgtgtaaaaagaacttcagtaagtaggcctttgctggtgtattggtaagatgcagggggaggagaagtattctgtactcctatgattaaatcttagttgtttcatgaacatgtatccttggactgtgaacttcatcagttctttgtagatttttcccctcttaaaataggatgagggctggcgcggtggctcacgcctgtaatcccagcactatgggaggccgagatgggcggatcacgaggtcaggagatcgagaccatcctggctaacacagtgaaaccccgtctctactaaaaaatacaaaaaattagccaggcgtggtggtgggcgactgtagtcccaactactcaggaggctgaggcaggagaatggcgtgaacccgcaaggcggagcttgcagtgagctgagatcgcgccactgcactgcagcctgggtgacagagtgagactctgtctcaaaaaaacaaacaaacaaaaaataggttgaataaagggggctggaattggatatttcctttctcctatgtcagttaggctctgagaaaactccagcagttaggttctgttacagaatagtttcttttaagggtaggccctggaaaaaggaacacagtgttttgtcatacagctcgggttttacaaccttggcacttgttcctgtagaggtttctgctccaataaattgtgtttttctctatttacttgtctgcctctacagttttgggggagtggttttccctgtgaacttcctctctgacaaatctaagaagaattgtttctgttattgttttttattttttttcagtttgtttaactttctacttgttagaatggagtggtgaattcgaagcttcttacttgtagtaccaaaaccagaggtcccttttccctctttggttcacaaaactctcctttgctgttcttatgggtaatgagtcagggctttgtctccccacagttaccaggattattcctgcaacgtctacaggaacagtgcctctggggagaggaaggggtcttgtctctttgctggcagttgcctaacacatgccagggtaagtcaacagcgacccactctcaggagcagcatggctgctgctgcagagagcaagtggcactgatcctttctgggttctcttggtttagggtaggagagtacccagggctccctcctgtaggatgtgttgtacagctagtgtggagaagggaaggggcacaccttaattgctgacatttacttggtgtaaggtgtggagaggtaacaaattttctgcagctctgtagagagaggggtgggccctgcttcttcgttgtcacttatctgaagtagggaggacaaaacctgttttatgactcccctacttgttttcctgggcctctgaccagacacagcaggctcttagggctttttctgtctgtactcattgtcagttacacatgctgagctgctttagtcctcgggccagattatacagaaagtaaagcaaacaaatgaacaaaaataacaaaatccccaaacttccaaatgacagtgaactcatcaccaagttgtatttcaagttcttatgttctgactgagtctaccaatatatattttagcccagagtttttcattgttattgtggaagatataagttacttcatttttttctagaagcaaaccccagaatagtttttaaactgaatggagcaaacaaactacaatttgaatgaaagaaaatgtttaaagtaacatgattaacaattcactgtgatcagagtatgcagagtcaaagttttatttcctctttctctaattaaaagaggatcagaaaaaatagctattgggtactaggcttagtacctgggtgatgaaataatctgtacaacagactcctgtgacatgagtttatttctatagcaaacgtgcttatgtacccccgaatctaaaagttaaaaaaattaaaaattaaaaaagtttgtacctatcttcagttcaaacttaacagcttaatacttcttgtcatgttgggatgtgtttcttaaatgtgattttttttgagtaaaaggaaggaactttataaaatattttagaacatttcacctttgtgtgctattataatattatcttgtttttaaacgactctaaattttgtgataacctgaaattgaaatttttacttcatgtcttttggtgtgttggcaaaagatggttctggttgcatgaacttttaatttcctccttctaagagattacttccaatattcacctgcatttccggcagactcagtcaatcaaaatatgaaaattttgtatgcatagttattattattagtcaaaaaccttagtctttttttgtttttagaatgaaaagaggagtatcaacctattcaaagatatgttgtgttttaatgcttctactgaaatccttctcactgtatgtaacagcagaatgagataggcagaaaataggcagttaaaatggaaaaagagaaaaacatgctagaattattggcatctaacagaaactttgtcactgggtcttggagtatttagggtgcataacaggaaaccattcagaccttaaatctttaagttaacttctctctatatatgaattaaatgactaagtttttattaagtatttatatttgataagaaaattctatctcagtttaaatcagatttgtcttctctgtctttgaaatctcttagagaattgtgaactgatactttatactgactttttactagctcctagcaatattgcttagcaaattgattatttccttctgaaatgtttgatgatgtatccagctcttattaaagtgcccaaaccttactatttaactacttgacaagggttgccagtggtgaataccatattccactttaactttttggaataggaattgaggtcttaatccaatgaaagttttatttgtagaaaaaaatagactgaatattgtttttaagtacagtaaaaatatctacacttttccagtttccctaagtaaacattttatgagtaattattagaaagacaaaaaagtgtgtaagttattgttagaaagtcattcatgcttgcaaggatgtagagaaaagggaactcmtacacggttagtaggaatgtaaattagtacagccgttatggaaaatagcatggagatttttcgaaaaactaaaagtagaactaccataaggtcttgcaatcccactactgggtatttatccaaaggaaaataaattagtatgtcaaagggctacatttacccccatgtttgttgcagcagtgctcaagtagcaaagatatagaatcaacytaagcgatcatcaacagatgaatgaagaaataaaatatggtaaatgtgcataatagaataatacttggccataaagaaataataaaatcctgccatttgcagctatttggatggaactggatttcattatgttaagtgaaaggatccaggcacagaaagacaatatctatcctcattcatatatgggatctgggatagtttatcttacagaaacagagagtagaatgataccagaggctgagaagggtatgtgtgtgtcaagtggtgaaaggacatgaaaagagatcggttaatgggtacaaataaacagttagatagaaggaataagttctaatattcagtagcaaagtagagtgtctatagttaataacaatgtatagttcaaaatagctagaaattaggacttggaaygttttcaacacacagaaatgataaatactcgaagtgatggataccttaagtaccctgaattgatcattacacactctatgcatgtaacaaaatatcacatgtaccctataaatatgtacaaatatttgtaccaataaatttataaaaagaatttcgagtacaaaaaaaccgtaaaatttatattacctaaatcaagcagatattctattaaaattattacaccaaaaatatttcagggaactctattttcttttctgttctcatcataagaaaatggagctctagaatagctttttatcaatttaagaggacagtatccttgcagatccaagtaaaaatgagggccttctttaactattaagtaataatcaagtctatttttaaagtgttgattagtttttgaaagcccagcattgagctagacatttaggaaactttgatggaggttaaggagttcttagaaaaattgtgtctaaaatctgctagttctgcacttgtaagctaaaatttgcagaagctaatatgattgttcttgctcagttctctttgactgctgtggcttttcatgtgaagaaaccttcaggcgttttcatacaaagaaatgtacaggaaacaaattgggctctctaatttcactctttcacttgtagcttaagtgtaggtttcttaaataatcccactaatatttgtgggaacttggaaatctggtgttaacatactgtctttaaagcctactcaggacacggttcacatgccttttgcctttttgagggttgttctaaccaaagtgtcactatttgttttccaaggtagctattttgtttgctattttaggaatgattcttcaacattgaatatatttccataaagtgactgtgtatccagctaagatgccttgccatttcaattctaccaagcattaaatgactattggatttaagtagttgcaacattgctgaatagttcctgagtattcacatgaatattgatgagtatctggaatctctctgacaagtttcctagattacttcagtgtcagaggaaatttttaaaaatctgtcttcttcgaaccattgcatagacaatattgcactgcaaactggctcctcccatcttatgagggtgtttgatttgaactgattttttaaattaagattcttaaaaatgtaattgaaaaacctgtgtaggtcagctcagtgaaatcttaaaatattttaaattcattaaaatctatgcaaaattggcaatacctaagaaacaacagatgacaggaatttactagtcctaatctcataacatttatatactcaattgtggtgagactattgccttttaagttccatgacttttttaggtacttaaatgccagttaatcacagatgcttcgtagattttatttggagggaatgcattaatgtggtttttgatatttttccccccataggacatttggttggcttctgtcccttgaatgttgccaagacatatttcaacgctttcccttttaatgattcagttgttgaaatcatcacttggcatgcaaataatatttatggggccaacataaaaagctaccacccttcctttatggcattttaaaaactgatagatgaataatatttgatttcactcagatatgacacataattcttgaaaatgattttgcgtctcataatttttaagaatttatctgcagtaggcaaaaatgggaaactgtaatattatattataggaaatgttgtatatttcttccgattttaaaatactccttgcttttatagaaaaacaatcaacattttcccatccgcttctaaaagcactaagactaaggacaaaaacttagtaaaatttaaaataacaaagtgaaagagtggcagactagatgttttgacattaaatttagttaaaactctagtcatattggttaggtgacaaaatatgtgggtgatttattttttaacagtgatttgaacagataccttggcattttaggaactcaggtacagagagtcatggcaccaataaacactaataatttttgacgattaaaactctggttagccaagaaaaagagatgttcttcactcattaagggaataccaagtcagaattcatagcatctaactttccaagtctatatcctatctggtacagcaaagtattatttttcatgactaatgactgactacagtaagtactaaaacatatatctggcagtaaaagttgtctctctgatctcaccacatctttttattcttactatcacgaccttaacctactgtagtatcctttcaggtggttttcctatataagctgtgtcacccactctcaacaattctttatttattttccacgatgaaactaaaataagtctgtgcttttcagaatccactctgaagtgaaagaagctaatctgaaaaggctacatactgagtgattccaattataacattctggaaaaggaccttgaagacaatataaagatccatggttgccaagggttaggggaaagggaagggatgaatgagcagagcacagggagtatttgggtcagtaaaactattctgcgtgatactataatggtggatacctgtcttatacatttgacaaaactcaggcatgtacagagtagaccataatgtagtaatgtaaactatgaactaggatgataattgtatgccaattttggttcatcagttacaacaaatgtattgctctggtacaaacttttgataatgggggaggctatgtatatgtagtggtaagatgtatatgagaatcctactttcttagttgatattgctatgaatctaaaactactttaaaaaataaacatagctgggcgtggtagcttatgcctgtaatcccagcactttgggaggccgaagcaggtagattgcttgagcccaggagtttgagaccagcctagggaacatggcgaaaccccatctctacaaaaaaaaaaaaaaaaatacaaaaatttagccagccatggtggtgtgcacctgtagaaccagctgttgaagaggctgaggttggaggatcacctgagcctgggagattgaggttgcagtgatctatgaacatgccagcgcactccagcttaggtggcagagtgagatcttgtctcaaacaaataaacatacaaacaaacataaaaacccgatattaaatctgctctgatcttgcatctccttctcaactactgaaaatgatttatcaccttcccaggaatgctaaaatgagttggaagttcctagcacaatacctatccacctctgtaactccatctcctccattctcactctttttgttctctgctttccagccacattggtctctttgaggtatgaatggtgcctaygaagtccttccccagggtttttgccccaaccccttctccttgcctaataaatatctactcatccttcagatctactcattgttatttcctaaagaaaaagtttttgaggcccatatctttctgcaaaattggttgcttttgctgtatctttcatrtaaaaaaaattccccagagcccttatcacttttgtatttagacatttagaatagatattcataattatttattaatatctgtctccactactagactgaaagcatcttgaagcaatacgctatttttgatcacccctgaacccagcgaatgtttgcaacacaggagtcatttagcaaatattcattgaatgaatgaatagaagaaagaacaaggactgccagatgtgctgttggttaaaagtttgctcactgttttctctagctattagagctagagagtcactgaaataatgattattggggtcaccaaaataamtgttaatctttcagaaaaaaaattttgaatatgcatttttaaaagtcccgtcaccatatatatatatatattaaccctaagcgtctgtattttatgtggttactcaactctgtgggtttttttgatttcagatagataccagctttgtgaacttaaagcaagcagtatgaatatagttcttcaacagtggggattatctgatgtcagggcttctctccatatccagcctcttgcaagtcctggaaaatcatctctgggtgggtggccactagaggaatttcattgttcactaacagactcagaaataaagttattatttagccatagggcagcctcagattcctctggaaggtatgcctatggcagccagcattaagaccaaatcgccatgaggctgcctgtttacagaggtttgtttacatacagtatccactacacattttctctgacttcattaataaactgagacaaagaaaccatttccttactttccaggttagctgagcaatttatcttaattactgtcaacctttagtgactaccatggggattctaagcattcacttcactagtaatgatgtaaattacttatgaattttcaataggcagccatggatttttggcttgtcttacatgcacttttttccccaactgaaattatatgtgtttgtatatctatatctgtatctatatctatatgttgaatatacatatatggtaaataaatgtattctaaatraatgcctttccttattacagtcaatcctttcccatggtaccgtggcagactgtgctgttgttggcaaggaagatcccttaaaaggtcaygtccccttagcactctgtgtattgagaaaaggtgagagatctttttctccctgattgcttgggacctgaataattaactaaggttaattcagtgcttaccatctgaactttctctctagatataaatgcaacagaggagcaagttttggaagaaattgtgaaacacgttagacagaacattggccctgtggctgcttttcgaaatgcagtgtttgtcaaacagctacccaaaaccagatctggcaagatcccccgatcagctttatctgccattgtcaatggcaarccatacaaggtaaattatcaaagatatttawtcctgggttctaagatatttttcttcatttctttggcatcagcaaagctcttaaaaatggttctcaaatgtgaattgcatctctagaaaacacataatagtactattttttaatgttaagggagagattatatagccattccttctgtaggaatgaaggttttggaaagaaactcagattagttaagaacatatgctttgatgataagaaccaatgtgtgaaaatatttttatttatttattttaatttagagatagagtcttgctttattacccaggctgtagtgcagtggtacaatcatggctcactacagccacaaagttctgatctaaagagatcctctcacatcagtctcataagtagttgggactacaggtgcatgcaactgtgcctggctaatttttttcttttgtatttatagaggkagtgttctcacyatgttgcccagggtggtcttgaattcctgggctcaagcgatttgattgcctcaacctcccaaagtgctgggattacacgcctgagccactgctgcctgccaaaatattttttctcttagtaattgtcagttaaattcaaacaaatttgtggaaacttaatcctattgaattaaaaggtacattttccttattatagtaattaatggcaattagtgaatgagaaagcaaaataattgaggctagcggcagtagatgtttaaaatgctctaactgataaatgctaattttgtaattattttaggaaatcttaggctgattcaatcatatgttttaatttgtgtgtacattatgtgtgcaaagatatacctatttttatcattaagataataaaaggcaatgcaacagtaaggagtagttatgtgaacaagtgacaaaaaagaaacattctttctacagaaatatatagaagactcttaagaggaactccaactctagagaaaataccatctaggtccaatagttttgctaactgaactgtttatttttttactctggaaagctacagatgagtattaatatattaggttcaaagttccctatttttaaactttccatatgaatattacaagacaatggggaaaacaacattgcatataattgtttaattatagaaagagtagaagaaattcaaggaagagtattcacctgaccctaattttttttccagataacttctacaattgaagaccccagcatttttggccacgtagaagaaatgctgaagcaagcataatgagtttgtcttattcctattttgagttgatttaatttcttaattgaaattaaattatttgagttgtttctcagaaataaatatttcagtagaaattacttgcaaaatgaaatgtgaattgtaaaacttggcctaaacaaatctaatgaaaacatgtgaaagacctgtgccttttttttggtttgaccctgttagcattgttattagttatctataacatggcttattgaatgtcatctactgctttaggaaaaacgtatctagtgtattatttttaaaattgtacctcccaagaagaacactttaattgaaagcaacactaatatagagccacttcctgaaaccaagaatctgtagttttgatccaaaatctaaaacttaaagtcagaaaataattaaaatttttcttgtagaaattttagatattttctagtattctttagatgctcacattgttttaaataaaatagatgaaatgggaagtttaggtaatcatctagacagatgaaattattatctaggtaggagggcttttctatacattttctgagggaaagcagaacaccggggttatagctataccttcaggtcttttgttacttaggcaaggaaaaccacatgtctgacctggttcagcatgtaatccgagcactttgggaggctgaggcaggcggatcacttgaggtcagcagtttgagacgagcctggccaacatggtgaaaccctgtagctactgaaaatacaaaaataagccaggcgtggtggcgggaggctgaggcaaggagaatcacttgaatacaagaggcagaggttgcagtgagccaagttcccccactgtactccagcctgggtgacagagtaagactccatctcaaaacaacaaaaacaacaaaaaaaccacatgcctggcggagaacaaagagatcatttagtccaatctcttcatggagatgagggctcctgggagcccctcttcatgtctcaggttcttagttgactatgtttatccaaatgattccagattcctgtggaaacaaggaatcgatgtacaaatggggtagggtggcaaggaaaactcttaagagagaaacatcaaggttttcacattaggttaaagacaagaaggtttctaggcaggtagtgtaatgtctaggtgattttgaagtgaacttaagccactaggtttgagggacaaaggacagtagaaaatggtgaagactgcagatcacctgctatacctcaaggagcagcggacccagcagaatatggcccaaaaaggaggcaggtctcctgttgcaagagcctctgtttttttaaagagaaaacaaagaatcctggtttttatgtgaaatctctaattttaaaataataactcattaaaaatattgtaatgtccaaaagtatctttccatttaacttctaaaaatctcttaaatkttttttttaaataattgtaaagtgagtttttgttaagcttataggaatgggccagttaactaaggtagacagatgtaggaaattaaatatttgatttacttagggatctatatgacatcagttatcaaagaatacattttaacccaaaagtataccatgctcattgtatctttgatcgttcttcaagtatttctcaatcttttaatctatcaggaacattamtatcaagagcagattgttgtaacataatactcaggatacatgaaatgtatgtgagagataaatagataatagaaagtttattgttataaaaatgacctacaacttatataaaaaaattctgaaaatgttgactttttttggactgaagrctgcaaaataaatggcttctcaaagtaaattcctatttacttaaattgccttcttgattgttacacctggaaaaatatattcatctactttttccttttaattatgttagtagactgaattaaaccagctacatagacactctctcatttgaagctgttgggatccttgagttgcctctttcattggtacgttttatccattgtcacaactgtggtcttcattaataactcattttaatgtcttaggagtagaatgtgtttccttattttttttcaaataagagtcagttaatttgaaatggcaaattatttacctgaatgtgtatcattgttcatttgcaaggtttaagctcaggcagatccaataattaggtaaaggttgcatctttggtcctcttgcacattttttctggtaatcaaatctgaagcgacatctcagcaagcagacttgggttattttccactaggatgggaatggaaaacagtgctggagactggggaagtggctatttcctgtgtctcactggggaattgcaagatcaaagaatgttgttacttttatgtgatgaaaaaatagggcaagaaagatatacctgaatcatcagactgcttaaaatttgggaggaaaaaattctattttactactaaccataaatcacttttgctagatagtactttaaagattctgaattaaatgtatctttaaaaacaacaatataatattactaaaaaatgcagacatacttaaacttgctagaataaattctgtgaggtcttcgtttggtattttcataggatttcttactgttaagttattggaaaatgaaaatataaagtgctttcagaagttatagtattttccaattcattgaattactttgcttgtgaaaatatattaaacatatttaaatgagacctatcctacatttaaaaaccagttttgtttatataaaattgtatttgaaaggtcctgaacattaaaaatgtgaaaatttataatgttgatgatcaaaagtaacgtgttgagactctgagcttaatccattaaatggattttagaatctagtagaagttatctttcttataaattaaaacatattttatgcttcttttttgagggaaatacctggatcttttgcatcactatatgttagtgtctattatagatgattaatctttctaacttgatctttaaaagaaagaaattgattttagtgattgagtgttatataatagtagatacaaatctagttatggcattataatgtcgtagttcctatattctatttcatttctatgaatcaagatgcccatgtttagatgagcttagaaagctacttctcattgttcctactcaggccacatttttagaaaaaaattttaagatcactcccataagcaagtttagatctccctcttgtggcagactcaattttgaagctaaatatttgggtcacccaaagaacacnnnnnnnnnnnnnnnnnnnnttgcttgagggatcagaggaaatgcatgaacagaggtgcgtgggaactacgggctgctctgtgaactcagtgccctccagttacgagctattgtgaggttccatgatgtaatggcgagcgctttggactctgagtacggtgatcagcgttcaagtctcagtgggacctttctgtataatgccaatgatattcctattgctccctaagcggaatgggggaaattgccccagtcatggtcacccaccgtccaggccacttttaaagattctgaattaaatgtatctttaaaaacaccaatataatattactaaaaaatgcagacatacttaaacttgctagaataaattctgtgaggtcttcgtttggtattttcataggatttcttactgttaagttattggaaaatgaaaatataaagtgctttcagaagttatagtattttccaattcattgaattactttgcttgtgaaaatatattaaacatatttaaatgagacctatcctacatttaaaaaccagttttgtttatataaaattgtatttgaaaggtcctgaacattaaaaatgtgaaaatttataatgttgatgatcaaaagtaacgtgttgagactctgagcttaatccattaaatggattttagaatctagtagaagttatctttcttataaattaaaacatattttatgcttcttttttgagggaaatacctggatcttttgcatcactatatgttagtgtctattatagatgattaatctttctaacttgatctttaaaagaaagaaattgattttagtgattgagtgttatataatagtagatacaaatctagttatggcattataatgtcgtagttcctatattctatttcatttctatgaatcaagatgcccatgtttagatgagcttagaaagctacttctcattgttcctactcaggccacatttttagaaaaaaattttaagatcactcccataagcaagtttagatctccctcttgtggcagactcaattttgaagctaaatatttgggtcacccaaagaacacatttcctgatagtttaagtaaattgtcgagccttatgtgactagaaaacaaagcttaaacagagaactggaattattattttttttattgacaatggaaagggtttctgttatcattaccttttgactgaatctgttaaataaaaatagacatcaaaacaaatgtaatgtacgtgcaaacatagcaaattaaaatacagaaaagaaattactaatgacaggtcttgcgcttaataagatcaagcagcagaaaatcagcagttagataaatggtattattaaataggctttactttgaatctcccatataaacaaagaataaacaacagtaacaccaccaaataaagccacagggaagagattactcttctatacttttatacactatatatgttaatcattctgtctttcatttatttcctctgataaaactgacttcagggaagtcgcaacaaggccatctcggctaaaagcttataacattagacatgagtctggctaatgccctgttacattgacaaaagggaaaggtatcttgggtttcgttttctctagtggaaatgagcctcagactctgcggtggttgacattcactgtccagtactggctggcatttcaagatatttgaatgaacatgtggttcttagtaaagaagtttttttatctttttttttttcttggtccacaggtaacaagagaagattatggttttttaatataaatttttaaataattgcttttgacccttgtaaacagcttggctttgttttgtattgaaaaggagatcaagccatcacagtgctatttctaaagatataggacatccctgattgcctttaaagctctatttttggctccggttccaggttaaatcattcttttttacatgatcagaggcaggttgttcagctttaagtattgacagacttgaaggagaaacacgttgaagcatgaaacatgcttcaaggaaacatattgatttgactattaacaatccaaaaactgtaaaaatggtggaatggtaaaatacaaacagtacttggaattgtcaaatgtttgcactcgagactccatgaaccatatattttattttttaaaaaatcatatttatatccatttacataagacttacacatttaaaaagaaatgcacggtaatacataaatgcctagtatattacaataaaacatgaaaaacaactggcttcatttcataaaagcatctgttgtacagagtttatgatgtagatgatgtttattattcaaatgacttaagcattttattacaatttgtagtaaactaatcaaatgtaatatctgactccccccaaaaatcacatttttcagcttttaataagtcatgacgtcattatttccttagaattcagttttcacaaaggttttcactgctcgtcttcttagatggtagtgcactttaggtagagtagactgaaaagacgccatctaaaatatacaatggatagcattagttcactgaaaagtcccagactgggaaatctcattctactcctctgtggtgtacctccacgcagcctgcttactcctgtcctagaagatcatgagaaggaaatcatctaggatgtagccaacagccgtatgtaattaacatttgcttttctccaatttggtgcaggggagcttaacaaataatagaatttgctcaactttgtggaaagtatggcagtaatgtaaacaaaggtagttatgcaaaatgttagcatgccttctgaaaaatttacaacttgctaattaataaattgggttgaattgacctatttcataatgtagatttatattctagttcatatattttagagttcttaaaaaatacctttatttgttacaaaaacataacgataataagtcacctattgtaaacgtttgtgtcagtagtatggcattgctgattgttttcagccataatgtacttagaaaaagctcacaattgctattactgacacaaaagaaacagcaagtagtatgctctggattattttaatatcaaaagtgttgttgtttcacccaaacaaaaaatggttgtcctagattgaattattgtaaatgaatactgttatcccaattaatggtaaaaactaggaaatatgaactagaatgtcatgcacaaaaaacagattgcaaatagagtaactctacccatcacttaagagctaagaagcaagcactattgaacatattaaatagtcatttgtaaattagtgaagtgttcatttcctgaagaaattataatgctatgtgtagaatctaatataaacagtattttgggagacctcttatttagccaaattattatatactttaaatcatgtctaattaggtgccaaattatataccataattaaaattttaatgtaagggttgtacattctgaaattaaatctcttatcgggatgcttttcattttatcagcttcaaatagtgatccaaataaggcagcatatctgctcccatcttaagcccaaaagaccaacaataaattgtgtggcacttttagttcaaggcaatgaaaacagcacaaggtgagttgttcctctgtctataactgttttctcttaaccctgtgcacacattttgttctaaatatcgctcttaaaaagtatttttctaaaatattgattcatcgaaagtggttaaatattttggtaaagcatagttttaggttgaaaaaaaattatgaacatttgacatttataaatctaagaaaccacagttttactattaagactgtttttcaataaaacctcatttttatatggattttaaagtagctttaattggtatttccttaaaatcaaatgcttggtatttatggttacataggaaggttttgtgctggtcctattctccattcttaaagtaattttattttgttcctatatgtcttaaatacttaaaatttatatttgtttttagcaagtgtaaatcagattgataagaaacaatgtaataaaggtttgaatttttcacagtttctactatttatttattgatttattttaagacggagtcatgctctgtcacccaagcttgagtgcagtggcaccatcgctcactgcaacttctgcctcccaggttcaagtgactctcttgcctcagcctcccaagtagatgggattatgggagtgcaacaccatgcctggctactttttgtgtttttagtagagatgaggtttcaccatgttggccaggctggtctctaactcctgacctgaagtgatccacctgcctcggcaagtttctattttttaatatgaaaccatctctaaatcattttcctgtctgttgctatttgactcggtgaacttgcttaaatccctatccgctaccttggcttccttatataaaatatacacttaaaaagataggattttttaaagtgctgaattattatcaataaaatgctaagttactcaacaggaaatggtactaaaaagtagaaaacagtgtagtggcaacccattgatgtgtaataatacagtgataggcctccaacaggcagaccttaaaccacaggagacagatggtgataggaaatgctagactaagtgttacaatatgaagatttctttttc

SEQ ID NO: 95166 - DNA, 180583 bp, Homo sapiens
ggtggagcccctcccacagtcatcagtgtctcttctgcccagtgccaaatttgtctggtggctattaaggaagctgcctgatgattatccgttggctcaagcttggctttatctctagtcttcgattctaaatgagactaatgaccatttgagattcagattctgcaccaactgcccagctgcctcctcagtgaaggagctgaaggggaatcccttacagcctggttcactgctcccatctcagcaaatacccccaccaggcaataagagaccctggagatacctccctctccatcactgcccaagttcaagccatcacctgatcctgtcaattttggcttctaaatatggtttgaatcctgtggtgctatccatctcccactccccaaatagtctagcacagactattgcaatatcctctgaaaggtacccccttcattcacccctgtcttccattttgtcttccacactgtagctagagtaacctttaaaagtgttcatctgaacctacccacccacctccccctacactttcccactcctaccctaattcatccggtgtcacttcttgtctttctccatcactttctctactccagacctactgatttctattctcaaaagcaccatgttccctccaacccaggcactttgcctgtgctgccccctcagcctgggcattctcactctccttctgctaggtaactgcactcatcctcagggggagcctcccctggcccacccagtgaagcctgggtccaggtccactgttgcctgctcttagggcaatgtttcactctccttcctctctctgatcttagctcatactcctttggaagttatttgtttaaactcatcttccccatgagactgtaggcttcatgataggagaaatgtgtctgtttttcctcaccactgtatccctaaagcttagtgtattgccttgggttgggtatatacatcaggcaccttgtacctgcttgttgaatgactgaatgaacttatataatcctcccaatgagcctgtgatgatcttgcctgaggccagtgctctttccttgctctcactacgtatagaacctgctctcacagcattacaagacggagacagtagactctgacaggcatagagggctctggatcctgattgtctgggctcaaatctctcttctgccacttcctagctgtgtgactttgggtaagttccttaacatctctgtgcttaatggtacccctcacatggggtgttgtaaggatcaaataagttagtctttttttttttttttttttttagacacagcctcactgtatcaccaaggctagagagcagtggcgtgatcttggctccctgtagcctctacctcccaggttcaagtgattctcgtgccttagcctcctgagtagctgggattacaggcacatgccaccacgccgagctaatttctgtatttttagtagagacagggtttcaccatgtgggccaggctggtctcgaacttctgacctcaggtgatccgtccaccttggcctcccaaagtgctgagattacaggcatgagccactgtgcctggccagtttagtctttaacttgtttttaaaagggctcaatcgcataataagttctccatccatcttagtagttgctaatagcattaacagaaaacacatagattctgtgattagatgggcctgatttcttctcatattcgccctgtgtggctttggacaagtcatgtcacatcctgagtctcagtttccccatctgctaaactggggtcttgaaacctacctcagagagggctgttgcgagggtgagataggatgtgagtgaagcactagcactggtgcctgggggttcccttcctgatgggccggattggtctgtgtttgttgccttttagacaagaagttccatgaaggtgggcttcatgtctgtgtcagggctgtatcccctgcctctctgtacctggcacatagtagatgttcaataagtagtttttcactggatgaatgaatcaatagtaacaagggaccatgctttgctcacctttgtgtccaaaactagtgcaataccttgcatctaatttgaataaatatttgttgacagaataaatagattttttagaaatagctgtttgtttctgttcccagttccatttgaatttctgaattaaactgagaaagatactgtgaaggttaattttgtgtgtcaatttgactgggctacgggatgcttacatagctggtaaaacattacttctgggtgtgtctgtaagggaatttctggaagagattagtaattgaatcagtaaattgagtaaagaagatctgcccttaccagtatgggtgggcagcatccaatccactgatggctgaaacagaactaaaaggaagaggaatggcaaatccatgctctgtgcttgagctggaacatccatcttctcctgcccttggacatcagctctcctggttctcgggtcttcagactcagactgggatttacactatcggctcttgtggttctcaggcctcctggcttggactggaactacaccaccagctttttagacctccagattgcagatggcagattgtggaacttctcagccttccataatcacagaagtcaatccctcataataaatctctttttatatatctatatatagcctattggttctgttctggagaactctgattaatatagatacttataactcatcccaagtctctctaagccttggtattcttatctgtaaaatggggctattaataattatctaccacaaagattattctgaaaagtaaataagacaatatgtatttggcacatagaaaatgttagttcactgttcttccattccccgagcttcagtttctacatctgtgaaatgggcatctactcactcatttcttcattcatttactgagcaaacacagtgcccatgtggaaggcattgtggttaagacccggggcagttagagaagttagagagttagagaagtgaggaagccgtggtgaagaactgagcatctgctttgtgacaacacaccaatagtctttaaaagtcagtgggagaagagccacgggatgtatgaggtctctgggggctagaggtgtggggcaaggggacacccagggtttcagagagctttttagagagactggtatctccctagcaagtgatggtatcaacaacttggtgtgatcaccaacatcacatcactttgcaatggagttacctgctggggcctctggttttcatagcctgagtgtgaaaggcacgtcagtcctgctgcagccccactttccaccctggctcacagagcacaccagagtttggtcagagtgtcacatcacagtgagcatctagttcaaacagacatttccttctgagattcagctctgctcttctccctttctggatcctaccttcacaggggactgaacagtgattcccctacactctcaatgaggaacaacacagatgatgactctaatgaatgctgggtccctgcctggttctccaaagacaaggttgccctttcctgcagtgggacccagtgaggcgatgcttgggtgttggagacatgggtgaggccaggccaggtctctgggctcctgcacccaaatgggtcacatgcttatctctgatttgcacagctggctccacatcaacctgccaacgaaactcacaagagattgaaatatctgaattagaattttatatttaagctgcatatatttgtgggattgggaaggattagtcatctccagtgaccaaaatgtttgcacctgttacccactttcattttcagttgagagaaagttgcatgccagggatatttaaacatcgagggtgggtctgctgtcagtggtctggccagaggtagaaggatgactgagtcccagccgcccatccccagcaggcctcagggaagaagcaagatttacgaggcgagagcctgcctggccckcttcttctgtcgggaaaggcttccctgcagtattttctgtctcgtcaacactgcatttcattttaaattgcagctgaaagtagrtattttccctcttgcctattacaaacctcttaatttgtctctccctctgctgttatttgtctctataaagtgttttgcatgaaagacccacacagcacaatgttgcttcaccctgggttaggtttaacaggaagggaagatgcagagactaagtccaaggaggaagatgtgagggccttggggttgaggacacgcgtgtctgggagttgatgcctggctgtttttggaggttatctgttgcctgagtgtctgtgggtatgcgggtgcacatgtccatgtttgtactaatttacatatatgtctatgcatactgtggtataatcacttgggtgtccatacccaaattaagtgtatgtttgagtgcatgtacacacccacatgccagtctctgtgtgcatatagatctatgcccagacgcacacatgtgcatataaacacacgtaggcatcaaggtagacgtccgtcacattatgtgtgtggtcttctgtagacacgcccggggctctcttcctttcgctgcttctcaaggctgcggtcagcctccctccgtgctccacccaggagccctggccccgtttagggttgtgggaaaaggaaggcacgccagtggtctgcgagggggccagtggaaacatcacctccgccgacccggccgcggtcacagctctctggcttggctccagccaccagcagcacccctgcagcccggcgttagcgctgagaagcccggggcagccgccagggcgcgggctgccagctccctgacaaccccgggctggcactcgggggcgagagaggtcacccagcgacgggcacacccctccagagcaacaccgtctccggcccgcttccgggggccaccaacccgagcctcgcgggcgggctggggggtggtctctgtcgcttggggtccagcgaaggctgggcagtaaccaatggacgactgtggcccaacggggatccctcggatgcagccaatgccctcgttgcgctctccgcccccgccctcgcctgccccgcgccgctggaccattggcgcccgctggatggggggtgcgcgcgacgcctgcccttcggggagggcggggcttggagcgggctgcgctcccgcccgcgctcggcctctgccccgcccccggacgcgcggccctcagccggctgcggcgcggcggcggcgggagggggcgcggggcgcgcgcgtgggcgtggccggcgggcgtggccggcgggcggcaggaggcggggcggcgggcgctgtcgacagtgaaagcccgagcggcggcggcggcggggacggcggtggaggcggccgggtggctgtgcgcgcgtgtggggcgcaggctcggcggcagcggccggtctggagcggccgctgcgaggaagacagctgcagcgggggaggcgcggccagggctgcgcgctccgcggagccggcggggccgggaacaggtgatcccagtgggagccccgcgccctgccgagttcgaggggcgrgagcccgcgctcccgggcgcatctgcagccgcccagccgcggctccggacccaggcatccctgcgctgtctggggcccgggggaagccccctgcccccgcaggctcggaagtgcctgctcctgctccctggccactccggctcccagctcccggcgccctctccgcggcggagaaagttgtggacgtgtcccgatagtcgagcccgggcgctgtcgcgaccgggccgggtgtgcgcgcgctcggggcggcgctgacacgccagccccccatcgcctcggtcccctccggaaactgcttctgaagctgaaactttgggcgcctaccagcgcgggcgggagcctagggggcggagggcggcttggtgcgggcctgcgggcgcccctcggcgcggacagccgggacgccgcggacggcatgtgacggtcccggcggccgcagcgcgggaaggcgcgggccccggcgcggcggggagggctcggccggaggggaggctgcggcgcgcggccggtcgctgcgggcccgggccccaagccgtgccggtccgctcgcccgggccgcgtctcaggccgctgcccccccgcctcctctggggaggactcgctccaaactccctgaacttcggggacagtcccccgaagcggcgaaactctcagggttggcaaccctgcccagggacccccatcccgggcggcgctccggacgccctcccctcaccgcgcccccgcagacacgtgcctggactccgagggcttctggagccaccggccgggccacgatgctcatgaggaaagtgcccggcttcgtcccggcctccccgtgggggctgcggctgccgcagaagttcctcttcctcctcttcctctcgggcctggtcaccctgtgcttcggggccctcttcctgctgccccactcctctcgcctcaagcgcctcttcctggccscccggacccagcagcctggtctggaagtggtggctgaaatcgccggccatgccccggcccgcgagcaggagccgcctcccaacccggcccccgccgcgccggccccgggcgaggatgaccccagcagctgggccagtccccgccgcaggaaaggggggctgcggcgcacccgccccactggaccccgcgaggaggccacggcggcccggggcaatagcatcccggcctccaggcccggggacgagggcgtccctttccgctttgacttcaacgcattccggagccgtctccgccacccggtcctgggaacgagggccgatgagagtcaggagccccagagccaagtgcgagcccagcgggagaaaatcaaggaggtatggactcagcccccaaaytcctcccaccaactgccccctctaaggagagaagaccctctggcgctcccacccctttcccttgcctcagtcactcctggtcccaggtctacttctggccctgcagactgcactttgcaccttcccctttcctcccaaatgtcccaccttctttcctccctacacagtttcccaccactcgggtcagttaatcgtccccaccgtgacagatggcagctgaacccctagaccaactgccccctcactcccagactctggtatgtcgtatccaacccccaggcccagtgagctccactccttccctttgtggagttgctaatgagagtggagttcaggttccttagtgcaccctctttttgcatttgtggacacagagccactggtcccattctttttcactgtgtgaccttaagtccaaaacccctataggacctgcttacctaaaaacccaggatttaagggggtatttggtgtcctgcaaatattttgtaatctagtaagcaacctacaaaccagaggatgttgtgcattctgtttctattgagcttattgagcttcagaacaattgtacacaattgtacataattgcatatgatgcaggaagagatgataaagcagtggtcatattacagaagctccgaggttattggcataatgaagcagatcttgagctggttccctgtagggattgtaccaggagggatttagaaggatcactttaagtctgagtcttagtttaagaaatcaaaagcaaacacagcctcacaaggcttgaagacagttgccagcttgccactgccactaaatattctgctggaccactgttagaactgcctgcgtgcggatggtgcccagcaatgcagagggggctgcagtgacacccccaggccacgagggggccgtgggcaagctgtgggccagggtctcctccctagaaacgagaggatgctctcccctccccatggactcaaaggaaagaaagggctgcttctgcctggacttcttgatttgctgcgaagaagtcagcagttcgaccctgatttccaggaagagcaggcagcaaggatcaggacctgccctgtcaagacctgctcagagccgatggagggcttagccagattatccccttctccttgtctgaaccakcctcccttccagcgcccacctctcttccacttcttatcttttctgttactctgtttggagacttaactagcaatcacaggacattttgtgaagttacagtaggaagccacagggaaactgagtgcttggtgtgtatgtgtgtgtgcatgtttgtgtgctctcagtttccagattcctgttgaaatctcaggttgagtgacagctggaacttgcagtagctaagtaaggggcattcatttctccctttcttgttaaggaactacgctgttgaatactcacttggaccacccatagctctttctcaaagctgcttctgagcacagtggctctttttgcccctctcgacctcccagtagggcagtgacccccagtgaaattacatataaattgcatgcatgcagtttttcatggggcatccagaggtgccatcagattttcaaactgatcccccaaaggattaagaattaactatcatcttcctcagaagagatactctctgtgtttgcatttagatggtggtccatttccgaatgccaggggctggagagtcatggcaggaaggaagggctggctagtagggaacttgattctccctctctgtgtaagacaatttattttgccagcagagtctgggatgatgcttgctggagtggctggagggtgggaagaggggtgaggattctgtgctttgcaggtgggtataaaataacatgatgggagaaggtctaagttggtgaccagatgtctggatctttctagctggyatctccttgcacccctggtactagctggaggcatgctgcrtatacttggagttggtgttcagctagccctctcttactaatcttgaagaagagagggctggtttctgttgttttgaaacctattgtctcttcaggcttcctgccactgaccacgctctcacgacaacctgaaagatgtagagtgggttttggtttagttgttaacagttaccattcctgctgtcccaccccaggaagaacgcatatgatggttgctggagaatgtctttatttccttcacatttaaattctatctgcgtcatgcccaggggtagatcattttagaaaggtgcctgttttcacaaaagggactgttgctttcctccctggtttgtttatttccagacatggattgattaaatccaaggaacagagggggagctggcatcagataaaaaaaggccctgttcttataagattttaaagtgaaagtaaatatcaggagagagagaaggtgataaatgagcatgaatgaaaactggacacttggactctagatcaatactgtgcattcatgagcatcccgagagatggacatggtcaccaggtctgtgttgttaagatggttgaggctgcaggttctgggcatgcatatgtcaggaaacactctgtcactagaaccaactgtttttcctcactttccaattttggaaccttggcaaaagcaatgtggtggagagaggagacccacagaacatgggttggagtttcagcacactctcaactgtctgactttgggcaacccacctctccttcctggaccttcctgtaaaatggggtgagggagaggagaataagctggttatagaccctcttgcttctggccctggcccctaagtgaactggcagtctggtcagggactccatagcggttgggctttccgaactctgttttgagatatcttgtactggaaatcagggacaatggtgtggtggtagtggtggtgttgatggggtcgtgatgttcactgctgtatctctgtctagcacctatccaagaatagatattcaggcagttggttaagttaattattcccattaccctcagcttggaatcacgaagagtaaaggtgttggctggaatgtaaaggggtgaaggcttggtagtagccttgcctttcagatctgaggataatataggaaatgggggatgtcattcataggcgggtttcttatggattcaagttcaaacagacttgtctcacacatgggaatgtacagcttttcagggttatatctcagtggaagaattcagactgctctgggtcctacccatgatgcttggttgtgtttttgttgttgttgttttttttgtttgtgtttgttttttttttaagacggagtcttgctctgtcgtcgaggctgcagtgcagtggcgtggtcttggctcactgcagcctccgcctcccaggttccaggttcaagcgattctcatgactcagcctcccaagtaactgggattccaggcgccccaccacacctggctaatttttgtatttttagtagagacggggttttgctgtgttggccaggctggtctcgatctcctgacctcaggtgatccacctgcctcagcctcccaaagtgctgagattacaggcacgagccaccgcgcctggccagtgcttggttgttgttctggggaacctcagttccttccagtgaagggggctttttataaaagggaattaggctggctggggcactgagaacgcggtactggagttgggacttgcccttgcccatatggtgttttcaaacaaaccacagaaagggctccttcctctggttaggtgcagcaccagcatcactccagagtgcagggctgggtgaggagaatgtggattgaatttccccaccttccctgtgctgttggcccagtgttcttacaaaccactgtatgctgcagttctgttaagaatccaagctgggtcaagtcctagctgttccatcaactctgattggaaattcctgtttattactgggcctcagtcttcatggtaaaccaagaggctggcatttaggggacccttctctcttctcttccacctctttactgtttgtttatggatctgcccaagcacctagaatagggtctgacatttagttggaactcacctactttaatgaatggctacattaaagatccataaactaacagttaagattgctagtggctaaggctgggtcttctcccttagggtacctggaattcaaaggaccctcacagtaagagctgtagtcaggtttaggggcttagcggctcagtgacccaagaggccttttagaagttgcagcaattttctgagggtaaatctgacttgagggagtggaggtgacactcgtgagtaaaatctctcatgcctagagagcaggcatcggagggtgcctgtgacttggcagggagggagcaccccagctcttgccctctgtgcctgctgtgttcaaccaccagggtattgctggttatgatatgtgacagtgtctgaataagtcatcttggcaaatgatctttgctccccattaacgggctggttcgttagtcatgtgtgatttttttctgttttctctgtatatctgatttatcgtcactagtgccagggacaggtaggaaaattaaaaggctttgtagcatgtgaatctgagcctgtgagatgttcaggatwattaatattaggaacagctcagatttaaatagctttccttccaagagctctgtttgagttgtaaatccattcaagatcctttcccttctccctggcccttcagtctcttccgtttccctcttgtcctgctctaccrtgcatttaacataggtggagactggcctgtaataactggacaggccccttggaaaacccttacatcctyagcccagccayacgcctcctccttccgtaggaccaagtgtgcagttgagtaaagcttagcacttgtccctaccaggtatacaacttaactcccacacgttggttgkgtctctgctttcatttctagttgtaccatttgagggaattaggcattccaggagcaattgcttctyaggccccrtattcttaactctgtctttagtgtcagggctagaaacaaatagaaggatgatttttaaaagtctgctgcctatttcacagtatagttagtggtggtgggggggggtaagaatatagattcccctgtggttttcacagtgactgatttacatccgagttcaagaaatgctttttctctagctttcccagaagacagatccattactccaccaaaaataaatattgtgatatatatcaggcatactttgctcaaagggacttacatcttttctcttattgaaaaaaataaatcagtcttgcagattgtaaagcccctgtgtagggaagctgcttggtaatccaggtgagcacccagccttgtggatactgacgctggcttggagaagaaacctctttttgcatcctaagttgaatctgtgttagaggaagtgttgggagctttaggctctccctgcgttgctttcagtggcaaaattgggaaggatttcccaagggaatgatggacrtaggctagttgcctcaggcgagctcatggatttatgattacatttcttgaaaataggggccatgcatggagcagggacaagtgtcatgagtcaaggattgttgtctttccggttctgtgcacctgcagtccaaaaagaccaggatcattcaaacaataagccctggttcttgattctctgctattcctgggccaagcaaggcctttatgcataaacatttgcataatttggggaaaagaaacaacaaatgttcttagctctgtattgccatgcagatgatggtaagaagccaaaygggagactcctcaaagaattccarggactcaaggaacttaggcccctccgtcttcctcctcactcccccttcactctgggggctggtcagtagctcagacagcagggttttggatgtcctaaatgtagagttgatgcaactgagattgctgttaagtcagacctgctttggtgtctccaccctcaaagagaatagaagscacagagaccacagcctcagtgtggggactcagttgcgggtgtttcctcccctagaaggctgttgcctaagatttgattgagagctccccacacttggcaggcaggtggtcaaaacagttcttactcacaagggggtctgaatttcttaacttggaatcttctttaattaaaggctacaaccagggcaattgtccatctgttttagtggtaacttttacagaagaaactttgctatattgattagtgcccgccttgatagatgatcaataattgtgcttttatctggcatcttcttgggagtcagctgctgccaaggygaaccttctgggcaaacaattgtcactaaatagcaaccattttcaatggccaaataaaaggaagtttttctctcctccttccacctctgccatcttcttaagcatcatgctaaacacaaatcattcttgctggcctcgtggtcgccataaaatccactgtgcaatgcagcgatgtcctgttggggctgatgggttgtatcactaagactgtttgcttcccaatgtttgttctttgtgatctcatcttattttttatacaacaaccttgtgttgtagctactatttaagtataatttattaatacatatagcgaaatgcacagatttttttttttttttttttttttttgagatggagtcttgctctgtcttccaggctggagtgccgtggcacaatctctgcacacagcaacctctgcctcctgggttcaagcaattctcctgcctcagcctcccgagtagctgggattacaggcacctgccaccatgcccagctaattttgtatttttagtagagatggggttttgccatgttggccagactggtcatgaactcctaacctcaggtgatccatccgcctcagcctcccaaagtgctgggattacaggtgtgagccgcacccagccaaatgcacagatcttaaatatacagtttgctgtattttcagaaatgcagaaaaccgtgtagaccacagttgtatcatatacagaacatttccatcatctcagaaagttcctttgctccttgccagacgattcccccatcatcaacctctcacctagcccctatcacagtcttgatttctattagctgagattagttttgcctgttctagaacttcagaaaaatggagtagtaagccaggtacaatggctcatgcttgtaattctagcactttgggaggctgaggtgggaggatcacatgaagatagaagttcaagaccagcttgggcaacatagcaagaccctgtcgctctctctttctctatatataaaataatcaggcgtggtagtgtacacctgtgttcccagctactcaggaggctgaggtgggtggattcattgagcccaggagtctgaagctgtagtgagttttgatcaggccactgcactccagactgggtgacagagggagaccctgtctcaaagaaaaaaaaagtacaaaataagtggaatagtacagtccatgccctgtggacaaggcttccttcattgaagacagtttttgaaattgatccatattgtgcgtatcagtacttcattcctttttattgttgagatgtattccattgtatgattataccccaatttgtttattcgttcacctgttggccttttgagttgttctggctattgtgaataaagctgctataaacattttatgtacaagtctgtgtgtgggcatatgttttcatttcttctgtataactaggggtggaattactggcccatagagcagatgtgtgattgactttataagaaactggaagcgctttccccaagtagttagaccattttatactccaccagcaatatgtgagagttccgcatccttgccaacacttgttattgtcagcctttttaggtttatagtgatattttgttgtggctttaatttttgtttccttgttaactgttgatattgaatgtccttttcatgtgtttatttgctatttctttctttctttcttttttttttttgagatggagtcttgctctgttgcccaggctggagtgcagtggcacgatctcagctcactgcaagctctgcctcctgggttcacgccattctcctgcctcagccttctgagtagctgggactacaggtgtccgccaccacgcctggctcattttttgtatttttagtagagatggggtttcactgtgttagccaggctggtttcaatctcctgacctcatgatccgcctgcctcggcctcccaaagtgctgggattacaggtgtgagccactgcgcccggccgtttatttgctgtttctgtatctctcttataaatgtctgtttaaaacttttgttcttttttaatgtcaaaaactggtctatttactgtcttattgaattgcaagaatgcttcatatattctagatacaagttctttaacagatatatgtattataaatgtttgttcccagtctatggtttgtcttttcattttcttaatggtgtcactcaaagagcagaagttttaatttttataaaggccagtgtatcagtattttccttttgatgagtgctttctgtatctagtttaaaaaaaactttgcctaccccaggttatgaatattttttaattccagaagcttgatcatttcagtatttacatttaggtctttcattgacttcaagttawtttttgtatataatgtaaggtaggagttaaagttcactatttgctatttagatgtccagttgtttatcactatttgttgaaaaaaactttcctttccctgctgaattgctttgatgccttcgctgaactaattgactatatacaatatggttttgtttctggatttttccactctagtgatttatcttttatgtcattccattcttttctcttctcttctcttctcttctcttgtcttctcttcttctcttctcttctctttttctcgctttgtcgcccaggctggagtgcggtggtgtgatctcagctcactccacctcccagattcaagcgatcttcctgcctcagcctcccaagtagctgagactacaggcatgagccaccacgcccaactaatttttgtatttttagtagagacggggttttgccatgttagctaggctggtctcaaactcctgacctccagtgatttgcccgcctcagcctcccaaagtgctgggattacaggcgtgagccactgtgcccagccaatccatgctttcttgatgctatagcctcatagtaagtcagtcttgaaaacaggtagtgtgattcctccatctttgatcttctttttcaaaattgctttggccattgtagttcctttgcatgtctgtatacatttgagaacaaatttgtcactttccatgaaaaatcttgctgggaggccaggcatggtggcccacacctacaatcccagcattttgggaggccaagatgggtgaatcgattgagcccaggagttccagaccagcctgggcaacatggcaaaacccaatctctaaaaaaaaaaaaaaaaaatacaaaaattatccaggcatgatgatggtgcacacctatggttcctgctactggaaaagctgagaggtgggaggatcacttgagccaggaggttgagtctgcagtgagccatgattgcaacactgtactccagcctgggtgacagagtgaggcactgtctaaaaaactgagattttgactgagtttgacttgaatccatagatcaaattgttatcttaacagtattgggtctttcattctatgaatgtggtatctgtctctatttatttagattttctttaatttctctcaacagtgttttgaatagtgtttatgttcaagagagctttaatgtattttattaactatctctattttactttttaaatattgtaaatgatattctttatttttatttttaaatatttttaaaatttcatttatttttatttttatttttgagaaggagtttcgctcttgttgcccaggctggagttcaatggcgtgatctcagctcactgcaaactccgcctcccgggttcaagcaattctcctgcctcagtctcccgagtagctgagattacaggtgcatgtcaccatgcctggctaatttttgtatttttaatagagacgggatttcaccatgttggtcaggctgctctcgaactcctgacctcaggtgatccatctgcccctgcctcccaaagtgctgggattataggtgtgagccaccacacccagccattttaaaaattttaatagcttttggagtgcaagtggtctttggttacatggatgaattatatagtggtgaattctgagattttagtgcccccttaatccaagtagtatagattgtactcagtatataggatttttttaatccctcccccttctgagtctccaaagtccgttatatcactttatatgcctttgtatagtcataacttagctcccatttataagtgagaacatataatatttggttttccattcctgagttacttcacttagaataatggcctcctgctacatccaagttgctgcaaaagatgttatttcattccttttcacagctccgtagtattccatggcatatatataccacattttctttatccactcgttggccaatggacacttaggttggtcccatatctttgcaattgtgaattgtgctgcagtaaacatgcgtgtacatgtgtctttttcatgtaatggcttctttttctttgagtagatacccagtagtgggactgcaggatcgaatggtagatctacttatagttcttaaaggaatctccatactgttttccatagaggctgtactaatttacattcctaccagcagtgtatgagtgttcccttttcaccacatcaatgccaatgtctattgttttttgactttttagtaatgtcattcttgcaggagtaaggttgtggttttaatttgcattgtggttttaatttgcatttccctgatgattagtgatgtagagcatttttcatatgtttcttggccatttgtgtatcttttttgagaaatgtctattcatgtcatttgcctacttaattaattaatttattttgagacagggtctccctccgtcactcaggctggagtgcagtggtgcgatcttggctcactgcagcctccgcctcccaggttcaagtgattctcctacctcgggatcacaggcatgtgtcaccatgcctggctgatttcttgtatttttagtagagacagggtttcaccatattggtcaggctggtctcgaactccctacctcaggtgatctgcccacctcggcctcccaaagtgctgggattacaggtgtgagccactgcacccagccatttgcccactttttaattgattttttttttttctgatttgagtttcttgtggtttttagacactagttctttgttggatatatagtatgcaaatattttctcccattatgtgcattgtctttttactctgatgattattacttttgctgtgcagaaactttttagtttaacgagatcccatttattgatctatttttgtttttattgcattcgcttttggggtcttagtcatgaagtctttgcctaggccaatgtccagaagagtttttctgatgttatctttagaattcttatggtttcaggtcttagatttaagtcgttgactcatcctgagttttttttgtataagatgagagatagggatccagtttcattcctctatgtgtggctagccagttttcccagcaccatttattaaatagggtgccctttaccctatttaaaaaataaayatttttatatgcttcatcaaagatccgttggttgtaaatatttggctttatctatgggttctctattcttttccatgggtctatgtgcctacttttatatcagtaccattctgttttggtaactatagccttgtggtacaatttgaagtctggtaatgtgatacctctagatttgttgtttttgcttaggtttgctttggccattcaggctctttttaaaaatttcatattaattttaggattattttttctaattctgtgaacaatgatgttgttattttgtttgggattgcattgaatctgtagattgctttgggcagtatggtcattttcacaatactgattcttctaatccatgagcatgggatgtgtttccatttgtttgtgttatctgtgatttcttccagcagtgtcttgttgttctccttgtagagaaatttcacctccttagttaagtatattcctaagttttttattttattttatttttgcagctgttgtaaaagggattgagttattgacttgattcttagcttggttgttgttgktgtatagcagtgctactgatttgtatatactgattttgtaacctgagactttaatgaatttatttatcaaatctaagagtcttttggaggaatctttaggattttctaggtatacagtcatatcatctgtgaacagtgatagtctgacttcctctttcccaatttggatgtcctttattcctttctcttgccagattgctctggctaggacttccagtactatgtttttgtttgtttgtttgtttgtttktttttgtttttgagacagagtctcgctctgtcgcccaggctggagtccagtggcacgatcttggctcactgaaacccccgcctcccgcatttaagtgattcttgtgcctcagcctcctgagcagctgggattacaggcatgtaccaccacgcctggttaattttttttgtatttttagaagagacggggttttgccatgttgcccaggctggtctcaaactcctgagcttaggcagtccacccgcctcagcctcccaaagtgctaggattacaggcrtgagccaccgcacccagcccagtgctatgtttaatagaagtagtgaaagtcggcatccttgtcttgttccagttcttagaagggaatgccttaaacttttccccattcggtatgatgttggttatgggtttgtcatatatggcttttattattttgagataagtcctttctatgcctggtttgttgagagttttttttatcataaaaggatgctggatcttattgaatgctttttctgcaactattgagatgatcgtatggtttttgtttttaattctgtttatgtgatatatgacatttattgacttgtatatgttagaccatccctgcatccctgctatgaaacccacttgatcatggtgtattacatttttgatgtgctgttggattttgttagcttgtattttgctgaggatttttgcatctgtattcatcagggacattggtctgtagttttccttatttttgttatgtcctttcctggttttgttatgaaagtgatactggcttcgtagaatgatttagggaggatttcctctttcttaatcttttggaatagtttcagtagctggagtgtagtggcgcgatctcagctcactgcaacctctgcctgcttaggttcaagtgattctcctgcctcagctgcctgagtagctgggactacaggtgcatgccactacgcacggctaatttttgtattttttgtaggatggggtttcaccatgttggctaggctggtcttgaatcctgaactcctgacctcaagcgatccgcccactttggcctcccaaagtgttgggattacagatgcgggctgccgtgtccagccccaattcttctttgaatgtctgatagaattcagctgtgaatccatcatgccctgggcttttttgtatgtgtgtggcaattttaaatttactgattgaatcttgctgcttgttattggtctgttaagggtttctgtttcttcctgatttaatctaggagggttgtatgtttccaggaatttagcagttttcttagatttttctagtttatgtgcgtagagatgtttgtagtagtcacgaataatcttttgtatttctgtggtgttggttgtaatacttccagtttcatttctaattgagcttagttgaatcttctttttttcttggttaatctagctaatggtctatcaattttgtttatcttttcaaagaaccagctttttatttcatcttttgtatttttttatgtttcaatttcatttacttcttctctgatctttgttatttcttttcctctgctagctttgggtttggtttgttattgtttctgtagttccttgaggtgtaacattaggttgtcaatttgtgatccttcagactttttgatgtaggcttttagtgctataaactttcctgttagcacagtatcccagagttttgataacttgtgtcactgttattcatttcaaaaaatgtttgaatttccatcttgattttattgttaacccaaaatcactcaggagcagattgtttaattttcatgtatttgtaccattttgagggttccttttggagttgatttctagctttattccactgcggtctgagaagatacttgatacaattttgattttttttttttttttttttgagacggagtcttgctctgtcaccagtctggagtgcagtggcacaatcttggctcactgcaacctctgcttcccaggttcaagtgattctcctgcctcagcctcccgagtacctgggactacaggtgcgtgccaccacacccaactaatttttgtatttttagtagagacggggtttcaccatgttggccaggatggtcttgatctctgacctcatgatccaccatcgttggtctcccaaagtgctggaattacaggcatgagccactgtgcctggccacaatttcgatattttaaaaatgtattgagacttgttttgtgtcctatcatatggtctatcttggagaatgttctatgtgctgatgagaagaatgtgtattctgcagttcttgggtagaatgttctgtaaatatctgttaagtccattttttctagagtgtagtttaagtccattatttctttgttgatgttttgtctcaatgatctgtctagcactgtcagtagagtattaaagtccctcactcatttcttagatctagtagtaattgttttatgaatctgggagtagtgttaggtacatataaatttaggattgtaatatgttcttgttggattgatccttttatcattatgtaatgaccttgtttgtcttttttttttttttactgttgttgctgtacagtctgtcttatcagatataagaatagttattcttgtttgcttttgtttccatttgtgtggaatatctttttccacccctttactttgagtttatatgaatccttatacgttaggtgagtctcttaaagacagcagatatttggttcktattctgccattctgccaatctgtatcttttaagtggagcatttaggccatttatgttcaacattaatactgagatgtgaggtgctgttccatttatcatgttaattgttacctagatgcttggtttttttctattgtgttattgttttataggctctgttttatgctttcaagaggttctgttttggtgcatatcaagctttggtttcaatatttagaactccttttagcatttcttgtagggctggtctggtagtgacaagttccttcaccatgtaaatgatattctttaaatatttgttttccaattgtttgttgccagtacatagaaatataatagggttttttctgtatattgattttgtatcatatgaccttattgaaccaatttattatgtatatatattttttggtagctttcttaggatctgttatgtatacaatcatgttgtctatgtcaagacagtcttacttcttcctttacagtttatatgcttcttatttccttttcttgcttcattgcgctgactgggacttccagttcaatgttaaaaagaagtagtgagaactgacatctttgccttgttcttgatctcgagggaaaagcagccagtctttcatcattaagtatgatgttagatgtaggtttttggtagatgccttttatcaagttgaagttcacttttattcctagtttgctgaggtttttatctgtattgggattaaattttgtcacatgctttttctgcatctatggagattatattgttttcctctttaattcagtcaatacagtgaattatatttttaaaagaatgctaggctggacacatggtggctcacacctgtaatcctagcactttgagaggctgaggtgggaggattgcctgagctcagcagttcgagaccagcctgggcaacatggtaaaaccccatctctgctaaaatacaaaaaatcagccgggcttcttggcacacgcctgtagtcccagctattcaggaggctggggcacgagaattgcttgaactagggaggcggaggttgcagtaagtcgagattgtgccactgcactccagcctgggcaacagagcgagactctgtctcaaaaaaaaataataataaaataaaataaaagaatgctaaatcaaacttgcatttgatcttctaatatttttgttaaggatttttgcatctatgtttatgagggatattggtctatagtttttttttttgtaaatcctttgtctggtttttggtgtcaacattatgttgacatcataaaataaactgtatgttgacttgtattcaatgtccctttgttttctttctttcctgatacagtgtctcactgtgttgcctaggctggcctcgaactcctggggtcaagtgatctcctgtctcagcctccagagtaacgaggactacagatgtgtgctaccatataccatgctcagcttctctgttttctgaaagagtctgtgggacactaatgttttctctttattaaatatttcatagacttcatcagtagagcattatataaagccaagaagtttttttggggggggttaattattaattatataacagatatagggtagtcagaattttttgcggcatttttctcaatatgtatttcaagaaatttgtctatttcatctaagttgtaaaatttattggtctaaaattgttcctaagattctcattcttttttctttctttctttttttttttttttttatgtgtgtgtgtgagacagagtctcactctgtcttcaaggctggagtgcaatggtgcgatctcagctcactgcaatctctgcctcccgagttcaagtgattctcctgcctcagcctcccaagtagctgggattacaggcatgtgccaccacgcctggctaattttgtattttttgtagagacagggtttcaccatgttggtcaggctggtctcaaactcctgacctcatgtgatccacccacctcggcctcccaaagtgccaggatgataggtatgagccactataccccacctcattttctttttaatgtttgtgagatctstggtggtattccttctttaattcctgttatggcaattgctttttctgtttcctcttaaaaataatttagctcggctactgggggaacccacccccaatatttcaatgtaggttctttcyattttccgtaagtgtcagctggctgagaaataaaagagtaccaagagaggaattttacagccgggcctccggggtgacatcacatatcggtaggaccgtgatgcccacctgagccacaagaccagcaagttgttattaaggattctaaaagggtagggggtgtacgaacagggagtaggtcacaaagatcacatgcttcaaagggcaaaagggagaacaaagatcacatgcttctgaggaaacaggacaagggcaaaatcagaactactgataagggtttatgttcagctgtgcacgtattgtcttgataaacatcttaaacaacagaaaacagggttcaaaagcagagaaccggtctgaccacaaatttaccagggcagagttttttccccaccctaataagcctgaaggtactgcaggagaccaggccgtgtttcagtccttatctcagccacataagatagacactcccagagcggccgtttatagacctccccccaggaatacattccttccccagggtattaattattaatattccttgctaggaaaagaatttagcgatatcttccctacttgcacgtctgtttataggctctctgcaagaagaaaaatatggctctattttgcccaaccctgcaggcagtcagaccttatggttgtcttcccttgttccctgaaaattgctgttactctgttctttttcaaggtacactgatttcatattgttcaaacacacatgtgttacaatcaatttgtacagttaagacaattatcacagtggtcctgaggtgacgtacatcctcagcctatgaagataacgggattaagagattaaagtaagacaggcataagaaattataaaagtattatttgggaactgataaatgtccatgaaatcttcacaatttatgttcctctgctgtggctccagctggtccctccgttcaggatccctgacttcccacaacactcggccaggcatggtggctcatgcctgtaatcccagtactttgggaggccgaggcaggtggatcacttggggtcaggactttgagaccagcctggccagcatagtgaaaccccatctctactaaaaatacaaaaatttgccgggcatggtggcatgtgcctgtaatcccagctacttggccggctgaggcaggagaatcacctgaaccagggagatgaaggttgcagtgagctgagatcgygccactgcactccagcctgggcaacagagcaaactctgtctcaaaaaaaaaaattaaattaaaaaataatttaggtcatactttatcagttttgttaatcttttctaagaatcaacttttagtcttcttaaaaatatccatttaaaaattttattaattttcagtctttatttccttccttctgcctatgttgagcttaattcactttgttttttctaacttaagatagggactctttgatttgggatttaattttccagatatcttttaattattgatttctaatttaagtcccttatgttcaaagaacatactctaatttgaagcctttgaaacatgagacctgttttatggccagctatatggtctatattggcaaatgttccatgtacattgaattaagaaatgtgtattgtatggttgttgggtggaatgttcaataactgtcacttaggtcagataggttgatagtgttcaaaactatgtattttttttttttggtctacttttaaaatcttttatggagaaaaaaatattgctttccaactctaattatggatttgttccatgattccctttcattctgtcaggttttgcttcrtattttttatatttatgttattagatatgtacacatttaggattattcttaaagaattggccctttttaacattatacatgtatttcttcatttctgataattctctttgtttgcagtatattttacctgattgatatagcctcttcagctttcatatgattagtgtttgtatggtagaactttttccatccttttatttttttaacccatttgtatctttgtatttaaaatgtacctcttataaagaacacataattgggtctggctttttgaatctagtctgacagtctgcttttgaattagtgtttattccatttatatttaatgtattatttatataactggatctaaatctgttgtatagcattttttattagtctcatatcctttgtttcgtttttccttttcatgccttcttttgaattaatcaagtatttcagattctatttttatgtcatccgttatacgcatacrcacacagagaaacatactttaagttattgttttgatgattagaattttcatccttatcacaatctacmctgaaataatacatcatttcatgtataatgtaagccctttcaacaatatacttccatttatcttctcccagtcttcattctgttgctgtcatgtgttttactgctatgtatgttataaacctcacaatacattggtattatttttgctttaaacagtcagttgtcttaaataaattaataasttagattccttttatttacccatatactgaccatttccaatattcttcatttcttcttatatgtctgatatccatctggtattgtttcccttcagcatgaaaaatccttcttaacattttttttgtagtgtagatctgctggtgacaaatccttgcagcttttgttttatcagaaagcatctctattttgcctttatttcaaaagggtatttttgctggatatacaatattaggttgactctttctttacrccaaagatgtcattccattgtcttgtagcctgaattctttctgatgagaagttacaggatattcccctgcatgtgctggtttctccttccctttggatgctataagattttcagtttatctttgttttcagcaatttgactattgtagttaggtgtgattgtcgttgttgatctttcttggggtttcttgagcttattttgtctgtggattgatattttttcrtcagtttggaaaaagtttggcccatatttcttctcagcccatctccttttcttttataactccagttacatataagttagattgcttgatatcatcctagaggtcactgaggctctgctcattttttttctttggtcttcctttctctctgtacttctgtgaggataatttatagtaacctatctttaagttcactgaacgcttctgtaatgtacaatatgttgtaagctcacccaatgacttttttatttcaggcagtttttacttttagaatttccatttggactttctaatggtttttgtttctctgagatttcccatctgttcactgattgtttccatattttccttaaatcctaaagcatatttataatagctttttaaaaaagtttttgtttgctatttccaacatctttgtcatcatttggcctgtttatattgactgacttatctgctgagtatgggtcacagcttcctacatcttaacgtgtttagacactttttattctatgctacacattgtggatgctacttttttgagattctaggttcatctgctttgaaacagtttttctcccctctttttgttgggctgtcagctgttacttcttgtagctgtcagaatacttgcctctggctactatattctccacccttcctttgttattttctaacctgcggttggctaggaaactatttaatctagcttgttggccttatatgtaaagtacaaataaacagacattgagtagatctctaaagactcctgaatcaaatgcatgaacttcagtgtacaggtttttgcataatttagatatttaaagattcttacttatttttttgtaattggcattggatgagtgaaatataattttgtgttgaaactatgacctgaagagagacaacagttctccaaagggctcctaatttctggctgatgtcatctcaagttatttgtgtattttttgctcatctgcttttagctgttagaagaaaatgtttgttgatatttgtcgtgttctagtagcctctatcagtttgaatttcagtatattataacctgtcaaatattttctctgggctttttaccttaagcctaatgactgctttttaaaacttagtttgtaaattctcacattaaarcagtttttaaaaagagaatcgttcacataagccaaattgctgaattactaatcagagggatgctaagtagctgaaggagtttccaaggcaccatctgtgaggtctgatctcttgtctctcctcattcagaaaatttcaatgtgaagtaaatatcatattttattgcaaaggctgcctttaatttcatttgtctgatttgggatgggtgaaggtgttgaataaaagttttaagtctcttacttaagatccctctcccccatcctcattcttggaatgaacttttgagaggttaaacctatactttgccaagtaaatgctgatttcctgggaagacatttcagcaccttttctgtttttctgcacttccttgacctaaattagcaaatcttcctcctttccaagtctcccagaagccattctccatgtctgtcacataccttacagagctctggagtagtcttgttttttaattataagaatcaataagaaaaagaagactttagtttcttcctttcagaactggaccttagagaacagcctataaaatagaatcaattttgctacttcagattataaggaaaccctttgtagagaaaggttcatgttttggcagaataatagctcagtctagagacttctctagcagtttcagatactggcatttttgtgtgtataattaagtgaggggtagagaccccacactaatgtacactcagaggcggtattgtgtaataacttccctataatcatgctaggatatctatgcctgattgttgatccttgagtaactaaaaatggtgccagaaaggtatcaatccagatcgagccaagggagaccaacattagacatttctgtgattaggcactggagtagattatagcatgataaggttctctgtgctctgagtgaagtgctgttcaacttggcgctaataggagcgggattcaggtttgtgagctctggaaytcgaagtcgacttgcctgttagagaagggggttttggattctgtatagccygtagtcttttaaatgtaagaatccycagggagtctgctttgaagggtagtcggggctaggctggaacaatgcttcctggacagatcaggtcaaaaattcccagtgcgcggggtattcttagagcccacacatcctcttaagagtttagctgatccagccaacagccttgcggcatacagagcatgggctgtcatcctgttttatggctgagrggctgaagaccctgaaaagggatgtgaccaaccccaggtcccaccagtttaaattgtgatgcctagacttaaacctcccctccccactccaagggtgatgttctttctgtgacatcatttgaaggctagtgggtgataacttagaggaagagttttcactttggaatggaagagcgtagaaactgtcatagcctggataggcatgtaaaagaaccggtcttgtgaatctttagaccagggtatctaccctttattgcagtccggaattatctggggcattttagtaaatactgatgcctgagttcctccaattaaatcacagatgcaaatttaattggtcttgggtgtagcctgagcacagggattgaaaaatctttagaatgaacctatggcaattttgtcttagcctcgacttatctcttttctggctgtagttccctttgacccacttatggaagaggttggaaattttctgtatttattaagacctgcaccgaaattgagtgagaaaaaagctggagacaagagtcaaaactgagttttccagagttaagagcagacactgtttrcatgatacggataagccatgaatttattaaaactttaagagaaatattgaaaacacctaccatctattgagtctcagttgcaagagctgaaggaaagacaaagacgagtctctggctttaaggaattttattgtgtaatcttggcatgtactggaatcacttctaaccacatacagatgcatggatgtagggaaatattacttggctgcatcaatatttgcctgtcccacctaaatcttttttgaggaagtagccaggacataaacagctgaaatgaaaatatttgcttgtcccgaagtcgatttccccacaggccatcgccctccctcctgtggctgcctctgctrttctcattagctaagcagccttgcccttacagagatcctgagggccttacagagatcctgagggcaacaaagccggtggtcatctgtaaaatccagtaactgattgatgctcaggaaataggagatactgaagaagtgaaagagcctaacccagtcccaggtggttccgactctgcagccgtgctctgctgtttcatctcagccatgccaggtgctagacgtgacttcacctgagaattgctgacctgggttgatcagatcaaatctatccaggccacctctggcagagcagcagaaagtgagaatatgctgtagattagtgtgagaatcctccccagggcttaatgatggtcccttggagagctctgtttctatgcaagaaacctgtgaattctcaacctttgccaacttgcaatcgttcttcaatctgccccaactatttctagcaaattctttggctaatacagcatagaaaacacatcctatttgtcccagacttatttcattccagcttcaaggggtggacatttagcctaagagcattcatagagagtcagacttcagagaatatatttccctctgttaaatcgtatatgaaaccaagcttgctccgaggccgctggctgcaggaagcagtgacgaggatggagcttggcagatggttgtagctgtggtttcctggaggcctgtgtggggagatgattgtttgtatattggttttcatttatgtattggtcttattttcatcttcctgaggtacccagatgctatggtgatagattgattggaaatgactcatttgtcagggttctgtgggggacgtaggttcccttctcatgcgcagcagagtctaagatgtttaattagacgctgagacatttctgcatgggtccatttctgcccattctcccaggtggacgccatttcttagattgcagagggacggggttggggagggaccttctagttctccatcctctccctctatcctcttattttgtctggctgcagtccttagtcctacctcccttttaattaattaattaattaattwatttatttatttacttacctttgaaacagagtttcattcttgtcacccaggctggagttcaatagcacgatctctgctcactgcaacctctgcctcctggttttaagygattctccagcctcagcctcctgagtagctgggactacaggcacccgccaccacgcctggctaatttttttttttttttttttttgtatttttagtagagatgggatttcactgtgttggccaggctggtcacgaactcctgatctcagataatccacctgtctcggcctccccaagtgttgggattacaggcctgacccaccacgcctggccttttatatatatatatttattattattattattattattattatttgcctcagcttcccgagtagctgggattacagacacccgccaccccacccagctaatttttttgtatttttagtagatacggggtttctccatgttggccaggctggtctcgaactcctgagctcaagtgatccacccgcctctgcctctcagagtgctgggattacaggcataagccaccgtgcccagccctacctccttttatctgctgttttctaccccctaacattattgtcctaaaaattgccttcatgtggctgctagaatttgcagaactgattcatgttggaaatctagttgtcaaacaggtccaaaccagacttcatgaaataatgtagttgaactgatacgcagtgagaggaatattaagtgctgcttaactgttttgttccacttcagctttttcagggccttactttgttcttactgtgtgccaggcaatgcctgacatgctgaggatggaaaggtcttacgggtgcaccatggtaacaccatggagatgctagataaaggtgtgagcaaagggctgcggagtcacctgaagatgacgtgagccatgggcgtgggggaaagaatggcatttcaggagaatgtgggcaatcctgggggtagtgggtttgcaaactagcagaaagctccgtgtactgagtcgtgggaggtgttgtgcatgtggatataggtgcagcttggaaaggtcaaggcttctacctgggacacaaggtgacataaagaagtgggagactgtgagacatcttggaagggggagaggagtttaatgctaggcgtgataaaaatgagatgcttgtgaaatctaggtggacacatctaatgggttgttggaaatatgggcttaggactgattggggtaatggtaccagagacatatatatatatatatatatwtttttttttttttttttttttttttgagacaaggtctcaccctgtcacccaggctggagtacagtggtgcgatctgggctcactgtagcgtccgtctcccgggttcaagcaattctccagcctcagcctctctggtactacaggagcgtgccaccaacacccagctaattgttttgcgtttttgtggagatggggttttgccatgtgacccagcctggttttgaactcttgggctcaaagcgatcctcctgcctcagcctcccaaagtgctgggattacaggcatgcgccaccacgcccggccgagagatgtagatttagaggtcctagtttagcgagtcagggcttgaaggcttgagcacagagccatttgaggaaaacctggatggaaagggagagggctcagagcctttgggaacaccagtgttttaaagaacaaccagaggttgggggagaaggttgagtcaggtagcagaaagaccaagtgccacatccagcctgcttttccctttactagctgattctgccaaacctgactgcctgctgaccctggtgagcatgcctcagccactggggggctttcctgcagtttccccttgtcctctcccctcgcctggtgtgctgagggcgtcttcactggctgcaggctcctgggctttgttcccttgctggcatcaaggattggaaagcctctttctcccccatcttctgacgttggtcaaggctcaccattccacctctgccaaggagctccaggcgctctgagctgtctgctttctggcttcccactgagagtgcaagagctcacctgaggactgtcctgtgcctcttctcttgggctgtgctgcaggaacccaggcttgtagctcattccttatcccagcagaatgcccagagtggttcctccatcgcctttctggaaacaggatgcatctctggcctggccacacactgaagattcacaggctagctccttcatcaggaaagaagttcatcttcattgctctcgaggaaaggaagaaattgcagagtggtgaagatgtattttgtctttactcagtgaccacaagcacacaggggccaaatagataacaccatgttcctctcagtttctgcctggaatcctcgacttgaacggtagcattcacttgaaaccaagccccgaccattgaagggagagtcatttggcaaagttcctgctgaaactgccatccacttatgtctaagtggcattctggctccagccatccttccagatttccccgatatctgagccctcactgctgccaccagagccgccctgcttcttggccctgcctgggtttgaagacagctcctcagctgggctgcatgtctaaggaggtcttgaaggctcgatgccacagcagtccctgtctctggcaacaagtagccttggcttttgctgtcttgcccaaatcactctgagctttcttcagtggtgtgagcatcttgaagaatgaatgttgaggtctgcctatcccccagggtagcaggtgagatggggccggtgcatgtctattccagttcactgttgcagaactgagaaatgtgcggggactttctcctctgtgttcgctgcgttttcagcagccagtgctgggcacttagccttcttgcataggtgcggaaagctaaccggagttcctgttccttcctccgtgctggtccccgcagggcttgtggtggaggaccctgtggccatctcaccaactacaccgaaacgcatctgacttctgacgccacgcccgtgtgcggtgcagcctccctgctgggcccaggcctggccgcttggagatggtgccctcatcgtcctgggccttccaggctgcagagggtgcggggagcactgaggaactgcatagatggctgtgggaggtggtggcttttaaaaaattgtggtaaaatacatataacataaaaatatatgttagccattttaaaatgtacaactcaatggcactaggtataatacattcacagtgttacgtgaccatcaccactgcctagtttcacaactctrtctccccaaatggaaaaccatacccattaggcagtcactccagacccactacccccagcccagtccctggcagccacgaatctgctttctgcctctgaatttttctattctggattctttatataaatggaaccatagaatatgaggtcttatgacagttttgaagttcactgtgttgtagtgtgtgcgagagtttcttttgatggccggataaaatcccattgtatgggtagaccgcattttctttctccattcttctgttgatggacatttggattgtttccacctttgggctgtgataaataatgctgctgtggacatttgtgtacatggttttgggtggacatgttttcagttctttagggcatatacctgggagtgggattgctgggtcatatggtgactctgttcaacttggtggggaacggtcagactgtttctcccagtggctgcaccgctttacactctcaatagcagtgtatgaggggaggtggtgactttggaagctgagagtgccagcccctctctagcataaaccagaattacctggagtgaccctcagtggagggttgctgggaccagtggcataaggagtgagcagggagggcacgtggggcctggggaagtcaggtggcattcacaagtgcagctgggtaggccagggtctggtcctcaggggtggctgagccctctccagttttttgggagcatgtggtgggaagccaggggactagggtggtgaaaggctgcatgggagcttgggagggctgttccaggtggtgcctgtggtgcaaggtgtttgaccctagggctgggataatggcagagtgtgggctcgcccagggaagacaggttacgagtccaaaggaagaggtgggtccaagcccagcccacagattaggctgatatgtgatggcgctgggggtgcttcactgggctccagtatggaggtacctcgtcttaactccaagcaatgcccctctcctgaggccaaggcaactgtgattgattcttacctgggggttaggttctgaatcaagcacacatggtcaaaactaccctcgaaaatctctggccaggacccagtcccttggaagctcaagagccaagatttggctgcttttatttgctcccagtggtagcttctctctcttcagggcagaaaaggccaaggtctggtttgggtggggaagagcgatgggggaatagaaattgggatgaggggtacagacagatggaatgggatatgtgtgagttgaatgcatgtgggttgtgagtccccaggctctcttggctgctggctaatggcttaggacctagggtagkwtaggggtctgagaggaccagaaaggctgacgttaaagcctctggggtgctgggcaggtgctgcagggctatcctcccaccccttgctggaaagacctggagccaggccaccatgagcccacagcagccccaatcagcacaagtagtgtcggctgggcacttgtcgctgtgcccaagctctgggagccccgcctgcatctggcagaggcttcctttggggcatgtgggccaagtcagtgccatcttataagcagcattagggtttagcagtgctaccatctcctggtgacgcttctacagtcactgcctcctggaagcatctgctcatcagggagcatattcccagttgacagattgagctttagaaaaggagtggctttaagttccatgattaggaagagccagractagaacacacatctgaggcttctggctctagattcagcattctttttgttgtgttgcacttcttgcagaagcygtctgatattggtgctaatcttttcccaccctctctttgttagagcagatgatggtcttggggtcataagttgccaagaacctggaggaggaggaggagggtgacacctgattcttatgtagggtgctttctcctccccaggctctggtcacatatgaaatggatctattttacccagctctgtcaaggccatcttgacctctggctctgccccatctgtccctgccctttactgggcagcagcctccccaagagacaagccctcacctggagttggcagaaatctttgagtggagcctcaattctgatgagacacaattagcatcctctgctctggccctggctttcagcaaatggtaaactctacttgagggcataattcaattatgaaaatctatttctcttacacattcaaaaaatctcctcatgtgcctttgtgcacacacaaatttagtgagacatcaccaaatgtgtatgtggttgccatggaaatgtcttctaacgtggcattccaagagcaaagagaagggaagttttctttgaaaagaaaagcagagcagaacttggctaatwgtcatcacactaatccccaaactgtcattcttccctgactacctgtcttctacttcctgtcagcaactgaacaggggaaggcaaatcagtgtgcaggactgggtctctcacatttccttaggaatttcacaagcattgttcttaacacttatgtcaagcacgtaccaggaaggacaccaggtcttcttgatttgagtttgcacctagaagcttagaaggtaccttcctggactgtctagcacttgccacgcatgagtactcagaagaactcctggcaccatttctctgtggcaagtgcaggctgaatagggcttctgaagaggctttgtgtttcccaccagagcttttgtctttgtgacaagggcatgatgtgacagcatatagagcatgccaatacgaagtcactttttgagtgtcggaaatcccaaatgtttcttagtggtggtgtgagtccacagtgtgggacctaaggctggttggatgcctctggtcttcccggctcaggctcaggttgatcctcaccctcactcttgttttcacttgtcctcttgactttcttaactgagcctttctgtgggcaatgaggtcctcatatttctggactttaccagcagtctctgaggggatcctttgtccatattagcggaccctttgactgggtcactgggctgcctttccccagttttggggctgggtagcagtcctttttcttttttggagatagggtctcactctgtcgcccaggctggagtacagtggcgcaatctcagttccctgcaacctgcccctcccgggttcaagcaattcccctgcctcagcttctcgagtagctgggattacaggtgtgtgccaccawgcctggctaatttttgtatttttaatagagacagggtttcaccatgttggctaggctggtctggaactcctggcctcaagtgatccgtctgtctcagcctcccaaaagtgctgggatacaggagtgagccaccgtgcccggcctggccttgttgcttttagtattgaaaactctaggatgctccatcttgtctgtggttgtactggctcccgagaagacctttagccactggcctggctgagttgccraagttgggggagggggcagtgcacagacccagtttctgacactcaaagcaggggctataaattctgtacactcccatgtccacagctctgcaccactgactggggcgtgtgggtctccacttactgtgggtcaagcagcaggtcatttctgccaaaagacaatgtccttcttgcttttataaatcaggtccttaacattgtttcttacccagtgtttatttctctggctctaaagggattaatcgaggcatctggctcatggctgggctgtgaccttaatgaatgtgtgtaaatttgaccaagagctgaggaaatcgtaccagcaactccgtaggggttcagagccttttattaccaaatacagtgtccagtgtttgctcttctgaggctgctgcaggtggccactgctccagtctacttccacgtaactcttgcttctgaggttgttctgaggttatttggggtcctgtytggggagctcacgaccccccgcagagagagcaggtccaggtatggcctgcttgactctgtggcctctccatggcctaaccaaatctctccagcaagggacagggcttttaacaatagtaaattctctttgggataatagagaacttgctttgacatagtgtgttctcattctttctttctgctgttttagacaccgataaatctaccaaacttggatgtataaatggctattaggagagctggctgcccactttcactcttggcttgtgcaagtaaatatcaatttagtccttacagaaggagaataaaggagacttggttgtctccctaatccacaaaccctgtaattctcacctggaaaatctagctctcctatttcaaatcagttttaatagcaaaggctaaagggaggctttattgctcttatccaggcttatttttaaacttttttttttacttattcattcagtaagtaagaactcctccaaggagacctggagggggttggcttaggagaaggggagaaggtgagtaagtggaagcttggtaggagagattgccactgggtgaacactcacaataggggccgctcaccaactgaacaggtgttctggaaatcagcagatcctgaggacccgggacggctactgcaattctagagcaccagtggggaatcctctgccacactttcttctgtcccagaggagaagcgggcagactggccctggttggagactcctgacagtgaccagcctcagctggccagaaagacagacttccctgagtgacaggcaggaaggccctggttggtcccggcctgcactggccttgcacggctcttcagctggcctgtaagcctctcctgagctcactgccttgttgctggcgcctgggctgctcattgccctgcaagtggtatgagtgggatggactcctgtttccattctgccctggtcatgtgtgacaggcaggaaggaaggggcakcccagcactgtggaccaagtctcctcaaagaagtatccagcctttcccttgttggaggggccgtgacccaagatgaaaatccttttcttagaggaaaatgctgtctgcagggagagaccagtgctgccttcctctgcccttgcacggagcaggagctcagaattaacatgcttattctgtaaccacacgcgggtctttctggcctgttcaaaggtgttataatccccaccctggctatgacctgaggttaaatgtcagaaagaaaataagatgttccccatgggaaaaatctatgcattgggggttatatcaggctgatttcaggtgtttcctcagactgataggttgtaaggtttagaaaagcaactaagtcctgttccatgtagggtgttagcaacatgttcccacgtgactataatgggtgcttgtgaatgaggagagaagaccctgctgcctgcctgcctgccggggccagagactggcctgagcagggatggtggagtagtttgggaacccaaactctcctgctgcccagcaatggccactcaaagccaagtgcttgatctttctgattggcctcttcatagcagctcttgactcctaaaagtctgaccccaaggcctccaggcacttcctgaggacatgtgtggacactcytgtcctggggtctaagctgaggagccttcctgctgccgcatgtcaggccctgaaggcctgtgtagctcctggaagaggcctccctgaccagaggtccaggaagcaggagggactcctgtgcaggacagctgctgccttcttggttgctgttgggaaacaaatggcttctccaagtaacgctggaactcttgtaaggatcactcactgccaaggagtctgctcagtgtggcagtggcgctctcccgggaagtgagactctgcaaatgtgttctcaagttctrttccagctggcaccagcccttcccaccccacaggctggaggcccccagcacccgctcaggcatggggccgagttgctggcagcccttggtgcatggctggttagcaaagaccagagcctgctgcctacctgaagccgtgtcatcttttcccctgccttggtgggtcttggcactggcatgaagttgcttcctcctgaagcagagcgtgggtgccctcccaccgacatgcaggatcagtggtgggcccrgagcaaaattactcaacctctgcctcaatgtccttttctgcacaatgggtgacagtgggatcaccctcggggttgcagtgctcagcagggtgcctggcccgtaggaggtgtttaatcaatgtcggctttattgtgatcacagctcactgtagcctcaacctcccaggctcaagcgatcctcccacctcagccttcaaagtagctgggactgcaggcatgcaccgccatgcctggctaattttttggtattttttgtagaaatgaggtctcgccatgttgcccaggctggtcttgaactcctggcctctggagttcaagagatctgcccatcttgacctcccaaagtgctgggattatcagtatgagccaccacatccagcctgtttttttgttttgttttgtttttgttttttgaaacaaggtctcactgtttcccaggctgcagtgcagtggcacaatctaagctcgctgcggtcttgacctcctgggctcaaatccatcctcccacctcagcttctcaagtatttaggactacaggcacatgccaccatgccaggctaatttattaattttttgtagaggtggggtttcactaagttgcccaggctggtttcaaacttctgggctcaagtgatccttctgcctcagccacccagagtgctgggattacaggtgtgagccaccatgcacagctgtacctcctctgttgaaacccccaaccatttcccaatactgctggtcccttattaggggcctttatggtaaaccatctttttgtgttgtgytgtgactactcgtgtggccctaagccaaattaggtgtcttgtcatcccaccctggaggaggacctctggcttctcaagtggggtgctccacggattccctgatttttctgaatgttctcggacctagtaggtatcagtgtccagggccaaggggtcacatcacagaggccrttggtcttaagagctgctttccccagaacgaggctgctgtggtttggccttggctccccacaagtctggcttctgcaggaagtttgctgagtagcccagctcttccctagagggcaggggatcaggcatgtttgggagggcagagcagggccaggtcggggcggggagcagcacgcttcaaaacttgccatccatcttctccagttctcaactgggctagttttgctcccccaggggagtcaaaggtcagtttttcgagacgtttttggctgccacactggggatgctatgggcatctcgtggataggggccagggaagctgabaaccaaaggatagcatccaggacagaccccacagcaaataattatctggcccaacatgtcagcagtgccgggactgggaaaccctgatctattcctggttgcacattgagacaagttttggaactcccagggttatagaaggagtatcacctatatgggtcagcctgggcccttcatcccttcatcccccaacccgagtcacttatccttgctgatgtgctgtgtaattatggacaaattccttcccctcaccagagccttggctttcatttcttagacacagcggtcctggggttgccttccagatgaagatctatcaaagatttgaagtcttgtgtatgtggtcctagaggaccccaggctgttataccgatccatgaggcatctgaccccttccaaagggtaaggctttacaaaaggaaagcagttttgactttgagctgctgagtgagatccaggcccctagttgaggaaactgtctcacgccaagtgggtgctcacccccaagcctgccaggtcccaggacttagctgttgccgaagcagcttttctcttctccaaataactgtgctttctttrtgctttgcttttactttaatctgtgtgtggctgcactggaaagggtaactttatggcagatgctgtggaacgtaatctgctcatgtttaggctgtaaattttccttttttccttttttttttgagatggagtcttgcactgtcaccaggctggagtgcagtggtgcgatcttggctcactgcaacctccgcctcctgggttcaagccattctcctgcctcagcctcccgagtagctgggactacaggcacacaccaccacgcctagctaatttttgtatttttagtagagacggggtttcaccatgttggccgggatggtctcgatctcctgacctcacgatctgcccacctcggcctcccaaagtgtggggattacaggcgtgagccaccgtgtcgggcctaggctgtaaattttccatggttccaaagtgctgtagagttcactggaacacatgctgtcctctgataattgaagtggcttaaaacaaaacaagtctttattggtttgaaacaaaccatcatgtgtgcttgtgcttttttaaaacaaaagcaaagctgacaccatatctccaattgagagcttcagcctccttcacccccagagatccggactaagtaaggaatttatttaccgtgtgatcttgggaaagtcctttcaacttctccaggtctgagtttcaactacaaaatgtggggataaaactcgatctccaagctcccttgctgcagcctctcactcagctcctggagtccrtggatctcagggagggaacctgctgtccaacactgctcttccagggttaaagttccccttctgcaaggtgagggcgagctgaagaaatgagcccctcttgcctctgtgattgtgattctcagatgctctcaaaataccaaataactagtttagttacagggaactggtggacacttgtagtttaaatctctttccttggcttcaagggagtgagctgagtttgacaagcacaaatggaaaactgttctcaggttctttcctctggcccttggggatagtggatgactgatgtctggggcagagtctagctttttagaaggcagactcttcctccgacatcctctccaactcctgctttctctccttgtgtctcttatcggcctctaattaggggtactgacttgcaagtctattggatgaaattcttcattttttcctccggaaaaagatgccagtttttcctcagggacttgttctgggggttaataggagagttaataggagagtgaataggagaaattcacttttgcccccaaacctccatttctcttgttgcagtttgatttaaagaagaaaagtcttgtccttgaggctgacagtgtggaataactcccccagggctgtgggtcggggagagagtgcaggccctggactgggggtgctcaggagctgtgagtgagggagtgagtataggccctggattcagggtgctcaggagctgcctcctctttttgggagggccccaaatggactagcagtccaaagctgatgtatgtcttaggttgggattatcagtctttttttttttttttttttttttgagacagtctcactctgtcgcctaggctggagtgcagtggcatgatctcggctcactgcaacctctgcctcccaggttcaagccattctcctgcctcagcctcccaagtagctgggactacaggcatgcaccaccatgccccgctaatttttttatttttaatagagacggggttttaccatgttgggcagcccggtctcgaactcctgacctcaagtgatctgcccaccttggcctcccaaactgctgaaattacaggcatcagtcactgcgccgggcctataatgtacttttaaagacgtcgtttcataataaggctacggagacatttggcgcctgcactgggcggctgagttgcctgctttgatagtgctttgcccaagtgttcactgaaatactttcttcaatgttacagggtcagcttcatgtttggataaataagcctgagtgttgaattccttccggggtctctaccttctgtggttaatcttctgtgtgtgtctttctgctgtatgtcaggctgtgcttaagcctgcttaattgcagtggttcacttgaaagtgctgttagaagtaaaattaaaggagaagacacatgttgggtcctgcccaagctggcatcttgctagctgttcaggtttgctattcagggagtagccaaggaggggagagagatggagagagagatggaaagatagaccaaccttgcgtctttttttttttttttgagatggaatcttgctctgtcacccaggctggagtgcagtggcgcgatcttgactcacttcaagctccgcctcctgggttcacaccgttctcccgcctcagcctcccgagtagctgggactacaggcacccgccaccatgtccggctaattttttgtatttttcgtagagacggggtttcaccgtgttagccaggatggtctcgatctcctgacctcatgatccaccctccttggcctcccaaagtgctgggattacaggcgtgagccaccgcgcccagccccaaccttgggtcttaaccaagcaggggaaaggtctcctgcctggggccctcagccttctaaggagagcctgccacagccatgcttaccattacccagggcacagttctgggtcctgaaaacccttttctaggagtaaaggagctttcagactgagcagactgcccttccccacgcctttctcagtgcctcttccccagaggctggggagaaggaagggcaagggttatcaggccagcctggccaggatgcagctgggtggtggtgcttgatgtagggggaaagccatgaagcgtggccctgaggcttgaagtggtggtgccttcctcttgcagccggaggtgcctaccttctagtgaatcatccgcacacagaagcaatttatgctcctcattattctttagcaagaaataatttcctacccatttgtcactttaagactaagggcttcacactccctgtgctgagaatatagtagcttgttgtacttcagttctatttatgtcccatttgggggtttgggggctgccctttgacaaacacacaaaaaggagattgatacagccggagccatagacaaacaagatgacaggccctgggaacatgggaaccttttgtcatgccctrttacccatgggggctttggcctyagtaagttattactggctaccagcgccttgtatatatcatcctcactagaatgaaaacacccatgtaactcttagtgagttgcttgctctgcattgaggccccagggatatgaaccccaggctgagcctgtgtgtggatggaaggaagtggatggacacacacacagcgtgacccaccagccggaccactgctcactttcagggctcaccaacctcagcatttccagccaaggccctgtggtgctckacaccatctccttgcctgctgccctgccccctggccttgacctgtctgaagatgagaccacctttcctgctctctgggagcccctggtcctgtgcagggtggcctagtagatattagaaattcaaaatcaaaactcagtgactgctgcagagggtgggcctttcccataaactgttcaccttcacagtggtgagcaagctgaggctcagaggtgttaaacagcgtgcccagagttacacagcttgaaagtggcagtgtcaggttgtgaacctggagccaggctatgaatctagagtgaagcccttggttatcccaaaccatagaccctaagggctagcatgagtgggaggggactcgaggcttcatggggagtgaaggcaggtggccccaggcttggaatgagcctagtaaggagacacatccaaacttgctgctgcttctttttttttaaacgcggtctggctctctcgcctaggctagaatacagtggcaccatctcagctcactgcaacctctgcctcccaggctcaaaccatcctgccacctcagcctcccctgtagctgggactacaggcgcatgccaccatacctgactaattttttttgtgttttatgtagagacaagggtttcaccatgttgcccaggctcgtcttgaattcatgaggtcaagtgatctgccctcctcagcctcccaaagtgttgggattataggcgtgaaccactgcgcccagccccaaactcacctcttaatattctgtctcttctctgaagttcctcccagctgctcagccgattgccacttatagatacttccccagacgcccccagcccgtgcagttccatcaaactttacacacacacacaatctgagcggggttgtcctgcttgcttatgttgcctgcagtctgcatttttcagtcctggccagcagcagcatcrgtggccctggccctgccagacacccctgcgtcgtgcctgagcctgctgcccagaggggatgcactgggaagagcaggaggctgttgcaaggctgaggaaggactggagctgcgaaggcacccgcctgcctcggatgttccctgatctaagcccagctgtacccagctgggacttggatgtgactcgggttggggattggtttgtcctgttgctgagccagcatcctgggaagccttcagagtcaaggctgtttggttctaggtggcttgtctccagggttatctccccacactccctggggcttacagttctatttctgtagcagccttggctctgcccccgacccttacgtcagacctagaaatacgtctcacctggatgacctscagggagctgctgctttggtcctcagactgcagtttcctacattacatacttccttatgtaaaaagcacagtgctggctacctctttctcaagctcttccctccaggaactgagcaggcctgggatgtggccagaacatgacttttagaatccctaaacctgggggagattatggagcctaaaatataattcaraagaaatctttcttttttagtgataaaagttacatgttgtacaaacattgatgtagcttctttctagcatttctaattgtgcagtcccaggtgagtccattgaagcagaatctcctggactccagctttgccagtgcccaaagcaaggcttggtctgcctgtaggatgcactcagggatgactcctgagagccagttgttaaattttcagaaatgttgtgtgccaatggttaataatagccattctttaaaaacaaattatataaaattatagttaaataaattaaaaacaagggtagccaatactcaaaactcatcccttcctgattgttttactgtattatttatctatttcacctgttgtatctatgtataatgatatgtcgcagcccacaccaaatccatgttcagtgacatcatgttggtagctctaaatcagccctggtgggaatatttctgtttgccacagaaattggcaaacactataaactygggtttgatttattgttttgataattgcctagacttaggaaagtgatagagagaatgctaatcagattaaacttaagtgtttatatatggcccagtgtggtggttcacgcctgtagtcccagcactttgggaggccaaggtgggcggatcacctgaggtcaggagtttgagaccagcctgaccaacatggagaaaccccgtctctactaaaaatacaaaattagctgggcgtggtggcacatgcctgtaatctcagctactcgtgaggctgaagcaggagaatcacttgaacttgggagacagaggttgcggtgagctgagatcgcgccattgcactctagcttgggcaacaagagtgaaattccttttttttttttttttttttttttttttgagtgtcgcctaggctggagtgcagtggtgccatctcggctcactgcaagctccgcctcccaggttcacaccattctcctgcctcagcctcccgaatagctgggactacaggtgtctgccaccatgcctggctaattttttgtatttttagtagagacggggtttcaccgcattagcccaggatggtcttgatctcctgacctcgtgatccgcccgcctcggcctcccaaaagtgctgggattacaggtgtgagtcaccatgcccggcctgaaactccatttttgagacagactcttactctatcacccaggctggagtgctgtggtgcagtsatggctcactgcagattcgaactcctgggctcaaggggtcctcccacctcagcctcccaagtagctgggaccacaggtgcatgcaaccatgcccagctaatttttttattttttgtagagatggggtttcaccatgttgcccaggctggtctcaaacttctgggctcaagtgatcctcctgcctcagcctcccaaagtgctggcattacaggtgtgagccaccatgcctggccaaaagtgtgtcattgtaaatgacagtattcaaaacttaccatccaattcagcaaagaagtggctcacatcattgataaacacatgaaattctgtttttttttttaatttcagttttatttgttaaggtacatgaaaatatcaaccatcgcccatgttggagctacatgcagagggttagttgttaaaccgcacactgctggatgcagctgtgctgcgtggcccatgtatttcatcacctctatgcctttgctcctggctatttccttttactgtcttgcccgagtcccatttcattcactgactcatttatttaacaaataagtatccagtgtggactatgtgccaggcaccagggacacagcaatgaacaagacagacccaaaatacaaattctgttctagtggagttagaggaacaataagcaaaataaatatgttaacggcatggtatgcagtttcaaactcttccctcttttccccagagcacaaatgtccccctctgtgtcttgctctcccccaccgagggtgagttctgcctccattgtggcaggatctttcaacctcacaccaaaggagacaaggcttakcttgagcacagggtctgagcagagatgtgtgcatagctgggaactcgagactgaggcctggctttgtggaagacaggcaggaagcaggaagcagagccacagtttyattagagttcgtgaaaatgggatgtctcctcccaatgtaatgatttgctaattgttctcagtgctgtgtgtggggttgaagggagatctaagatgaaacctttgcacctgcaaggagttaaaaatatgtaatgaaagaaatatcacaggatagcctgctcattccctcatctatttgttttgcaaatacaagtcctaccccacatcaggtgctataagctctataaactgtaaagccaaatgatctacggtctctccccttgaggaatttttttaacttgggggcaatttataatccagattgctggccagcgaacagtggtcagaatgctctggaaaccttccccatctctctggagtcatcaggcccttgcaggtagtcagcctcctctctctctgttgtcccctcacttataattgacctcagtttataattctgcatctgtttttgtgtttgattgatgtctatctctctcacaagaatgtcagctccaggaggcagggacccatgtctgtcctgttcactgagcctggcatgaggaaatgctcaggaaaaccttgttgaataagcaaatgcagggaggactgagagtggaggagggagatggtgtgagaagcctcaggggtgttctggagaacgagccttcattctttgacatcaggcaagtgaatccagactcctcagcatttgtcaaggtgcggctagacaacacctccattgtgtagtcatattcctctgtggagagacctctagaacagagcacagcagtttgtattacagcttatacatgattcttaacattttctcgtgtcacagactccttgctaacctgataaaaactataaacgttcctccccagaataatgctcatggcgtgcacacatgcgcacacacacacacaaacacggttccctaaagcccatccgtaaactccaaatcaagaactctgctttaaaaaatgtgatcccatctgggcatggtggctcacacctgtaatcctagcactttgggaggctgaggcaggaggattgcttgagcccaagttcaagaccagcctggccaacacagtaagrtcctctctattaaaaaatatatttaggccgggcacggtggctcacgcctgtaatcccagcactttgggaggccaaggcgggaggatcacgaggttaggagttcgagataagcctgaccaatatggtgaaaccccgtcttactaaaaatacaaaaattagcygggtgtgatggcaggcacctgtagtcccagctcctcaggaggctgaggcagaagaattgcttgaacctgggaggctgaggcagaagaattgcttgaacctgggaggcagaggttgcagtgagccgagatcatgccaytgcactccagcctggtcaatagagtgagactccatctcaaaaaaaaaattatacatatatatwttttatttatttatttatattatttattttaaatacatgtatatatattttatttatatattattttaaatatatataaaatacgtatatttaaaataaataaataaataatatgatctccatagcagacacacctcctattcctctatagccccaatatctagcacagttcttagcatatgggagcacttattgtgtaatacagtaattcccccttacctgcaggagatatgttccaagacccccagtggatgcctgaaacttcggatagtactgaaccttatatatactatgttcttcctatacatatgttgccataaggtttaatctacaaattaggcacagtaacagattaacaacatatttagaacaattaatctactgtaataaaaattatgtgaatgtggtctctcttgctcccaaaatacttcgttgtactgtacgtacctatttttgggcctcagttggctgtgggtaactgaaactgcggaaagtgaaactgcagatatggggggattactgcatcggggattactgtgtcgrgggcacagtgggacgaatggggagatgggtatgtaaaaaagtgtctgggtttgccatggcctacatagagctgagctgacaattccattgaagtcgcgagggagagggccacttgagcagagtggtagcactctatatcactgctctgtcctggccctgcgggttctccccatacccaggaggcccaccaagtccataagatcactttccaaataaaaagttagaacatggtgtctgacacattgtctgataatgggacagaatatttgaaattgggcctgtctcacaaaaccaggggttatatgaatttaaagaaacatgacttagttcttcctgaggctggtagggttcttcttgtggtagggttcttcttggtgcttctttaagcctccccagaagggggatgatcagggactaggctgcattccccatagagactaggttattctgggtagaggggcccagtatggcagcccatctgccctccacacgctctgtggtcgcctgtgttgggggacctgagcgttagtggcaccccatgctgctcattaccaccccaaaaagtagtcaatcctggcttttaaaatgttcaaccctactagtttttttttttttaattttaatccctatttttcatatgaggcatttggcaatgctgatttttagacaccacaatagttcaaaaccatgggggagaaaaccttacagtactagaatttgcttggaaaacagttgtcaaggaaatagattttgcaaaacatttcctcccaggagagtgctcactttccatgtatccccacgttgaacattattctgccatataatagtggtaggcaaaggtactgtagacagataatttgtctagccaacatctaattatgaattaaagccctggctggcacttttacagctcggcagccaatggtggacagagttcaagttgagtttacagtgcatctgaaatgttctcggacatacaggaatgacggaagatttcttggccttggctacagagtgggaaataggattctgtaaactctattagcagacaatggaagcatctgatagatggagctgaaattgcaaagcattgttcgattaaaagaaaaggggaagactcgctgggcgggggctgtgactcaaggcactcatataaggaggcaattatctcacgattggacatgctggtggcccagtctccagccaktgctacttggaggatccgtcactgttagacatgccaacaaatatatatactgctcagttgagagcagacctcacaagcaaggctggcggctttaattatcacttgtgagaacttagtcaagaaagtgctagcctggttaagagttatggccactgacgctagcaggtggttaattataggcccctccattcccacaaaggtgcacggcctgtgtagaaacggtttctgacaaagaggcagagagatggttgtgtctcttcattatttccatttgtgttacgatctattgtatttgcagtaatctttaattatagaggctattactatggaatggactatcaatgttactcgtttctgcaatgttgcctggtaacgtccctttgtgcctgagacacacgtacacatgtctctgtagttacgggctgttgaattgataccttcctctcagccatttgccatcacaatattataaaaagctattttaagaattgagagtgcccaatctatggggtgaaaaatggactcggtgtgataacagcctrcatcttcaaaaagacttaattttaaccagaatagttcttacacgatgcaatattccccagtagcaagacggaaaaacgcttccaaatagttagctgcattctgccatcatctttggataacgctgtgtcccattacagaccaatctctgcctcgagacccattttgcacaccgctgtggaccacacgagacatgagaagttgggagtctttaggtttttgatgatttcccacctaagaagatcactgatggagaaaacagggcattagatattgcaggtggagtctgtttggcccctctgtgaagtcaggttatttccatcatcctgctgattttgaaaatggcccattagtagaagaaatggtgtcagagttatcaccagaagtactcaaaatcattctcttgaaaggtcacactagtggaattttcaggtaatacttggcattggcttttttttttttttttttttttgcaggaaagcagctgctccagccatggggagaggtcatctactgggtttcagatctcaagttatggctgtaactccacaaaagtggctatcgcttaaagataattacattccacattgttcatgctaaactcttgagatggactgattggcatatttaaatctcatctctcaggcatttgctaattatcatagcctagttggaagaaaaaaaaaccctctaatcaaatagctgtttagagatgctttgcattttaaaattttactgggttcataggaaggaggaattatgcctctgatttcttctggctcttcccctgacctcaggagggtttagacttttaacggtttaaatagccrtagctatccacccaggaaacatttttgcatttcggttctctgtctttttgcgtcgttttcatccccaaccccatttttcacttagtgacttcacatccaggaggggggctgttgaattccagctaatgagcctcatctttttactcctcttaagtggtcccagctagacctggagtcaaatctgagagcaaacggtagcacacatctttctcaggttyacaaacggaacaccaagtccatagtgaaagggagaggaatttcttcctcttgcttagaaagacaaaaagagcagcttctcagggcagcaggttgagtagaagccatcctccttagaaaaggcagacttggtgtttaattaacagcagctggaaaggaccccactccccccacmactggcagctgagccgacatcgttttatgtaatagattcttttcagctgctgtgctcagaattgagaaaacctgatggtttcctcctttatacaaaacatacggctgtcagcgacagaaatctcagccaggcctttcttttatggggatattctaaaagggcctgtctctgagattttgaaagagtcccggtgagccaccatcacccatagttgtgcctcaaaagcaagtgcagggaagaggaattctgtgaaggttttgaaacacctgtcatgggccgtgggttcatttgtgccctgcctatggcagggtctgttttgcccactgkcaggagctgctgtttcctatagctggtttacaggccccagcaggaagtcccagttctggaggcagcataggaaagagaaaatcctggtctcctgttagaagtcagagcagcagacctagagaaggtgtattcagttcttggggaggaggatgtgaggatgggagggaggtaggaggagagagctcaaaatcccaccagttgaaggcctgtgtgagctttaattttggccatttaaacaattcaaagaggctgggagtggtggctcacacctgtaatcccagccctttgggaggctgaggcgggcggatcacttgaggtcaggagtttgagaccagcctggccaacatggtgaagcccggtctctactaaaaatacaaaaattagccaggcgtggtggcaggtgcctgtaatcccagctacttgggaggctgaggcaggataatcgcttgatcccagaaggctggaagttacagtgaaccaagatggggccactgcactccaccctgggcgatggagtgagactccatctcaaaaaaaaaaaaaaaaaaaagcaattmaaagaaaaagaaacaatgaaacttgaagatctgagttttctctctgtccccattagttcatcacgattacagccttttgattttcatagtkaattgttcttcggcattctatttcagggttttgaaatcaaattgctcgatcttttctctctcctgtgtgattaggttatcttttataatacagctgcaataatcctttcaagaacacagcgctttagctcagcagtgtcaaagacaatatcctaagtggcctctgaaattcagtcttgtaggagtgagaaaacaccaccagcccctattatgaacccagaagtgccaccacacatcacccatcatcacagacctggaaaaatgaaaagaaaacccacactgagctgcctgattaatgcaaactcaaggagtgcttatggggtggcagctacttggcttcatgggaagaatgactccaggacctcagttattttatgtggcatttgtaaggctaggccggtctgtttactgctttggaattctctctcctggggtgaactggtaaccttatcagtgggttttacaagcttttctagccaagaaaagaaaatatgtactttggaatctcttctcatgggggcttggaggaacaaagaaaagccgaatgcatttctcaggctataaatgggaaacgaggtgcatttttttcagatatttattaagttctcagctcagctgtcatctgggaggccttccttggccaccccacccactcagttatcccccacccccttaccttgcttgactttccttcacggtgcttgtcaccattcagaattctcctgctggctgctggctgcctccccacactaggatgtagaggccatgaaggcagccgccattcctatcttgtttactcccatatgtactagaacatggggtacatagtagatgctcagtaaatattttctgaatggatgtcaggtggggagaggtagagaaaagaacggttaacatgcagagattggaatcggacagacctgggtttgaatccaagccttctacttttctttctttctttcttttttttttttttgagacggagtcttgctcagtcacccaggctggagtgcagtggcacgatctcggctcactgcaacctccgcctcctgggttcacgtcattctcctgcctcagcctcccgagtagctgggactacagacgcccgccatgatgcccagctaatttttttttgtatttttagtagagacggggtttcaccatgttagccaggatggtctccatctcctgacctcgtgatccacccgcctcggcctcccaaagtgctgggattacaggcgtgagccaccgcaccctgcccaagccttctacttttcagctgctgtgctcagaattgagaaaacctgatgrtttcctcctttatacaaagcatacagccatcagcgacagaaatctcagctaggcctttcttttatggggagaaactgaaagggcctgtctctgaaattttgaaagagtccgggtgagccaccatcacccatagttgtacctcaaaagcaagtgcagggaagagaggaattttgtgaagattttgaaacacctgtcatgggccgtgggttcatttgtgccctgcgtatggcaaggtctgttttgcccactgacgggagctgccgtttcctgtagctggtttacaggccccagcaggaagtcccagatctggaggcagcataggaatgagaaaattctggtctcttgttagaaatcagagcagcagacctagagaaggtgtattcagttcttgggcacacagttagctgtgtgtccttggaattgttactgaaccgctctgaacctcagttttcttatctataaaatgggctcaatacttgcttctgggagtagcaatggaagattaaatgagataaaatatgtgatcacatctggcaraagggctggtacatggaggtgctcaataaatactggcaccatcgggcacactggcttgtgcttttaaccatagcactttgggaggtcgaggcaggaggatcacttgaagccaagagttcaagaccagcttgggcaacgtatcgagaccctatcttttttaaaaaaaaattgtaaaaatcagccaagtgtggtggcacacacctgctacttggaagtcccagctactagggaggctgaggtgagaggatcacttaagcctaggagtttgaggctgcagtgagctactatcataccactgtactgcactcctgtctggatgacagagcaagactctgtctctaaaaatacacagatacaaataaatactggcttattctccagttcttaactgaaatcctttcacaggacaagaaacaaggccctttactacccatgaatgttggtagttctcaggcccccttcttgagtccaggaaaggaatctgtcaggagaatgttgctgatcctctttcggttccaagaactaccagaaaatgtagaactaccagaaaatgtagatggtttcacatgattctaaatggatttccaaagcagtctatgcccacagctggtttctccagaaatgacaacactgcctggaaaacaagactcctgccctcctggagcctttgttcttgtgcttggcccagggcctccctgtaagccccaaaggctctgaaacccatcacccaaatccccttgtggatgcagagacgccactaagcagtctttagatggagattatcaaggctgaacttccagatttcaaatagtatcacctccctgggaaaccagcacttggagattcctgcgttccatgtgccttgcaggatctctctgccacttgcattggtattttctttgttttcacttaaacctgtttctttaaaaaaaaattgttaaagtttgggtaaaagaactggttccgcctctttcatgtttccaaaggctccaggctctgctggggcagctttaaagcaggtcatccattccttctagcagactgagccttcagggggtgggaatttggacatttctcattttcaaagagaagcagacataaggatgggccacttgagccaggcacagggcagcagccggccttcgtttgatgctgtgtgtgccacatgctgtccagaggtgctgggtctatgtcgtgttggttcattcattagacagtagagcagcctggtgagatggaagagacaaagctttctgaatcagccagaccccagcttcaaacactggctctgccacctgccagctacagagcccaaatgttggcaaaaggagagagactggtcttacctctgagggtggttgggtaagaagtaatttgttgtcatggttaagactgcagctctgatttagcctcttgcatccattgcctgcctctgccactactttttttgagatggggtcttactctgtcacccaggctggagtgcagtggcgtgatcttggctcgctgcaaccaccacttcctgggctcaagcattcccctcacctaaacctcccaagtagctgggaccacaggtgcgtgccaccatgcccagttaatttttttgtattttcagtagagatggagtttcaccatgttgcccatgctggtctcaaactcctggggtcaagcgatccacctgcctcggcctccagaagtgctgggattacaggcttgagccacaacacctggtcgctgctgctgtttgttccatgtccttgggcaagttatttcaccctccaggactcattgcttcatgttgtaaaataaggatacgggctggcataggattaaatgctcgtgaagggcctaacccagtgggtggcacacagtaagtgctcagtggatgtccactactggataatagaggtaatgcatgagccattgttgtaytgatgtgctatgttgactccctctttatggccaagctctgtgctaggggttggggatacagaggggaataggttccagcattcaagggcaaaggagacagacatgaaataaatgattatcccgtagaggtgttaggtattgtcactgatggacaatagggggccgtaggaggatagtgaattcagaatgctgttgcctgtgccccagaacatcagaacgcctcatgtaggaatgtgctgtggtggaatggaaaatgcactggagatttggtgggttggtttgttcatttggttattcattggcatgtacgaaggccgtgaggtagtgtattagttttatcttgctctagtaacaaatcacaaaaactcagtgacttagaacacaaattcgttctcttacagtttagtaggtcaggggtctgaaacaggtctcactgggctaaaatgcaggtgttggccaggccatgctgcattcctttctggaggttctaggggagtgcattaattaggattctccagagaaaaagaaccagtaggagatggtagaggtgggacttattaggggaattggctcacatgattatggaggctgggaagttccacaacaggccatctgtaaactggagaagcagagaagccagtagcatggctcagtccaagcccaacggcctgggaaccagggaagccagcagcctaactctcagctcaaggctgaaagcctcagaacctgggggtggaggggcagttggtacaagtcccagagtccaaaggccagagaacttgttgttctgattccaagggcaggagaggaaggtgccctagctccagaagagagagagagagagataatttgccctttcctctaccttttctatgcaggccttcagctgatgggatggtgcttacctacattgggcgagggcgggccttcctaactcaacccaccaactcaaatgttagtctcttccagaaacacccttgcagacataccctttccagtatcctgaaaagaatactttcccagctatctgggcatcccttagtgcagtcaagttgacatctaccatgaaccatcacagggagaatcccttcgagaggccacctgcatctctgcattccttggctcatggccaccttcctccatcttcaaagccagcagtggtggagtctttttcacatctcatcacttggacactgattctcctgcctctctgtcctacttataaggacccttctgattgtactgggcccaccccgataatcaggctaatctccctctccccaagtcagctgattagcaactgtaattccatctgaaaccttaattccatcttaccttgtaacccaacattcacaggctctgaggattagaacatttgggggccattgatcttcctgccctaggcaaggggggctgtgtgtgtttgaggtgatgggcaaaggccctgtggctgaagcgtggtggggaaagtccaagaggcaggtaggtgttttgaggctcagtgccatggggctggcggttggaggctcttacacagaggaatggcatttaatggtttgccttttcaaagggtggccctggtagctgtttggagaaaggatgggggtgacatgcggggagagagggcagctggagaccattacagacartcagatgacagccagaggtgaacggggagggggaaaggaggtgagtcagagatgtcatcgccagaaatcctgttgaatagatttgggtggggaggaaaggagacttgagaggacttggtttctgatatgagccagcagcaggatgacagcgctgtctcccgatgcagggaagacgatgaatgggaagcccggggcaggcggagcacctgcgaacacttagtggagtatgctgtgcccaggtgctgtgccgagggccttggcattgtaactgatccttgcagcacccagagaaggcaggcacggtttctgctccattctgtgaggcagtggagtattgtggctgtgagcacagaccacctgcattcatatcctggctctgttgcttacttgctatgatacttgggcaagtacctcagtttccttacctgaaaatgagagtaatgttataccagtcctataaaattagtgtgaagattaaatgagtttatatgtaaagcactgatgactcatggaaaacactaggtaaatataacagtatcattatttttacacagatgaacagattgaggcacagagaggttaagtatcttgtccaaagacacacagctgggtaaagccaggatccaaagccaggctctgaactgctatgccttacctcctccccaggagcacgtcacagagatgtggtgaaaacggcatgtgcacatgcatacaaaagcacttagcagtgtgcatgacacaatatgtcccataaatgtctgtatgtggaagtgcggtttcttttgctgtaaaatgggggtgattacccctaccctgcctaactcacaggtgacggtaaggctcaaatgaaaaaggcaaagcattttggaaatggtagagacacttgcacatgggcaggttttgttgaaccatttcgcattggaatttcacttgtgggtgacctaagatctttcccactgtcactcatctttgtcccccacacgctgtcttcctgcccccacctaacacccaatctgtgatagaacagagcggttggggacctgtcccaatgcagtggctcccaggtttggtggccttctctgtgcagctgctcttgtctgtctgcacgctgcaccaagaccaaagcctcgctgggaagggtctcacctgctcttgctgttgtggcctcacaattggagctgtccctttattgggcctttgataaatccttgttgagtcaaggccactgggcagtgagtgcttctgtcccaggcatcctccttaatcctttgacatgagcagccctagaggttgcctcgtgttgtcaccatccttagtcatttaatcaacatatttttatggaaagtctctatgtgctgggtactctcctaggtgctagggagcagtaatgagcaatggagccaacagagcctcgtggagcctgcataatcatgcrgggaaatagatactaattaatcacacaactaatgtaaaattttgactttaataatcctccataatagggtgattcaacctgaagggaagacctctcttggaagtggcaaccaagcctgggcactgaaagatgagtggaattcaccaggcaaaaagaggagggaggagttgtccaaggagcgggactattgtgtgcaaaggccctgtggcagggggaggcatggttccttgaggaaaagagagagaaagctagtgtggctgtggcagagatggggaggataagctgactgaaggcgtgagtgggtgacttcctggggcctgatgggcctcaagaaggagtttatttaagtgtgtgtttgggatgaagcagagcgatatgaataaatttgcacttcaaataaccaccctggctgcaatgtggagagcagtgtaggaagccagggaggacccatctaggccagtcaggaggcagtcgcaggagttccatggagagatgggagtggtttggattagggtggtgctcatggtggtggtacaaagagaagtggatggagagatacttctcttttagtggatacgttaataggatagcagtatcctgtggctgctttttattgattgattgattcattttatttcagtagtttttggggtacaggtagtttttggttacatagataagttctttagtggtgatttctgagattttcgtgcacctgtcacctgagcagtttatactgtacccaatatgtagacttttatccctcaacccctgcagtctttcccccaactctgagtccccaaagtccattatatcattcttatgcctttgtgtcctcatagcttagcttccacttataagtgagaatatacaatatttagttttccaatcctgagttacttcacttagaataagagccttcagctccttctaagttgctgcaaaggacattatttcattcctttctatggctgagtagtattccrtggtgtatatatrccacattttctttatccactcattggtcgatgggcacttgggttggtttcgtatctttgcaattgcaaattgtgctgctataaatgtgtatgcawgtgtctttttcatataatgacttattttgcggggggggggggaggtggttacccagtgtgggattgctggatcaaatgatagttctacttttagttctttaaggaatctccatactgttttccatagtggttgtactaacttatattcccaccagcagtgtaaaagtgttcacttttcaccacatccatgccatggctgctttttattgagcacatattatatacgagccattgtgctcaacactttacatctgttatttactcttagggttattctaaggattaagtatttctgtccttttacagatgaggaaactgagacttacaggggttaagtcactcactcaaggccacacagccagtaaggtggcagagccctagagcagcctctcaagcttcaatgtgcgtttgaatcacctggggctcttgttaaactgctgctacagattcagcaggtgggagagtggaactgaggtactctgtttctgacgtgccccctgggtggccctactcctggtccctggagcactttgagcagcragagtttctctgcctgtatggcccacactctcgaccctgatgccttagaaacagctgcagacaggatgcgattcctgagactgctcaaacctgaaaccccatgggcaggatgtgggtgagctgtctggacctcaggtgggtgggagttgtatcatatgctcatttcccacattggcctttcaatagcttgagtaaacccgaaactgagagggttggaggcagcatctccccttctactcccccgcttcacctccccgggcaaccaaaccccacccgtgcccagcttctgagcgatagacctgggctgtgtatttgcaggagcctcactggggtcaccaaccaggtcatgttgtgttgccccaataaatggaactggatcagaaaatccaacgtggatagtttttaggtgccaagctgtcagctcttcccttggactgtgctgaaagtggaagaggagaaaaaaatcaacccaatgttctaagctctctgtctacatagtcattagatcccaggatygttagagaccaaatcccttcccacttggcccctgcaaatggggccaggtgtcactgctgggagacgccagtaaggctgcacgtcatggtgtgagcacttgtctttaatgactgggaaaatccatttccttccttggcagctttgaatgtagcaactgtggttctgggtcactgccagagccagccttgtgtgtatgtgtgtgattttttaaagtgggggagaatgtctcaatattcaatgctcacccccttccttccaagttgtacccccagagaactgtccaacacaaactttggagttttccactctgggagtggtctgctggcacccacgtgtcctcccctcctctaatgcatcctttctctcttgatctcattgttctggggtcctcagctgagtgggcatctgtgcctgggtgatcgattctagtctcttttctgcaggagagaactcttgagctctgagacaggtagaaagaaaatcttaaaccaaataataatgttctgcctcacactagtaaatattttgcactaaaaaattccgtgtcattttgatttgttcaggtagacaagaacatcttttgtttgaggaagaactgaagagatttcttgggattcagctccgatggctctgcctgtatctctctatcattggrgctttgttttccacctttgcaagacttgagtgaagggaaggctttgtggtctattgttaggtgctctttgaatctataaatcacaggctacaggaagggaggggcttccagagaccatctagagccaccctctatctctagcagggacacacacacacacacacacacgtacacacacacaatgactgcctgttgcgcgtttctagaacctagtggggacaggggtacagtttcttttggtgcatagttctcatgttgattggttccractgtcatgttcttgcacctgtcctgagtatctcttgctgtagctctggccctttccccagtcagctactgcactgccctggcccatgtttyttagagacatggttatctctgtgctattagtgtctgtgtcctggccgaggcaagtcccttccctttytgagtctatattyttataaaatgtggctttgagaatagatgatgtttctggtcttaaaattctctttgactctggagttytggatctgtgcttctgtttgatgttgtttctcttgctgggtgaccttctctytgactccctgctgtaaagacctccyttttttttttttttttttttttttttaatcaaaacctaacttggtccgacctaccccatggctgaccacccaggcacttgcttttgacttaagggtagcaccatacgatgtcttctttttgtttttcattttaacaacctgtatttttcacatcacaaaacctttctagatattcactgtagaaaattcagaaaatataggtcaataagaagaaaaagatagaaatcactaaacttctatcagacataaccgctgttaagaatttggtatattttctttcagtcttttttgtaaacactcatacataggccagtgaatttcatactatgtaattttgtgttctgcctttccacctaataatatatactgagcatttttgcctatcatgaaacatttgtaaacacaatttttaatacctatttactactttacatctcctactttagcccttgcataattatttccaaatggaacaaatatctgtcttgtccagcccactgaactggccaaatcaaatgagataaaatatgcaaagagctgcacaaatataagtgatgattgttcattttgttagttttatctccccaagtgaactactttaccgtattgtctcaaaatcgttaaacagtttcctgttcaccaagttttgcacagtggtgggcaaaacatgctgtctggctgtaatctcttaaaagggcgttacatattaataactttaaaagttttttcttagcaacttcttagaaactctggtctaaggaaattattcaaaatgttatgtgcacagagatgttcactatggcattatttacaatagccccaaactagaaatcaccaaaatgtctaattatatgggaaggaggtgaagtaaatgatgatgaacccactttctaagctattatatagctattaaaagtgatgtttacaaagcctttgtaataaaattggaatatgtcataattatgggaagaaacaaaggtacaatatgagagggaaaaacaaaggtacctgcagagaaagaygccaaaatgggaatggtggttgttaaataatgggcagttgttttccttctctttttctgcttttcttcagcgagcttgtgtgcctttgatacattaaaaggtagagagacagagacaagaagagagagagaggagacgagagagagagagagaaacaagacgagagagagagatgagacragagagagagaggtgaaccttgtttttaaaattacctgaaaggatttatgcagaagagagaaggaaggggcacagagctgagttcaagagaagggagtgacccagaagtgggagaagcgggcatgagggctgaagcctgaattgagctgagacttgtagaaaattctcagaaccaccaaaggagccttttaatttttttggagtaggaagaaaacaggcacctcctttgagcatgctaatataattataaaaggagaaaccaaaatagctagttcctaatttgttcaccagacttcttccttctctgaccagcgtggggaacaggcttggtgagacggacatgaagacccatccaggccattgaggaactgggggctaagaagaacttcagggagactgacaatggccacattctgttgtaatttataaaaagtgaaggaaaatagaattgtgtaatgtataaatttgggtgaaaataacagcctccagtaaaatttcctaaatgagttaaaaaaaaaaaaaaaggcatttcagacttacggaaaagttacaaaaatctagcaaggatcttacgtttaccttcacccagattccgcaaacgttaacattaattttaccctgtttgctttctctctctgtttttcactcatttgctttacatatatatcatatatatgcacactgtatgtataatakatgtatacacatgtacatacatattgtcttgtgaaccaatttgaaagttgcaaatataatgtcctctacccttaaatacttcattgtatatttccaaaaagaatgacatttttctttttcttttttttctttttttgagatagagcctacctctgggtagaggcctaggtgacacagcaagacctctgtctcaaaaaaaaaaaaaaaawawatatatatatatatatatayayacacacacacacacacatatatatatttcacataccataaaattcatataccataatatctgacttttaaagtataaattttagtcattttatttcatttttgagacggagtcttgctctgtggctcaggctggagtgcagtggcgcaatctcggctcactacaacctctgcctcccgggttcaagaaattctcctgcctcagcctcctaagtacctgggattacaggcacctgccaccacacctggctaatttttgtatgtttagtagagacaagatttcaccatgttggccaggctggttttgaactcctggcctcagatgatccgcccacctgggcctcccaaagtgctgggattacacgtgtgagccaccatgcccagcctcagtcattttaatatattcamaaattgtgaataatcaccacaatcaattgtagaaaaatttcattactctgaaaagaccccatgcccatgaacagtcactccccatttctcccttcccctagtccctggcgaccactaatctgctttctgctcggatggatttgcttatgctggacatttcctataaatggaatcatactccaggtagcatttgtgcatctggcatctttcactaatcgtagtatctcaagtttcatccatgctgtagcctrcaacagtgcttcattcctttttccatctgaataatattccattgcatggtataccacattctgttgatccattcaatcaatggacatttgggctgtttccactttttggttattacagatagtgccactgtgaacatctgtatccaagtttttgtgtggctgtatgttgttatctttctggggtatgtgtcaggggttcccaagacaccacccctaggttcagtgatgcactaggaagactcataggactcagcccatagttcttgtcatggcgatgatttattacagtgaaaggtttcagagcagatgagcacrgtggctcatgcctgtaatcccagcactttgggaagcgaggcgtgcagatcacctgaggtcaggagtttgagaccagcctgaccaacatggagaaaccccttctctactaaaaataaaaaaaaaatcwactaaaaaagaaaaaaagcatrcctgtaatcccagctactcaagaggctgaggcaggagaatcgcttgaacccggcaggtggaggttgcggtgaactgagatcgcaccattgcactccagcctgggcaacaagagcaatactccgtctcaaaaaaaaaaaaaagaaaagaaaagaaaaagtaaaaaagaaaggttacagagcaaaattagcaaaggaaacagtggatggggacaacccggaggaaaccaggtgcaggcttccaagagttctctcccagtgaagatgtgtaaggtgttatcgaccagggaagctctttagagactcggtgcccaaggtaggcacccccttcctaacaagtaccagcattccacactccagaaggaaagtagctgtttagcataagccacattgtacaaatggtccagacacaggacaccacctttatcagttagagactgataggagcactcgcaaaacccaggttcctagacaccagctgaggacccacctcgcaagcaggcctttctgaggacagacgtctaagacctgctgcattaacttttctgcacaggtccgtacctagaattagaattgttaggtcayatggtaactccatatttaactttttttgccaaactgttctccaaagtggccgcaccgttttcattccaaccagccatgtatgagggttctgatttcagcatatcctggccaacacttttcattgtccatcttttttggtatggccatcctagtgggactaataggtttttaagttagtgatttgcaagcatttaggattaaaaatgatgatccgtaggagccaaaatgggttctctaagaacaatcatgctagtctaaccccctatttgccttaaaaaaaaaagcaatttatttttctgtactagctgtacyagggcagagtgtctttatatttcagcctgtctttcacaatatcttggtgtacaaaaatggagaatcgggggttgtacggattgcttggcagatttcttatttgctgatgaatgacatcaaaacaaacaaacaaagaacagagctgggtccaggagagagactcctgaggctgtyttcccaacttagtccttagctggctgtttatgtttccgttcaaaacctgagggtagatgcagatagcagtcccatcaagtctgcagattatgcaaagcaggcagacacacgtgttgaataagatcttgttccagaaaggttggatctggaaccagagagatccttacagcatggaatgataggcagagtccaaagagatggaagttattagggacaaatgacaagtccacacctacacaatctggcacagaggtgaccagagcgactgtgcactttggtttctgcccatttccaaaagaacagccagccacaacaaatgagtgacagaggtgtggggctcctggaagaacactatgtcatgtgggtctgcagtttcagagggcttaataggtgagtgcacttcaagagctggctccccgtggctgaaggtctgtggtatggaagcaggaagaattgtctcccctgtggcccataagggaaaacagatttcaattgattaaagaagaactttgtgaaactccacaatcaaatgggcctgggaaggtggagagcagcccatcactgagcgtgttcaaaaagataccactggcygggcacggtggctcacacctgtaatcccagcactttgggaggccgaggcgggcaaatcacttgaggtcaggagtttgagaccaacctggccaacatggtgaaacctcatctctactaaaaatataaaaattagctgagcgtggtggcacgtgtctgtaatcccggctactcgggaggctgacgcaggagaattgcttgagtctgggaggcagaggttgtggtaagctgagatttcgccaccgcactccagcctggacagcagrgtgagactccatctcaaaaaaaaaaaaaaaagagactactattaaggaacttcccaggagacctttgaggtcttagaactgcctaagcatgacagcaggaactgtccatctctaaagtccaggtattacccacggcacacatcaccagttccagagtgaaaacattagcctttctgtaggtcaccctttcttgtgcccctcatagtcctacctgtccatcagaactcttgttcatctgtccacgaagcttcccttgagacacacacttgcccccttctgaacacctgttgcccagcagcccctcctctggcttgtttgcctgttatatgtcttgcctgtgaagcgtgtggtccacgttgagtcttccagccacgtgttaagctccagagccaattcagcaaatacttaacaagcaccttctttgtgccagtccttggatgcattgtggggcatgtagcagtgaatgggggtggagggtctgaccaaatagttgcagatataaaagcttgactgcaggccaccatgggtctgcatcaggaatgtgggaaggatgacttcagactgggaggaaggtctccctgcaaaagtgccctttcagctgggacctgaaggaagatgggcagttggcaggggggtggggggtaggggctggaagtgcattaccaccatggctatagcccagacacaggacaggatacctggtaggggcttgcttagggtgtgttagggagagagagaaggaccacctggataggaggctgtccccttcatcccctgtcccctgctcacccagcacctaggctgagccacccatggccggagtcrggaggcacgtgtgcattgagggaatgaaagcaagaagaggcagctctgattgccttgtgaattcagtccccagcgatgctgggatgttttgtgccttcatttcctcccttggtttggataactatgaaaacgggccacgttccaaacctcacattcctgcagtgacagcttctttgagaccacgtagatacctatgattctcgtagttactctggaacacccacttctctctctctaggtagggggaattttcagggtagggtgtggcccccygcttagacctctcctccttttctgctgtcatttatgctttaacagcttgctgcttgcccccgccagccccccagccacctgcctctctcccccgatactgacttaatagagccctcagataagagagactgaaggaggaggccattctctctcaagcactcatgcctggcaattatttgttgttattgccaattcaagataagtagaaaataacagaggaatggaaccaggactcaaagcccatgccaagcccttggctgtgttaccatgacgtttgcttgtgtgtcacatgggaagccacatgtctggccaagcctgrgggggtgtcagctgccctgggagatgagtgaacggggttctggcctggctgctgtgctgccatgaccacttctcatctctgggcctcagttacatcatctgtgaaatggggcagtggtgctagattattctgccatttcacggagagtccaggccatgcacctgtcaggtctkcctgcccacctggtctgtgcrtttgggctgcagcagtgagagtagctgtttactatccctgtgtgcctggaagagacgtctcctaagcgcgggcaccaggagtggccgagcatggagaatacaggtggtgatatcctagaaagtgggccgctaaggcgggaaacacaggctgggagagaggaggggaaagccagcggacgcaggactgtctgggmgtgaggtgagtgatacaaacaatataacagattggtgcttctcasatgtggcccctgggccagcagcagcacaggggaactggtagaaaagcagattcttgggccccaccccagacctgctgaatcaaaaactcagggtggggcccaacagtctgttttaacaagccccccagtgattctgatgcaagctaacatttgagaactaagagactggatgaaaggaggggtggatagatgaggcttggagagccagtattttaaaggtcaaggaggaaatcgagctagtgcttgtcaatcacttgctgtgtctggtcggaaactgggcattcccactacactctttcatttaaacctatcaggatggtggcaaggcctgccttgtcccttgctaaagcagatctcagctgatgcaactgatttcacgccaaagtcacagagatagcggcagaggtgggattagaacctcggcatctctgatctgggagcctgagtatttcccagcacactaggctgcctccccatccacctgcgcctcagctstgctgccaccgcgggccccggctcctcctctgctccacgggtcaccccagaactctgctgtgttgtgctccctctgcagccagccatgccaagggaaaaggggcacaccataaaggcaagtgagggagaccttgggggctgcagcgcagggttgggggtggactgtgaccttgcatctgcttcagcctgaaggtcctggggcagctggggagcaaggtgctggcgtgacgctcctgagagctgatgcagctgccttgcatagtaagaactcatgcatactctgggtgacagtccacataggaagaacttgtgcatactctgggtgacagtccataggcatccattgtgccaagccctgtgctggttgctgtgggagaaactgaggcaaggcaagtgttgtttctagcctcaaggagtttatgatccagagccagaggaacaacaagtaactggggtgagctggagtgcatgggaggccagggcaggtcaaaggagttcaaagagactcgtatggtgattttaggggacaaaaccaaggctttggggacagacctaaggctttggagccagaggggatggctcaattcccaacattctcactgactcactgagcgatgttggatgagttacctcatgtctacaacccgtctccttagctmtaaaatgggttaacaatacctagctcggagtgttccattatagcaagcactcattttccttcccttcggaggatgactttaagccagagcaaaacagggaaggcttcctggaagaggtgacttttcactttggcactgaaggatatctagaatttagtgctttttctgtcttctctaagaaatctgtgggtaggccctagacacatggcgttgtctaagaagaatgaccttcccagcagctataactgtacaaataaaatcatgttgcgaggaagtcactttctccaatttggaaaatttggaaggttatcttttagtttaaaaacacgttgcaaggggcaaagccaggcggccagtgcgcactgccaggaatcgtcacactgaggttctctctatgctgctttttcttgcagatgatgcagtttgcttggcagagctataagcgttatgcaatggggaaaaacgaactccgtccactaacaaaagatggctacgagggtaacatgttcggtgagtcgattcaaaccactttgatattgggagggacccacygccccgccagtggccgagtggaattttacttttggcttttcacctcctgagctgtgggggctccacagttctccagatctggggccttccaagtctgtgtttcctctgggcttttcaggcttctgagtcctcctagatttagggggaatcctatatgcttctctctagccttagagactgctytgtatgaaattatcgtttattttttagagtgaagaaacttggaaatgggagtagggatagtgaaggatggagatttgtttccgtggaggtttggagacctaaaggacacagaggaccaggtttaaatccactcctctggagtgtggctgtgaaatggtcttggatgttttcgtagattgctgaacacatatctgatggggctgggtacatgctatttagagtcggggctgggggccrggcgtggtggccttcacctgtagtaccagtcacttgggaggatgaggtgggaggatcccttgagcctgggagttcaggtccggcctgggcagcatattgagaccccatttcaaaacgacaacagcagcaaaaacaaaagggtatagagtcatggctcacaagctactcggaagccaagtggagcagccgcacatcaggagcgggggcatggggcatggggcctgctactgcctggcaactcgtattttatctgcagccgcacttgctggtgtctttgtcctcctccagccacaggattctcctaacctagagccttgggagtctctctctgtggctcagagggactgcagggtgccttcttgtgggcatgggctcagattccaacagtaacacccatgcaagttgccagcccccttgtctgcagcctggcctccatctcccctgagggacaggagtggtgtggggctggagaggggcagtcccatacctggattcctcaccccttrcagatacaggctcctgaagtcaggaaccraataactgagtctgagatggaaattcccaggaaaatcttcaaggcaaatttacaagggatatccccccatcacccccatcgtgtgcagccctatcagagatgtccatgttatggaaagagtgacaggaatctgccctcctccccttcaccagtcagatcgtcacctgtctgactgttcagacatttcactccccttgtgggaagtggggtgtggactggggcagctttatgtatttatttttctcattatcctaggagtgtatgggggaaaaggaaagtatcaaaaaagtgcaaatcaggcaaaaaaaaaatctgttctgctctgtagatgcagcctccattgacatctttgcttattctcaatcttttcttctttctgctttttyttccttttatataccattttatgtcctttctgctttttttttgacttcatgttatatcgtgtttcccgaagtcatctaaatgttttcataaagaatgttttaacggtgtctgtgattgtatggatatgccataattcatttaactatcttgctaatgttgggtaaagattgtttccatttttttgctattaaaaataatgcaagacttatctttgtgcataaaattttgtcttgggatggatttttagagatgaattcctgagtcaaatgggaggaagagagatgtttcttttacttcaaatatgaattaaagagatgtattgattcccattaggaacctggctgtcttacctgcctagaacacagaacttccccacataacctacatcagccctggggaaagattgctggtgcagatcccatcaaagttgtggagcttttgctgttagtataaacagggacattatcaagaaagcttcctccttctctctaaacacagtttgcaaatattcagggaattggtggtggggtgggaggggctgatgattcctgaaactgcacacagcatgggcgcagctattgcttataccatcacaggaaacacttctgggagggattccattttgtaaaattcctcagggcctgggatttaaatctcaaccctctggcccctttccagtcatcaagcctggtggcgcatgcttgagccgtctggaatggtggaaagaacccggaattagaatcagatgacctgggcgcaagtcctcactctgtcctgagctatgtggccaaatccaaggcacttaacctctcttggtccctgttagttcatcattcatatgggactgctataaggatataaatgagtatgtacgaacaagcaaagggccatgtctacatgagtgatttatgatttctgttgtaataaatgaggttggcagttgtcccagtgagccygtggcaggctctgaggtcccttgggttgtctgtctcaggagtagccttggcagggcccagggagccctgtcatccagtacatgtagcgttcctagcagtgaggcagagccttccctctgcagccagcagatcagccgcagtgggtggctggcacctgggaaagggagatgcatgaggaccaggcactgggtggggaaagccggtcttgattgactccttcactccatatgtaacttgttaggtgccagtgcctggtgctgactgctggggatacagggataaatgggacagcgaaagttctaccaactctgccaagacatgcactggcaacccttcctggagcctcttgggggtctgtctaggtgctctcagagagagggacaagtgggggtgaccacaagtgctgacatggrcagtccttacgggctggaacttccrgcagacctgatttaaattcagactttactacktcctggttgtgtgaccttggacaagtcatttctctccaaggctgagtttttctgtaaattggaactaatgatatactcaaatcctggcctagggactgcctgacaaatagaacctgttcgtaggtagtagctcagattactgtcaccacaaatgggtcataggacacgaaggcttatgggtacacacccaaaggaggagggctgagggkcattcttggagcctgagaggggttctagttggggtgaacccatgaggggcattgaagctagactattcctgaaggtaggagataaactggcctgaatgaagcagcttgtcacccaccttcttttctggactcatgggggctgctgggttgcatcattcctggacatttaatgtsctccctataggctgagccctgcagacatgggacactgggtgcagtcaggtggcaggttgtgcccattctgctgtgctggctgagtagggtatacgaggagaccctgagcagcgccccgcctcctggtgctcggcttggacactggctcttayggcctcgtccctggcctgcagggctggcagggctgtgtgcggggaagggtaatgagttcacacaggtgcctagttttgctgagatttacaggagctgcagcgagggcagtcggatgcccaagcctggtctcctggtgtggcacttcaccaagtgaatccccctcccagtcgcccacttgcccttccttgaatctattcttactttaaggacaagatctctgggtgaggcgtctctgaagccagtttctgtgtcctaagcaagtcagtgtcaaagtggctttctttttacccacatccggctcagcaggccctgtcagaagatgttccccaaaccccagtggccaccaacaacgaggatgcagcccgttcctcgccttgtggctcaggctaaggctgatctctgcctctttttttttttttttttttttttttgagatggagtcttgttctgtcgcccaggctggagtgcagtagtgcgatctcagctcacttcagccgctgcctcccaggttcaagtgattctcctgcctcagcctcctgagtagctgggattagaggcgtgtgccaccacgtccggctaatttttgtattttcagtagagacggggtttcaccatgttggtcaggcttgtctcaaactcctgaccttgtgatcttccctcctcggcttcccaaagtgctgggattacaggcatgagccactgcgcccggcgcatatctgccattttctcctctgctgagaggtggccagacagggcagttattgtctggctgggtggcagaaagagcatgggctttgaatccagacaggcctgggtggaaactctgggttactgcttaggggctgtggagtggggcaggggtcccgcctccagtctgtggtgaggattagagaggagacctgcaaaggcttagccccgtgccaggcacagagcaggcacttgatcggggggtgctattattgccattatgtcacagaggtgaatttgcagcttgaagaatgcatggcagagtcaggggaggcaggggaggaaccagccgtaaagtggctcagtaccctgaggcctggcttcctcgcctgtaaaagggtacagatgttacacctgccgctaggctttgggggaatattaaataagctagctaaagaacatggactcagccgggtgcagtggcttacacccgtagtcccagcactgtgggaggccgaggcgggtggatcacttgaggtcaggagttcgagacaagcctggccaacatggtgaaagcccatttctactaaaaatacaaaaattagctggacgtggtgacatgtgtctataatcccagctgctcgggaggctgaggcaggagaatcgcatgaacccatgaggtggaggttgcaatgagccaagatcgcgccactgccctccagcctgggcaacagagactctgtctcaaaaacaacaacaacaacaattaaaaagaacttggactctggggccagatggtttgcatgtgcatgctgctttgccactgcatgaccttgggcgagtttcttaacttctctgggcctcagttttcccatctataaagtgggaacaataatggtaccgccttcacaagattgttttgagaacaaaatgagttcacacacatgaagtgcttatattcatgcacagcacataggaagcattcatcaagcgtcagctgcgatgaggatgctgcaaaacccttagaacagtgtgtgctgctcccattttgattggggtgggcgtccaagtcccctggacccaggaagccacatgaggacttcagggctttcccagccctgattccccctgttttttcccccagccctcaaatgcccatggcagaaatcttgggtgagccaatcattggtaggctgtgtacctctcacaacttcatttaagcagcttacactggaacttttaacaggaggaggtggggaaggttagggttcacaatcttggaataaatcagcctcctgccaatggccaatgggggtcagctggccagccttgaaagtacttaacagatatccatctttccaataaatctgtgtagtccgtgagaaattcatcctcccttggcagcaggggaaattgtcaaggggcacagagtcctggaatgtcaccccagaagggttctttgatggcgagtccaaccccctcatttagagttgaggaaaccaaggctcagagaggggaaagggcttgcctggtgtgatccagaatgttaactgggggaccgggactggaactctggtgtcctgagtctcagtgcagcgctctttgcgccgcacactctgagatcagctagatcgttcaaggccatgctgtcaaaacagagctctgcccatcatggccaagtcaccactagcaactagaaatcctcagagcattagcagggggaaactgtctcttaggaggtgtatgatttcgggcccaagaacccattccttgcacatacattatgccaggcaccatagctgtattcactctctttctaaaatatatatatttcttaattaattcagacggggtcttgctgtgttgcctgggctgatcttgaactcccatgctcaagtgatcctctcaaagtgctaggattacaggcgggagccactgcgtccagcccatagctgtattccctttgtctgcctcacagcccttataaaatctaaattacccatcttatccccattgcacagatgaggagattgggatttggcaagtttgaggacttgcaaagtcttaatcccagttccgctggacttcaaaacccaagccataaactaccatgctgccatgtctcccagtgaccacatacagtggccgccaagaacacagtggggtaggggaatggtctctgggttggtgtgtgccacgtcctgtacaccactgcccccagtggaaggccagggaaggcatgtgattcgtggtcagggtctgcagcctcccatctctaggcatcatcatttattagacatcagctgagtactcaggggtcgaacagaagactcagatttccctcttttcttccaccataggaacatcttttatgcgtgcctaataacctaaaaacatctacagttcacccttgaacaacacaggggtaagaggcaccaaccccctgcacagttgaaaatctgagtataacttttgacttcccagaaacttaactgcttattagcctactgttgactggaagctttaccaataataaaaagttaatacatattttgtatgttctgtgtattatatactgkattataataacataagctagagaaaattaaatcttattaagaaaataaaggaagagaaaatatattcactgtccattaagtgaaagtggatcattataaaggtcttcatcctcatcattttcctgctgagcaggctgaggaggaggaagtgggggttggtcttctgtctcaggaatggcagaggcagaagaaaatctgcgttggctgggtccagtggtccatgtctgtaatcccagcactttaggaggccaaggtgggcagagcccctgaggtcaggagttcgaaaccagcctggccaacatggtgaaacccgtctctactaaaaatacaaaataattagctagacrtggtgccgcccacctgtagacccagctacttgggaggctgaggcaggagaattgcttgaacctggraggtggagattacagtaagccgagattgccccactgcactccmgcttgggcgacagaatgagactccatctcggaaaaaaagagaaaatttgcgattaggtggacccacgcattacaagttcatgttgatcaaggccaaatgtacttgcaaaacataccattggctgtcagtgtgatggacagagaggagaatggatttgagaactagaccagcctaagtttgaatcctgtctctgccactttgtagtcttgtcactttgggcgagtttcttaacttctctgcacctaatttccccatctgtacaatggggataacaactacttcactcaacagctgtaaggattaaagaaagttgatgggtgtaaaacacctggtgtatagtacctgcccatatacattcataaaatgtaggctgctgtgattattatgtttgtaaaaagtaataatgagaataagtatagtccaaggaaagaaacagtgcctggtgcagagtaggctttcagtacattttgtagaataaataaattgcctagtgcagtctctgagtgccctattttccctcatgtccttcggcctgggtttggctgggtaagggctgggtcttgctgtgttctctattcctctcatcccctgcagctgccttgacctctcgtcacagagtacactccgaatcagcagacagaccctgtaaaaagtagcagttctgcttagtcagcagatctgatgttcaggcmtcttctctgtgcttgtgtggccaaaagtaacatctccctgctctgagccagccccaggatgaccatgaggagccccaaattggattccgcctctgcctcgcaaatccccaatagaactgccagccaaatccccattttgagggatgatttatggccttgggtgagttaagaggcaaaatgaacacagcatgattttcagatcacaggctgggaatgttcagccttggcagagagaaaaatcatctttgccttgtaaacggagcaaatatgatgttgaagagggaataaatccaggccccaagatgtcatttttacaattgctttttggcgtgtgacttagtagtgccttctgcaaactgttcatactctccccctccacacacacacaccagccttggtgggtctttttgtcggggtgagagttactccaccagtgtggctgccttgggaactgcagatgttgccagatagatagtttgtgaaaaccagctgcttccctagtacgtggatctccacgtatgtttctgggaggtagcagctttgacttcagagatatgcctgggtttaaatcccatccctagcacttaccagctgagtgaaattgggcaagtcacaaacttctctgaacctcagtctactcacctgtgaaatggggggttagcacatagtaagccttcaccaaacattacattttttttcttccctgcaggtatacacacccttcccggtgtatacatttgacttatctggctgaaaataccataactacttgatgagttttggtttttggaggtttttttctggagaaaaaaaatccatagctcctggaaactcagtgttgggctatgttgctcactgattctggcaggccgcggtgcacattcctgacccaggctttgagtttgttttgagaaaaagctgtcatcagctttgtaagtggtgatgttgcaattccttggatagaatgggtcaggcttaagggcagcaagcaaaccttcctggtagtcacatgctttgagagccctgaaagcgccatccggaggccagaggatataaaagtcggaggaaatggcttaggagcactggtcactgatagccaggcccttagcccaaggaagataagagaacctgctgttagacagatgctacggccccatggtggtctccttgtggccttgagtgacatgtgcacaattcctcggccaccttctgatgatcagaacattcctggggcccaaggggtgatcatcagagcaaagcacgcctcgaaattagcttgctgcagtgtcgtgcactcacaccgccgaccgaccactcaccgstccacactctgcgctttccttcttcaaagagtttttgccaagcagtttctaattaagatgcatcttggccattttcttgttctttaaaaggctttccactagcacagagcataatttatttctctagaaaatatagtagcaagttgttgtcaaaagaaaattggaggttaggagccttgggttcgtgtccccgctctggcgccagcagccgagtgagccggcctcctctgggcctcgtctcttcatcagtacaaaggggtttgctttgtctctgcccagggttctgtgactgctggttggttactaggttgatttctttctgtctttctttctttttcatttcgaagggggtattgggctggtcttcttggaatctgagatttcagcaacaagtcttgttcctgtcaggagaggagtgagtcagggtgtctattcccagagcaagttgctggggatgtaggagatgattcatattgaaattgacattctctcctggtggcagcgtgttccgcccactttgcgaagacctttccttccttagaaacaaggctgagcctacagcaagagcctccttttcttctcaccgcattgatggcagcacttgccaagtttcccagcaaaccctgtgacaaataggtatgtgcattcccagaatctcagactaccaggccacttggatcctttgtagcctgtggtccagtgtctgaggaccgggaggcaggtcctgagagggccgggactacctgaggtcagacagccaggatcgaaccctggtcttctaacttgagcctctattttttttttgttttaaaattactttttaaaaattggggtataacttataacatgtctacattaaawtgcacaaatcttaagtgcacagtctaatggattttacatatagttacctctgtgtaactgccatgcaggtcaagattaaaagcatttccatcaccctaaaaggttctctyaggtccctcctagtctgtagctccccaagggtagctgctgttctttttttacttttcttttccttctttttttaaatatagacagggtctagctctgttgtccagactggagtgcagtggtgtgaccatagctcactgcagcctctaactcctgggctcaaacaatcctcccacctcagcctctgggtagctaggactacaagcacgggacaccacgcctggctaattttttaaattttttgtagagatgaggtcttgctatgttacccagrctggtctcaaactcctggcctcaaggggtcctcctgcctcagcctcccacagtgttgggattacaggcgtgagccaccatgcctgactgagtggccactattctgacttctatcaccatagattagttttgtctgctttaaaattctgtattatactgcatgtactcttttatggcgtgcttttttccttgttattgtatcatgaacactagtttgtttttcctgtttttctttccgttctgttcctggacatttttattttcaggatttggttgtatcatatcagaaagaaacctgtactcaatggcagttactcctcatttctcatcctctttccccccttccccagccctaggcaaccactaatctactttctgtctctgtatagatttgcctgttctgaacacttcatataaatgctatcatactgtatctggtcttttgttactgacttctttcactaagcataaggtttcaaggttcatccacattgtagcatgtattatcagtacttcattcctagtgttatttggaattgcctaggaatattcctttgtatggatatcccacattttatttgtccattcagcagctgatagacgtttggattgtttctacgtttgtttgctgttatgaataatgctgatacgaacattcatgtataagcttttgtgtagacataggtttccatttctcttgggtacatgcctaggcatggaattgctggctcttttggtagctctacatgtaactttttgaggaactgccagactgttctatagcggctgcaccattttaaattcccaccaggggtgtttaagagttacgaacacttcagtgcatgttttttggtggaaatgaggagtcgtttatgttggaatacacctaggatttgaattgctgggtcatactgtattggtatgttaagttttagttggaggctgccagatttccaaagtagttaaccaattcgtagttctgccagctgtgtgtgagaattctagttgccccattatccttgccagtgcttgctattgtcagtatgtttaactttcgcctcctgctgaatgctgcctctctcatcatcaaaccccacaatgttcaaagccccagcttcctggcccagagctcccctgcactgcctgctaagcgctggtctagagatggtccctgctcttcctgccttcacttacgggtgatttggggctcccacaccagctgcctcaagtgcttcttgcagcagcaggagcaatcagtgaagtcttccttcatcctcttctcttcacactccctggtgccatggggtggcctctgtttcccattccactgcagctctggtgtgacaggcttaaggttctattgaagtagagcttctccagtttggtaccaggataggggtattaatggagaaagtgttgacctaggagtcaggaggcttgggttcttcaaaccctggccccaccactaactcactgggcagggatcacgtttcctttcttagcctcagttttctgtcctgtagaatggggatgataatgccctcttacaggattggtgttgggatctcatgagaccgttccttcatgcrggtggttgttcagtgcctgccatgcgctacagactgtttaggcataagacaagtagcagggagcaagacagacgctctgtgaccctccccggccagtgaggagacagacgcatgaatcatacttccagtgaagaccgtccgtgcgagtgctgtgaggtacaggcttacaccaagggctcctcaactcattcttggaggggtgagcttcaaaaaagcttactggggccgggtgcagtggttcatgcctgtaatcccagcactttgggaggtggagacaggcagatcacaaggtcaggagtttgagaccagcctggccagcatggtaaaaccccgtctctactaaaaatacaaaattagctgggcatggtggcatgcatctgtaaccccagctacttgggaggctaggcaggagaattgcttgaaccctggaggcggaagttgcagtgagtggagatcgcgccactgcactccagcctgggagacagagcaagactctgtcttggaaaaaaaaaaaaaaagcttcttgggaaggctgacctccatactgagactggaagcatgaatgaagaagcatgaaaggctgggcgcagtgcctcacgcctataatcccagcactttgggaggccaaggcaggcagatcacctgaggttaggagttcgagaccagcctgaccaacatggagaaaccccatctctaatacaaagttagttgagcttggtggtacatgcctgtaatctcagctactcaggaggctgaggcaggagaatcgcttgaaccggagaggtcgagattgcggtgagctgagattgcgccattgcactccagcctgggcaacaagagcgaaactccatcttaaattaaaaaaaaaaraaraagaagaagaagaagaagcatgagagagggattatggcacagaaacacatgggcaaagtcctagatgggagatgtggcaagacctcggccccttggggtctaaaaratgttcagtgtggctgtactgggtgggggccatggtaagagaccatctgtgagtggtgctggcatataaatggggtcataaatgcagctcctggtatttcctccccactctaggtcccaagagccaggatacctgccttctaattgcttttcagccgtcagtcgactctgccacccagatgaggcctgatccccatcacagagcgtgggcgtctggcatatggtctcttgagttacttctaggtcctaaaatagcaggtgattgggccactactgggtgtgtttcatcctggctgatgacagcctggtgcagccaggcagacagcagggtcagccctggagacagaggtgcttcatgggtcacagtggccccatgccggccccacagccagtggagactgagccatggccacctctctggaaggtgggagccagggcttcacttcccgctgccactcggggcctctgaggcaggcagatctgtttccaagctccacagacagctgttctcccaagcataaacggtcagcatgagaactatgcagggatcaataggaattgttgaaaaattctgaaaagagagcccggaggaagacaaagagccccggaagtatgttgtcagcacaatttggtgctaatactcaastttgtttttcttttcatcaaagtctgaaaggcagttggaaatccactgcccttgtttttttgttgttgtttttgtttttaatgactggataaagcacaattgcattttctcccccaataactttgaattctgggaatagaccatgtagggataactgctgctgtctaatccctccaatggctgcgcaaatatttaggacccggaggagaggagtcaccctggctccctgccttccttctagcacgcagggcatggctcccagataatgctcctcttgaaatagcacttgcccagaaatgcatctggagattgttttgcaacaagaaactgacagtgcttggggacatggagaatttatttgartaatttcttcagtttctgcaagtttgtcctgaggaccttctctctaccaggctgggagctgggagcagagttgggcagaggatgtgaaaatgagcagaacacagtgggctcctcggagagaagacacaggccatccccckgtgctaccagacatgatgccggcctaaggaacacatctatgagaaagcgggcatttaagaagagaggcttgtcatactcctcgaactctttaagtgtcttcataaagttccccacagttcagtgccagggaatcacacagatactakaatttgaatggaggctgggaggaggtaggctggggtggtagattttgacagacatcagtaaatttctctgtgacaggtcgggggacaggccaggccaagcgtaggaggccctgctgggcagtgttggtgctgcakatggggttggggtgggaggcggggaatgcaggcttggaaggaagaggcctcttggggcattcggcaccagccaggcaccccccagatggctgtctgcacagggctgacttckccattaggcttggcgcctagggcccacaaaaatgttttcattttaatttcttttaaaatccgaggagaaaaagcgaacatgataatgaagccagcctggattatatccatctttatgccaatgcagttgtcaaggatcattttaatattcgtttatggaggaaggggcggcaaaggcaccattgccgggaccagaggagtcattgtgcagccctgcccttggtccttggcttcctccccagcccaggggcctgaaagcctgcacctgctcaggcaccatgggaagggtccctttgcattgttgtcacaaaagctggcaaataaacccactgagaactcgagttctagtgctgggcaggaagggcatagccatgggtgcccaccggctagtgcagaccccttcctgtgagtttcatgtgttgcttacagtaactctgaagtgggtgtcattctgatgaggaaactgaggctgaaagggaggtgacttgctcaggcctgcacacctggcaaagaggtgtgcagcaggtcacagccaggcttgtctgcctccaacgcccacattccctgtttcctctgcctcagggactgggaactgcccaacaggcaggacctcctattcaacttaccttgtgcagcaacacatggtattggcccaggtggcactttttggggtatttggagatgataaacagcaaaacagggtctgtgtgtgtgccattgattcaaagggcgtgcgatgtgcctctgttgaccctattcatcttcacccttgtgtccctcctcccttgttaggctttaaaaataaagccatgatttggagcagtggctcacgcctgcaatcccggcactttgggaggcccaggcgggtggatcacttgaggtcaggagttcaagaccagcctggccaacatggagaaaccttaactctgctaaaaatacaaaaatcagccgggcgtggtggtgcacacctgtaatcccagctactttggaggctgaggcaggagaatcgcttgaacctgagaggcagaggttgcagtgagcctagatctcaccgckgcactccagcctgggtgacagagctagatgctgtctcaaaaaataaataagtaaataaaagtaaagccaaattagttagttacatcccccaaaccaagaaggataaaatcccaaacacccgagaggaggctaatgcatgacgatcgccggcctaagaggatgtccccgtggggctgcttagaaagaacttgagcacccagatggaccagggcaagccgcttctcattcttagccagagctgacagcagggcccacatcgccyctggcagtgtggcttcatccgaagggccttgaattcccaggacatgaaactcgcccagatccagatgtaagtacaaaagtgggtcccacagtcagtggagaggcacgctccctgggctctcccaggctctgagggtcggggctgcagctcttccttctcctccaaggagcaaagccaggcagctcctcagggcccatccccccaaaacataccagagtctacagctcaactcactgaaatggggaggaagcaaaaccctggagggaggatcccagggatttgaagcagttaaacagaagcacaggctttggcaccagggggcctggttcaccattttctggctgtgtgacctggggcaagtgaattcacctttctgtgcctcaatttcttctggaaaaataggaattatagtacctacctcatagggtagttgtgaaaatccaattagttaatacactgtgaagggcttaaagtagtaccaataaatagcagtggctgtcatcatgattaccattatctttaccattagtattgtcaaagctgcccagggaagcaggagagttgggtggcatctttgcgtgccagtgactgcctatgtagcgttggacaaatcactttcctcacccttccctgggactcagactctgtgaattgaacagtttggatgaatttgtgctgctcttcgccaggaggaagcatcagaattgcctgcagggcttttgcaaatgtagacttccatgttccgtctccagaaattctggttcattgggtctggagctggcccagggatctgcattaaaaatagcatctctgttgatggttctgatgcacaacccaggttgggagccacagttaaccgggttaggatcctgaagtgattggtccccttccctcactcccattagctcaggtggtgttttagcaaaggggaagctcctgccctctctgtgggtgctgaggctgttgcctgggtgggggtcccactttactaggtgtggcaggtcaccagttccacaggaagcagtggtggctggagaacagccctgaggcgtgagtggagccggcacatctaggagttttcattcagctgatgtttggtgaaagtgggatctrtaggctgggcgcggtggctcacacctgtaatcccagcattttgggaggccaaggcaggcagatcacctgaggtcgggagttcgagaccagcctgaccaacatggagaaaccccatctctactaaaaatacaaaattagccaggtgtggtggtgcatgtccgtaatcccagctactcaggaggctgaggcaagagaattgcttgaacttaggaagtggaggttgcagtgagccgagatcgtgccattgcactccagcctgggcaacaagagcgaaactctgtctaaaaaaaaagaaatgaaagtgggatctgcagatgggaggagaacaactgtgaaaatgaggtgtcctctggccatgtgatgcctgggggctaatcctaccttcaaggtatcacaggagattctcctcactgcttctgaagtgtgattgaaaggggctgaggtgtggatggatgtcagccctgctttccttcatggccacccagaagcttttggatgctttgggtaggacaaacctccaaggagctttygggtcacaaagggcccaccttcttgggcactggcgggatctgtctgcccagttcctggttgcccaagcccatcccatcatccagcctgcccacagacrcccctgccacatgcttctggctgcctgtcccttcatcccggctcctgtctctcctcgtctccctgatcaatagcaaccagccaggaaagcagtcccrcagtgtttcaggcccactcctttaatctctcccgaggctgagaacagcctctttctagccacccagcccctttattaaacttccttcctgcccccagtcctgctgctgcctttgtgaggtaagttggacttgtgtttctgtctttggagaacagctctgcaatagaaatggcttcctgaaggcaggagctgcctctgagctgcctccaagccagcctggggcstgcagtacagatgctgggaatgggcggccgacagaaccaagccatatcctatccttagacccaatcccagacagcaggaccatgtggctcccaatgtggagataagagggaagcagtagcgacayctgggcatcacttggcagcgtggctttggctgctcagcacgtgcttgctagakaatccctgatggctgttatggcttacacatttaaccacttccctttggtacatgtgtagaggtgctgggtaagcatcttgtcaactttaacacagctgacaaagttatgacaccaagaatgcttagactttgcagttttccccgaactccggctgatcctgttaaaatgtctctccttmcagagagctgatttgtgcccccaaattttctcatctcagcaggcagggtctctttgccagaaaaaagaaaaatctgttgtcatccagatactctgatttagcattatctgagaggaaggcatgtttcctatctggtttgttgctgattttccagttggtttccgtgggacggagccatggagaaggatgcaggaggatagctggagacacttgcatttttaagctcctctcctccaatgcaaagccttaaaatgcgtgggattttccctcttgttaaggctgcagtcttcatgcctcttctcagttggagagtgataaagtttgaacaaatccctttatttatgttggaagtatctgagtgtgaaaatccttttctgcccttaaaattactcgatccgtttttttctcttttttaaatgatcagtttaatacatgcccattatagtgaaattagaaattacaaacaagaaccagaaggaaaagttgctgaagttccactaccgtgtatccctgcagatgcgttcccatacagatgaacagatataaatctgtattttgaaaaaaaggaagaaaggaaagagaagatatgtatttctgcatacacagaatcatttgataaatgccgtcttgtgacctgcagtttcacttttcagtattttgggatcttctgaagctgtcagatggtraacacctgaagtgtcatagtcgatggctgtccagtattctatcacatggatggactgttgttatatagtctattatattgcatttactggacatttaggttatttctgattttgggccaatctaagcactggtgagatgagtgtcttaatttggktcactaatctttacacatttgccttagtgttgtcttaggataagtttttagaacaggactagctaacattttcaagcatttaccacgtgccactctgctaagggctttaagtatattatcagtcaggcatggtggctcacgcctgtaataccaacactttaggaggccaaggcaggaggatcatttgaggccaggagacctggaaagtctacgacttagggagaccctgtctctacaagaaatttaaaaattggctgggtatggtggcacatgccagtagtcctaggtattcaagaggctaaggtggaaggatcacttgagcccaggagtttgaggctgcagtgaactatgattgcatcactgcactccagcctcggtgacagagcaagaccctatgtcagataaataaataaataaataatctattgaatcttacacatgattctatacagaaatatccacattttacagataaggaaactgagtcatggagaggttgggtaccttgtttggggtcacacagctggcaaactgcagagccagtattggaacccaagctctctgaccccagaagcttctgatgcaaaaggttaggtctgtttagccttgctgcatggtataaggatgcctgtcccttgcttcctctcttccagctctttaccctgtggtctcctggagtcctctcacacccacacttgcataacaggaacagggaaggaagaatcggcagtgtttgtgccatgcctgaaggatcacaaagcattgtcccacatgacccagatgtgcatctagcaccccttcctggattctcagtccctgggaggtaccttctagggaaccatccagagacgggaacatgtggccactggagacctgccttaggggagttgtgggcgtgttggtcggggctcagccaagttgtgctgggagagtctgtgctctccctagaccaggttctttacagagactggactctggcgggggggaatccttgcaggccattctagggagagttggacatgcgcagggcagcctgggagtctgagtcctcagcagagagtgttctgggaaaagaagaatgctgagtgagatacaatgctagacaggggatgtgggtgatttacttggtgagaatgcccctagactgggcaaatctaaggccagggccctgaagcgggccacctgttttgcacagactactcacctgcaagcacttaagacaggcttgtggcccagaggtaagagcagagccctcctctcatgaccctactaggcctggctgtttgtcagtggctctgtcctttggggataatcagagttccagctgcctgtgccatggggaacagggtgtggctggttccagtacacaggcagaatagggcataccatctccaagcagcaggggctgtaggattcccaccttagttgccttgcagggaatgtcttggtccagcagaagagacagaatggggagggcttgccctccacttggcccagttatctcttcccgatttatccatagattgagcttgatgatccagactcatattcattcaactaatcacatgagttatttctgcaatttgggtcttcaaataagtacacttggttgctgaatatgtgatcagccacagatttcttattctttaaaactcagggagcggaaatgccaacgtataaagccatcagcacgaggcagagatttccaaagcactaaaatcacaccattcaaagtgctggcccctggacttaccgtcaagctgccacttggcccatcagtgctctgtgcagagcccaggtaggggggctttatctgtaaaacccagggaggaaggcaatcaatacgtaatcttttcacattctttttacttaacaagagaattggtttgcctctgaagtaacttgatctggaggagaaaatgcatttgagggcttttaaagggtgcagaccaactgggaaaggctacttcaggccttgaggttgggaaggtcagcttctgttctgctctgagctttgctgtaaccttgaacaacttcgcctcttcctccttatcatcagggtccctggtacaatgaaccagccactggacaggacttaccattcattcatttgttcattcagtgagccactgttgaaccgctacagaaatccaagtagtggattaggccctggagatttcagagataaacccgacctggatctgcatttacattgcttgtaattgtcaaatggaagacagctgcaaacagttaagatgcaggcgtgggaaacaaatattgggagtagaaaggaagggcctgtagcctctgtttagtcactctatgaggaactgcctggggcaaggattgtggcttctgttcctatctgggggaggctgggatggacccccaggatggaccctgtcagaagtcatgaactggctgtaggagagcagctgtttgctccttttgttcccrgaaaggggtcccaatccagatcccatgagaaagttcattggaccttacacaagaaagaatttggggcgagtccataaagtgaaagtaagtttattgagaaagtaaaggaataaagaatggctactccataggcagaacagcagcctgggctgcttgactgaatatacttacagttatttcktgaccatatgctaaacaagggatggattattcatgagttttccagggaaggggtgggcaattccctgaactgagggttcctcccttttttagaccatatatggtaacttcctgatgttgccatggcatttataaatagtcatggcgctggtgggagtgccttttagcatgctaatatattataattagtgcctaatgagcaatgaggacaatgggaggtcactttcatcaccatcttggtttttgtgggctttggccagcttctttaccatagcctgttttatcagcaaggtctttgtgacctgtatcttcagctacccccgcccatctcatcctgtgactaagaatgcctaacctcctgggaatgcagcccagtaggtctcagcttcattttacccagtccctattcaagatggagttgcagccaggcacagtggctcatgcctgtaatcccagcactttgggaggccraggcaggcggatcacctgaggtcaggagtttgagaccagcctgggcaacgtggagaaatcctgtctctactgaaaatacaaaaattagttgggcagttgctgcgctcctgtaatcccagctacttgggagactgaggcaggagaatcacttgaacctgggaggtggaggttgcagtgagctgagattgcaccactgcactccagcctgggcaacaagagcgaaacgctgtcaaaagaagaaaaaaaaaagccactggcttggaaagtatctgagaaagtccctggtaaatttcattccactccaactggggtcttggcacttgcattttcctgagcccagccccagggaccgcaggaatccatacatctgcagggatgagacacagccgatgcccaccgccatgcagaagcctaacacctactaggctgaaagtcaccccagggcactaagccagggagggttgaagggggtggaagatcatcagggagagagtaggttttcctatttgagaagtgaaaggcggtatagacggctgtcctccatgccttggattgtaggtggcatttactgctcaaggagaagggacactcagagacctgatgcagaacacggaggaggcagtaagaccggctaagctaggtgagtttaggaaagtccagcagggccacctacttattttgcagtcataaaaacagcagctccaggccctcaatgctggcatgtagtaggtactcaataaatgtctgcagaagcaatgaatgagtcctgtcaaaagtaacagtactgaatcaaaccagtgttctgggaggcaggcacgcagatgtttcttgtccaccytaactctccagctccaaagcccatgctcttacccagggctctgtgagccctattcagttgtgttaatcagatgtggctgcattgcctccccgccgtcttggttacagtaaatgtcctttaagttgcaagggcctggggtggcaggggtagaggaatgcatgaagattcctcaccaatgcctgatactgtcagtcttcgtaacgttagcctttctagcagaaggaaactctatctatctatctatctatctatatttatttattttatttttttgagatggagtctcactcttgtcgcccagactggagtgcagtggcatagtctcggctcactgcaacttctgcctcccgggttcaagcgattctcctgcctcagcctcccgagtagctaggattacaggcgcccgcaaccacgcccagctaatttttgtatttttagtagagacagggtttcactgtgttggccaggctggtctcgaactcctgacctcaggcgatctgcctgccttggcctcccaaagtgctgggattacaggcatgagccactgagcccagctggaaacactatattcttgttgagcccctggaagtttatttatatactcattctgcatttttgttcaatccatactctgctaagcactggagaaaacagaggtgagtaatcattgctgttctcccactggcatgggtcagacagctggggtgggaatcctgctctgccacttcctagatttattgaccttgggtaaattaatctcactgagcctctgtttccacatctgtaagatggggttggtacctcaaacaagtgttgagaagatgaactgcaatgtcatatgtaaaagcctggcctgcccaggcattcagtaaatgttcactgtgcttgttgttgttcattcatcttgcctgctggctgacaaatggtaacaggcaccaaaggtttaagaaagctgtgtcagaacagaccttaataataatagttgctaacatttattgaacatgtactgtgtgccaagtgctattctaagtaccttttatagattactattaatattaaaaatcctattgatttctgtaattttttacagagtggggaaaggctactatggtttgattttcatggaaacacttggttgtaaattgcggggacccagtggctttctggaagcatgattctagaacctcagaggtagcaggataggaaatagcgagatagactttcccttgtcgtggctgctcagtgaccttcaagtacctgctgctgccctttgttcagaacctgaaggctgatgacttagtaaagatgaaaacaatgaattcttaaagaaaggtcaaggttgagtatagttgatgggaccctgggtgagtggtttcttacttggactcttgcgttggcagctgtggtcttagggaaggtctctcccctctctaggcctcggggtcctcacttgtttggaaggctgaactcattgtatcaactaacggttgctgtgtaacaaaccaccctgaaacttaatggcttaaacaaagaccatttattatttcttgagtctgtgggtcttagctaggccaggattggtctaggatggctttggttagatgactcagctctgttccatgtggacctggacttctctcatggcagagatagggtccaaaagaacagacagaagcacacagtctcttaagacctaggctcagaactggcacacagtcacttcctctgcatcctgttggtcagagtaagttaattggccagcctggacmcaaggagtgaagagagagactccatctcttgatgggaacaaccgctaagtctcatggccaaagtcagggctacagggagaagtaggacaccaggaacatttttgccttctatcacaccagactccttcccactcagacatctctaaagtcaaatcgctcatggatgggtcagtgtgggagaaagaagttgaattctcatctcctcaggccaaagctggacatgcctttcctgggtttgagataaatggaccagatacctggtccctgttggtgctgagctcagctccgtttgatcaaaaggacagaactaaaggacatatttttattgaagcactcattctgcatgtattgagcaccactgtgtgccaggccctgctccctgcggccccgcccctcctccctgcggccccgcccctcccctgcgtgctgcaagcctgccccgggccccacttcctcccctcctccgtgggtgcgcagcccaggccactgcttgtcttggtgggaggaagtgatcagtctttgcaagccgtgctgtcctgtgtgtgaaagaggatactttctttattttactaaaagattcctttcattcagatcatgagacagaattgggaaatttaaaaatttggtctttaagaagagatgtgtaaacagctttcaggaatgtttgtttaaatggactcacagtgagtgtgtcagggagcgccatccctctgcccaggccctgctcatcctgatgcagaccacagaggaggcgacaagaccagctaagctgggtgagtttaggaaagtccagcagggccacctacttattttgcagtcataacaacagcagctccaggccctcaatgttggcatatagtaggtgctaaataaatgtctgcagaagtaatgaatgaatcttgtggaaagtaacagtactggatcaaaccagcgttctgctatgctcggccggcgtcttggcaggggagctcttttgtctggctccccacgtctaacctccagttatagaagacatttttgggtggtttgcacatactaacgtgcccgttaggcaccttgttgatttcacttgctgtaaagcccctggggaagcccctgggtgggctgctctcagggagggtctggagaggagatgggccacttatggagctttccacagcagccccagcctagcagaagaagtgagtgagcacataggctcatgctggtaatctggggcggcttcctgggagaaggggccttggcctgttgggagggtttgtaaaggtggcagaaaggtgagctatcctgatggttctagcatgtttagaggtctttgtgaaactgcttacctgtcttgagtcccttctccttgagcagtaaatgccacctacaatccaaggcatggaggacagccattcaaaccgcctttcacttctcgaataggaaaacctactctctccctgatgatcttccacccscttcaaccctccctggcttagtgccctggggtgactttcagcctagtaggtcttaggctcctgcatggcggtgggcatcggctgtgtctcatccctgcagatctgtggattcccacggtccctggggctgggctcaggaaaatgcaagtgccaagaccccagctggaatggaatgaaatttaccagggactttctcagatactttccaagccagtggccttttgatattgacttgggattaaactccccactgcctcagatactaggatcatctatgcagttgtccaatattttatattttagaaatactttgatatgaatcttcttgcataatccttctaaccttacccctttgaggctggccagagttaggaactagtcttcccattttcccattacagatggggaaactgaggtcattacagatgaggtaaataacttgcctggggtcacacaggcctcctgcctgcctctcagtccagtgctctttctactatatgtcatgtcctctcataatgaggtgggggtggggaacaaggagatggagggatgtgttgggtgcttttgtgttaccacattgcaccctcatcacagtcaggtgagatggtgccatacccactttatagatgaggaaacagacccaggtaagctgagtgatttgcccagcataagcataccaaatggcaaagcaaaattcatacgcaggttttgagtctccacagcagcaggcagagacctactttctagaaagagtttattagggtccagtctagtgggtgaaacagataagcaggacacgacagtgcacaatctaggcacwggctcttgaaagcagctctctggaggctggaactattttgctagaggtgtttggatgctgctgtctaacccgagacatggagtttatataggactgttgggccctaagcyttcctgattcatatgaggtctgaaaagaggcccatggatgtgcctcatctccggcctctgttcagactagggtacacagacacataaatcgttataatgcagcctgcacaggtgatcagagggccatggagaaggcattccttgggctcagtttaacacagcaccagagtttggacttcgctgggcccagtgtctgctctttgctgccgggaaccaaggctccaggttcctcatgcacttgcaagtgactggagcttccgagggagttaaatcaaccttcgtgtttcctgtagcccctcctcaaatagacacaccagctggcatttttccttaaataccactcatttttaaaaggggaaaaaaatgttggtggckttgaaatagatcacactttaaaatgcagcgtagcagagagtcagttcaaattattctcttaatagagttcttcagagtgaggaagtgatgagggaacataatcacttcttttgtcatatgggcgaaatctgaggactgcgattcatttgtctgcaaatgtgtctcttcggtacaaattgcagcaagcaatccattcccagggtaaatggtctttaattaaagtcagtcagttgtcttggatggttaggggaggagaggggtttgaagcacaaactaatacacacttttatcccttcaaaaataaaaaagaatatatttctaagtgacattgactccttgatttgataattagggaaaagctttgtttataagtaaaactattctggctcttattcatgaataaaaatgtttgcagtaaggcctctgagaagcagtagaagaatttctktaccaaccctggtaaaaatgcatcctcaagcattgatttttgtagctgaagtgcattatgtgttctgcatgagcttttgaaagcttagataaatgaggtggctcagaaagcagataaaaaaaatgggaggaaattataccgatccaaaagaagataaatgtccactaattctcagattaacattttagactcctgtgtttttataggggaatttttgcaatgctgataatgtgagattggtttacaatgtcacataccaggtagaatcaatgaagctttgttcgagctctcagagtcagctacactctaaaggaagtggagttaatgccacaagctggtggtaccctggctcccacctgtattaagtgctagcactacacctaagatgacatattttaagggtgacattgaccctcaaggtcaactatgttagtctgcactctccagtttgcaagatgcaaaaaaactcaagcccatttaagttcaatttactagatcacttgattgaaagtcactaggattagacttcaggcacagcttgatccacgtctcaaatgaagacggacactctgtttatttctcttccctgtggcctgttttcactgtcttcattctcaggttgttcttccttgatgtgaacaagctggtacaacaactttagcctgcccaacctgtgtctggtgcagaagagctagtgccactctgtttcagtttaagcccaaaattagtgctggtgagctttaattgggcccatggctctgcctatccctaactcatcctcatgtccagagggatgaaagggctggactgaccaaggcctaggtcacatgatcattcccattgctggggtcaaggcagttctacctcaagcagaacatggactaggagttgggaaggaggggaggtgtagaaggtgattcagggacccgtcaactagagaaagtataggtggatgctgggctgtgaaaccctagatttctgccacatcagcctttcactccttctctcaacgaatacctaagcactcacaacagactttgtggacctaggtgtgaaagttactgtggtgaacagaaaggtccaggctctgccctcagagagcatctagctggtcttgtgccagggcttgaaccatgccatggtctttcagctgactagatgtctttactgagcacctactatgtgccaagccctggaaacagaaagatgaggaaagccagggcctctcccttgagcagtatagagcagaagaacgatggtggtttcaggagagcctgaggcactaaggatgctagcacttcacatctttctctgctactgttcattttatctggtaggattggattctgttggaactcaggaaacccaaaatagcaagccttaaccaaatagtttatttctttttcatttacaggtccaggtagttagtctaggactggagtagcgaccccaccatcgtcagggacttaggttccactgtttaccctcagtactggcttccaccttacggtccaaaattgctgctgtggctccagtcatcgtgtccacattccagccagcaggaagggaaaaagaggaagagtagagaatgtcacttccctttaaacatatttttccagaagtcacatgcagcacttcaactgaatcccattggccagaactcagtcatatgcctacacgtagctggaagggaggctrggaaatgtagtttttattcccatggccatgtgctcagctaaaattgttgcttctgtttctatggaaattgaaggagaatggatattaggggcaactagcagacttggccatactcagatctgcctgacaggtccctgctctttcttctgtgtgtctctcaaatttagttttgttctttttgagacagggtctcactctgtcacccaggttggagtacagtggcatgatctcggctcactgcaacctccacctcccaggcttaagccatcctcccacctcagccttctgagcagctgggaccacaggcacaacctggctaattgtttttgtgtttttagtagacacaggattctgccgtgttgcccaagctgttctcgaattcctaagcttgagcaatccgcccaccttggcctcccaaacaggcataagccactgtgcccggccctcaaattcagttttaaagaccaggcttacagactgccttcctttatggagcctcctgggttttaatcccaattggaatcaatagctttaccctttctaaatttttaaatccactgtattaaagtttaatttaatgcaataaaatgtatttcaacaccactaaaatcaaggtactgaacatttttatatctaaaagtttcctcaggcccctttgccattcatccttcctcagcttctggcctaggcaatcaccaatctgctgtcactctaaattagcctgagccttctagagttccttagaatcacacagtgtgtattcttgtgtctggttccttcactcatcaggtttttggggttcctccatggtgttttgtctgtccatagttgctcctgtgtattgtcgagtagtattccgtcatatggatatgctatggtttattttttccatttggcaattgatttgtttccagtttgaggctattaaaaataatgccgctttgaacattcacaagcagttttcatgtggatgtatgtgttcatttttcttaggtatatacccaaaagtggaattgttgggtcatatgttaaatttattaactttgtaagaatttgctggttgggcacagtggctcacacctgtaatcccagcactttgggaggctgaggtgggtggatcacttgagcccagcagttcaagagcagcttggtcaacatggcgaaaccctgtctttacaaaaaaaagaaaaaattatatatatatagctgggcatggtggtgcatgcctgtagccccagctactcagtaagctgaggcaggaggattacctgagcccagggaggtcaaggctgctgtgatctgtgatcatactactgcggtccaacctaggcaacagagtgagaccctgtttcaaaaacagagaatttgccaaattgtctttttcaaagcagatgtaccattttcctttttttttttttttttgagatggagtttctctcttgttgcccaggctggagtgcagtggcgcratctcggctcactgcagcctccgcctcccgggttcaagcgattctcctcctgagtagctgggattacaggcatgtgccaccaccctggctagttttgtatttttagtagagatggggtttctccatgttggtcaggctrgtcttgaactcccaacctcaggtgatctgcccaccttggcctcccaaagtgctgggattacaggcatgagccaccatgctcggccccattttccgttcttaccagcagtgtgtgagagttctagttgttccatttcctcaccaacacttggtaaaatcagtctttttctttttaaggctgttctagtagatgtgtgttgatatcacactatagctttatttacacacacacacacacacacacacacacacatagccattcccccattctttccattatagttacatcaaaatattggttgttcggggtgtaacttcctatggctgtgtacacactcttcatggctgattctcatatagtatgatttccttccctttcctaagtaactgtttgttttctgtagagttaataatcgtcgtgtttgtttgatgcttagtttgtcacatgtttatcacttcttaactccatggtccccactacctgtgtaaacctcctcacagtgtgtcccagcgcattaggtggtacgtcagcttcatcctcttgaagacgtctctcctggaggcttctgacctgtcttgttctggacagttgactctctgcctgctgcacagctgctgtccctgggatatttttacctctctcttattcattttgtttttaaataattttgttgacacataatttacattgccataaaaggttgccaattgtaatgtactattcagtaggtttcagtatatttacagcattgtataaacatcatcagaatgtttccatcacctaaaaagaaactttgtgcccatcacagtcgcttcccatttccactgccatccccaggcagccagtaatcctccctcagtctctatatatttgccttttttggatgtttcataaaaatggaagcaaaaacctgtggtcttttgtatctgacttctttcactgagcataagttttttaaggttcatccacattgtagcatgcatcartatttcatttctttacattgatgaataattcattataaatctaccacatcttatttattcatttatcagttgatggacatttgggttgtttccactttttggctactatgaataatgctgctatgaacattgtgtacagacttttctatgaacatatgtttttatttctcttgggacctctacattgaattttctgaagaactgccaaattgttttctaaagaggctgcaccattttacattcctatcagtaatatatgaggtttccattttctctatatctttccaatgcttattattattattattattattattattattattattgagacggagttttgctcttgtcgcccaggctggactgcagtggcgcgatcttggctgtctgcaacctccacctcctgggttcaagttattctcttgcctcagcctcccgagtagctgggactacaggtgcacgcccccatgcccggcttatttttgtgtttttagtagagagggggcttcgccatgttggccaggctggtctcaaactcctgaactcaggtgatccgcccgcctcagcctcccaaagtgctgggattacaggcatgagccactgtgcccagccccaatacttattattttttatcttttatttatttatttatttatttatttatttatttatttatttatwgagatagggtctctctgtgctcaggctggagtgcagtagcatcattttagctcactgcagcctcgaactcctggtttcaagcaatcctcccacctcagcctcctgagtagctggaactacaggcacatgccacctttcccggttagttatttttaagttttttatagagacagggtttcacaatgttacccaggctggtcttgaactccttgcctcaagtgatcctcctgccttggcctcccaaagtgctgggattataggtgtcagtcactacacctgacctacatttttattattgccattctagtgggtggaaagtgatatctcattgttattttgtttgtttgtttgtttgtttgagacagtttcactctgtcacctaggctggaatagagtggcgcaatcctggcttagtgcaacctccgcctcccaggttcaagcgattctcctgccccagcctcctgagtagctggtattacaggcacccaccaccatacctggctaatttttgtgtttttagtagagacagagttttgccatgttggccaggctgatctcaaactccagacctcaagtgatccacctgcctcagcctcccagagtgctgggattactggcacgagccacagtgcctggcctcgtagtggttttgatttgcatttccctaatgtctaatgatgttaaacatcttttcatgtgctttttcatcctttgtgtgttgtctttagagaaatgtatattcaaatatatattcaaatccttttttttttttcttaatttttttcaagacaaagtctcactctgttgcccaggctggagtgcagtggtgcaatctcggctcactgcaacctccacctcccgagttcaagtgattctcctgcctcagcctccaagtagccaggattacaggcacgcaccgccatgcccggctaatttttgtatttttagtagagatggggttttgccacgttggccaggctggtcttgaacttcggacctctggtgatccacccacctcggcctcccaaagtgctgagattacaggtgtgaaccaccacacccagctgcccatattttaattgggtagtttattgttgagctgtagaagttctccgtttgttctggataccagttctctatgggacatatgatttgcaagtattctcttccattctgtgggttatcttttctctttcttgatggaatagttttcagcaccaaagtttttagtttgatgtagtccagtgtatcgatttttttcttttgttacttgtacttttgacgtctaagaatccattgccttacccaaggtcatgaacataattcctgtgttttcttctagaagtgttatagttttagctattacttttaggccatgactcatttcgagtttatttggggttgtggtgtgaggtaggactccagcttcattcttttgcatgtggatatccaattgttccagcacaattttttgaaaagactgttcttttcygattgagttgtcttagcatccttgtcaaaacttagttgagcatagtatcaggtattatttctggactctcgatttcattgatctatgtctatttttatgccagtatcacactgtcttgattattgtagctttgtagtttttaaaacacgaaatgtgagtactccatctttgttctttttcaaggttgtttggcctattctgggtcccttatatttatttccatatgaattttttttacaaggttcttgctgtgctgcccaggcttgtctcaaactcctagcttcaagcaatccttcattcttagccccccagagtgctgcgattacaggtgtaatctcagtttccatattaattttgggatcagcttgtcaacttctgcgaaaaagccagttgggattttgatagggattacactgaatttatagatcaatttgaggaatattgccattttaataatactaagttttccggttcatgaatatgaaatgtctttccatttatttagatcttctttaatttccctcaacaatattttatagtttagwgtatacaaattttgcaattattttgttaaatttatacctaagtattttattcctttttgatgctttgtaaatggaattgtyttcttaatttccattttggaatgttcattgctagtatataaaattacaattgatgtatcctacaaccttgctgaactcattcatcagttgtaatggtgttttagtagattccgtaggatttttcatttacaagatgtgtcatctgcaaacagatcgttttacttccttctttctaatatggatgccttttatttctctctcttgcccagttgctctgtttagaacctccattacaaggttaaatagaagtggatatccttgtttattcctgatcctgggggaaagcttttggcctttccccataagtgtgatgtgagctgtgaatctctctcattttccatcccctatttgctggttcctttgtctctttcttggtcagcaccatccagtagcttcctggaaaagtgtgcataggggaggggtaaaatatttgagatttttgaaaactgaaactctattctactctcacgcttaatcgataattaggctgaataaagaattataagatggaagtcattttccctctgaattttgaaactgatccattgcttctagcttcygacattccggatgagaaacctgatgccattttgatatctcgtcatttgtatgtgaactgtcttttccctggaagcttatagggcgtactctttgtcctcaatgttctgaaatttcatgacgatatacctcagtgtaggtctcttttcattcattgtgctgggaaattaatggaccttctcagtctagaaatccatgccttcagttctgggacaccttgaatgatttctttgattatttccttccaccgatttttctgtttctggaattcctacattttttagttagatccctgagctggtcctccaatttatcttctgttttctatctgtctcttcatttttggttctactctacaaaatttcctcaagtttgtcttccaactcttttattgagtttgcatttctgctgtcagactgtgtatttatttccaagagctccattttattttgtgaatgttcttttgttgagcattctgttcttgtctcacagacgcaccattttctttagtctctgatgatattttgtttttgaagttttcttcttcctgcagagtctctgtgtccttccagttacctttcctgtttgtgtatttgtccatctctcgtgttaggtttcccttaaatgtttgtggctccttggctgtgtcttcaagttaaatgtggggcagaagagaagatggttgtggatctgtgtggtgagtgggctctgctgactgataatccmagtaggataatccaatgggaactcaatataggtgtttgttctctagagctagtctggttctgcatagaaaatgttttcattctcctacctagcaaatggactcctgatcacagccttctgattgtgacctgtcttttctgtggaagcttgtagggcgtactctttgtcctcaatgtttcatgacatatatacctcagtgtagtatttcatgacaatatacctcagtgtaggtctcttttcattcactgtgccgggaaattaatggaccttctgagatccatgtgggcaagagggcaaaggtgggcaatccaaaaatcttcacttaccgcctctgctcccaggatggcaccctgtgcctcagccaggcatcaagaggccctctgtcgtactcctttctgagactctgcctctggttttctgctgggatgagaggaaacattttcttggcagaagtaggaagagaatctagggatcttactgcctttaggctgacttgcaacmagccctcctcttatttcacttccagagatacctggtgttgccaccaatcccagagcctttggggttttctagcacaaacctgagtgcctgtttgcttgcatcatcatggcttagggttcggctttcttggctttgctgagtcagcactccacatctctttcccagctgccaaactttgttactatcatcttcttccctggttgttctatctttgtggattgatgcattatttaaaaaattataccgttgtcttagtggagtttctgggtggaaatagggctagtgcattcattgaactcacaatctttaaccacgatctctggctcttctgttgggttccctgagcctcaacatcatcatctgtagagtgggacaaaagatccctttcctgatgtctgcccaggagactttgtgaagattagatgggtttttgcataaagatttaccattcaaacagcgggatgtatgactgtctgttctaagtggtgcttggactaaaggattgaggggtaccctctagaggctgggactggagaaaaggccagcctgggctgcgggatactgtatcagttacaaacaaccacagacctcactggcatgcagcaataagtgtttaggtaactcaggagtcttcagagttcacctgatccaggctgggcaggccaaacgactgcctacctttttttttttttttttttgaaacagagttttgctcttgttgcccaggctggagtgcagtggcacaatctyggctcgctgcaacctccgcctcccgggttcaagcgattctcctgcctcagcctccagagtagctgagactacaggtgcacgccaccacgcccggctaatttttgtatttttaatagagatggggtttcaccttgttggccaagatgttctcgatctcctgatcttgtgatccgcccacctggcctcccaaagtcctgggattacaggcatgagccatcacgcctagcctatgactgcagatcttgactgggctcacccttgtgcctgggggcagctgactgtcggatgatctaagagatccttggcttggacaactgggccaactgagctctgttccacgcatctctgcatctcagctctagttcatatgtattcccatggaggtggcaaaaggacaagaaagcaagcagaaacatgcaagtgctttttcaagcctctgcgtgtgtcacatttgctctcattggctgaagttagccacacgtgtctgagcccagaggaagagagtggggagaggcatcctactcagtgcaaaggacatgaatgcaggaaggggtaaggaattgggaccattggtgcaaactctaccatgagtgtctaggcatggctccggaacagagcacaccccagcctcgattattttcctgcaaacacagaatattttgcctaaacaaggaacctggggttctgccaccctgatttgcattcagttaaaagagctaatcctttacttgctactggaagaaatgctgcccatctctaaaacaatcagacatgatctctctgatagagtagtacactctccaggcccaggctggagctgtagatcacaggcaaccgatgaaatttgcttaattatttgattcaatcagaagttggcttaattattttcttgctctcacctcttttgaatccattctggaaactgattatgtctrtaacaccaacccagagataagcatttcaattgggaaatgtaattagccaaggaaaatgaatgtgggagctgccttttgtcaaagcaccattaaaacccagctctggtcaataccaatgtggtgtgaagacaaaaggctcagtttgctcctcttgtgactggagagggaaggcccagcaggaggtgggaaaataggtatcttgggatcttagcaaaaggaagctcattaattcattcattcagaggcttttctaggccagctctgggatggatgctagagatgcaaaggtgcactggccacgtcccttgcctcgaaagagttctcttcttagaggagggattcacacgtaattatgtggtcaaagtgctacgggaatacagaggaaggagccactgattctgcctctgggaacttcacagagcaggttacgttgagctgggctttgaagaataagctggagtctcccaggtgaggagggcattctaggtaaagggcacagcacgtgcaagggcatggtggcgtgagagtacaggagtacttgttaggggtccactagagcaagcctgctgagggcttcttgggttatcctagctcctcctagaataaagtgtccttgggccatcccacctcaacttttcagtgcctggggatcctgcctcgcctcccactttgccctctagatggcattattaaggattctctcccagtgtttgttttaatggaagtcgaaggcgtgtggcatttgagggagactgcgccatctgaaagccgggggctgggttcaaggcacctgagaacaacagatgcacatggtagagctgaagaatgagagggtgctcggggcagaaggtccatcctgggctgaggctcagcggtacggcatgctgagctgagtgtggctgtggcatgaaatgaaaggtgaggctttcatctgagtgagctgcccagctgggcatgggctggatcacaaagggccatttacaggccattgcagaccagctccttggccttggcctctatgatgggggactctcttaacactgctccgactgtagcccctctcctgcaagtcttcacttcttcaaaagaggtcagtgctcagagcagtggtctctggtttgcttggatctctgcctaaggcagagcttgtctggaatgcagtgaggtggagaggttatctgaccaggtggctcctgcacctggggaaagggaaagggagggaggaccaccacgaccacggtctccagggccayggcaaggtagacccaccaaacctctgcccaactcgttcctatttaccttaacccttagccatccttacaaggaagaattcagccaagagtgaccaggcactaatagaagctgccaggccctgcctccctctgagacacacagccactgactaccagatcccatccaatgtcatccatgtacacacacttcgtaatggggtgtggtgaccagcatgtgtgcattttataccctgcttttttgcttggtaggatcttgaagcctcatcatctgccttccccaggtgggccccatctcacctgtgaggccgctggtgtggggagagagcacaagtacagtaggcattcgggccatggttcctgcttatttgctgtgcagctttggacaagcttcttagctttctgagcctcagttttgtcatctggaaatggagataatataaccacctacactgcagtataattatgaagattaagagtataaaattctcagccaggcatgatggctcacgtctgtaatcccatcactgcgggaggccaaggtgggaggatcacttaagttcaggagtgtgagaccaacctgggcaatacagtgagacctcatctctattaaaaaaaaaaaaaaaaagccaactgcggtggcatgtgtctgtactcctagctattcaggaggttgaggtgtgaggatggcttgaacctgggaagtggaggttgcagtgagctgaaagtgcgccactgcattccagcttkgttgacagagcaagaccctgtttccaaaaaaaaaagtaaaattcttggtttaggttttggcatgaaggctgtattagacacataaccatgatgatcatggaggctgctagacccagctcagattactacccagtggactagctggatgaccttaggcactagtcatttaaattcctcctctgtgaaccrggtttaacaacactgctcagggtggggataaggaacaaacagactaagtcctgcctgtggatagactttggaaatggatacttcatgtccttgtcgtagtccagggcactggtggtatttcctctgccaggtgatttgagaactcctcacgggtccccagtgagaggcggtgagcgactgtgtgaaggaatgagacagcatgggaggtggaggaggttggtgtctgcacccaccctgcccgagaacgggacagtgggggatacgtgcaggacaaaatggccttgsccccgactccaggctccagaggctgggggtgagcattctctacccccatcccaaagctatggcagaggaaccctgcagcaaaaggacacggagtgcccatggtattctgtgtgaaagtcactgaggccagagacagctcttcacatcctgtgttgctcaggccttccccaccctgtccccctgtggggtctcagccccagttctgggcagggagtgtgggatgcttaggagcggggtacaggctgagcctcagccaccctcacgggaatccatcctgggcccctggccctggccagacaagctggcagattgcccagccacatccaaaggcaatgcatgctctgagcacagagcctggccgaggacaccagagagcaggagagcgtgggggccgtgcagacacatgacaaggctttgataacacagtctacctgccatgtctgaaaaatcaggcgtgcgtcttcctggcagggaatgcagtttcctgttaatgagttgtgagaggttggaacaagttatcagagagaggctgggaggactgcttcccggggcagcttccaggagatggaagccaggccccagcctcctccctttgggcggctcagctatttgaggagcatctctcaaagggctgaactaaagcctggagtgagagtccccagcctaggccaggacctgctggtggatcttgagcccctgctgcgagcttctccgggccttagctgctgcactcccctgcctcagcagggactggccggagtcccctcccctctgcaacctcgggttctcagagggaccaaagccagtaaccccatgacagacggatctctgtggttcctcgctgcttgcaaagcactcacacttgtcatcgtattaggcactcacaacaatctgtttgagagaaacaggctcagggaggtgaagtgctcaaggtcattctgcctggtgggtctgtttagggtaatgctggctgctgtgacagataaacccagagacttcagtgcttggagacaacagacatttctttcttgctcatgtaaagtcatattgatggtggggagrgctctgttccctctgatgactcaggcactcagggtgatggaggcgccatcatcttcaggttgtaacacccaagattgcctcggccttggaatatccatgaatggtttttatgggccaggcctcaaagtggtgtatggagcctatgcccacaccccattgggtcctgcggctccacctagatgcagaaaggctgggaaacgcagtgcctgcctgggcggctatttcccttcaacggctctgtctaaggaaggggaactggtgcagaatcgttgctggcacagtagaggatattaccctcaaataaaggctggggacccctagtgagagtttggtcacctaggcgtcaacaagtgcccagtgtggtctgagacctggaagaagactcgctgtgtggctctgaccccagaaggattctggatctccaaatgctgttccagccttctcggcagcctcttgccccttcgttagcttctaatgtacatggtttgctcatggcccagccctgagacacccctctgtggctcctcatggccctcaacatagagaccaaaccccttggcctgcatttgaagtctttcccaggatggctccagctgactggccacattgctccccttattccctcccccgaaacctatgctcctccctgaccagcttcctacctcagggcctttgcacatgctgtgctctctgcctggaatgtcccccctgttgctctccaccctgcgggttcctgctcwtccttcccgatccatcacaggtccatgaggcttcctgagcagagttagccactcggccagcatttattgagagcttactgtgtaccaggcactgcaataaaagcttcccaggaattaactcattgagctcccaagcctacaaggcaggcgtcccattttctttttcttcttttttttttttttgagatggtgtctcgctctgttgcccaggctggagtgcaatgatgtgatctagttctgtcacccaggctggagtgcaatggcatgatctcggctcactgcaacctctgcctccagggttcaagcaattctcctgcctcagcctcccgagtagctgggactacaggcgcccaccaccacgcccagctaatttttatatttttaatagagacagggtgtcaccatgttggccaggatagtctccatctcttgacctcatgatctgcccacctcggtctcccaaagtgttgggattacaggcatgagcccccgtgcctggccaggcatcccattttctagatgaggaacccaggtctgtgaggagtgtgtgtgaggtcacacagctgcagagtggcaaagtcaaattccaaacccaggtccccgtggctcacagccaggccttaacagctgcataaacttccacctattcttagcacctgtcacaaggcttcataatcattcatttacttgctgttttgctgggaaattgcttactgtctttctgagaaagcagctgcagcctccgtaaggacagaggtcaggcctgatgcatcctagaatcttcctcaccactgtccccaccagcaccaaggccaaggtctgggtggtgatttcctctcagataaatcccttaccctttgagaaccagaaagagaaattcctcagattatggtctgtcataatcccctccctgcttccctgtcagtttttgacagttaccctgaaaccgttttaaaatgatctcagaggcagagactggccttctccacgcatgattaagcacgatggctttttaatgatttgagctgtgccttctgtgaattgacaaaaatggattaccatatatttctgaaagccacactgccaaaatcagatttttttttttttttagttttctcagccatcctcgaaaaccttagctgagaatgacaaatactaggggctttaattgttcagtcacatgagggtggtgcctcctgagttctgagaactgctctcgccaggaaagccttgaaatgctyctgggcttcgatctttaggaaattgaactgtgtgttttctctgaagcggagagctgtctcctgggccgtggcacgtttgctgcatttgtgaattgtttgggcactgaggtctgaaacagaggcagttcttgccccagaagcatgctcagggctgtcacgactggatgaggcctggcttggctgtgggtgggtggacagggcaagcggggagggggttctccctgtgtgggcacttcctcctccttttcactctcctgccagactctgtkcatggagtcctgcacccttcacctgattcaggccacccacatctgcgacagggttattgctagtaccttggacagatgcagactcgctgctggctcagagaggttaagtcatttggctgtggtcacaggctggtaagccacagagccaaggcacatggtttgaccacaagcctgtgcttcccccacaatcgctgctgctttaaaaaaatcaaatgaggccaggcctggtggctcatgcctgtaatcccagcactttgggaggtcgaggtggacagaccgcctgagcccaggagtttgagaccagcctgggcaacatggcgaaaccccgtctgtacaaaaaaattagccaggcgtggtggcatgctcatgtagtccagctactcaggaggctgaggtgggaggatcacgtgagcccagggaagtcaaggctgcagtgagctgtgatcgtgccactgcactgcagcttggacaacagagtgagaccctgactcaaaaaataacaataatcatcatcatcgtcatcatcatcatcatcatcatcatcatcatcatcaaatgagaggcaactcataggtatcctctgtagtccatttacatttaaggaaaacaaacctcattgtgtatccactagcatcagtggcttcagtcgtctacattatctgcatttcacagaggaggatgttgaggctcatgagataaggtagctgaccagaagtcacacagctagtaataggacaattatgattttattctaagtctacctgattccaaagtttctgccctactctgtcctttgtaggaatctgtctcaggctccttcctccctctctaacacaggtaagtctggcaaggggaagcctgagtggcttctgtgaggttctggaaggggcctgtggaccaaagaaaagggaggcccttggtctataggagtgtgggctggtctcctctttactgatgctgggagtaaaccagatggattcgtcatggcctgatggagagaaggccacctgtctggcctgtggtcatgtgtgctctcggctcytgctctgttctatgtcagggttaatttactatatatttactccaaacctaccatgcacctggcatcacactaggctctttggtggctccaaagatgcatctggcaggatctcttccttccagggctaccatctgtcagagaaaaagaccaactcagaccctcctatgagtgagcctgggccaggggatcagtggtggggcccagaatggtgtaggtaagaagagccatccctcgagggcatctgggggggctcctgcagagrgtgcccaggctcctagggagaggcggcagctctctgcaaggtagtgcctgctgcaggggggccttgctccagcccagaggtgggagatagggtcaggctaagccacaggccttcaggaggtagcctgtggtctcaaagccaagagtacttccctgggacyttcttggaccctccaaaccaggcccagtctcccaagttgtgcaggaatgraatggcacagcagtgaagggcagagcaaccagggaagatggccagagttgagtcctggctccctgttcatcagccctgggaggtttagatgattctytaagcctcagtttccccatctgtaaaacaggggcaggaattgcaccctcctcctcaggtgttgtgagacttaaaagaggtgctgtctgtggtgcgctcagcaacatggtgtcggccttcacgcaggtttgcgtctgcggcgtccggcattttgcatgatctctagccctcaggatggtttgcaaggtggaggtcttgctcccactgtggaggatgaggaaactgaggcagctagtaagtggtggatccaagcgtgggtttccaggactcaacccattctgctggcccactgcctgcagctaagctatcccagcaactacaaagaccctccctggggctcagctccctaccaggctctcctggcactgcctctgctatctcttaatgttttacaggggtgaatgggacctctttgatttcctttcttttctcctttccaataatcatcattaatcttgttatcagagccatgcatctgcacctcttggctgtggtccacaggccgtgtttgccatgatcaatgcatagctctgtgtggccacaatgtatacccaagacagcactgcaaccctgtgtccgtgggcctgggaggctctggcactgtcaaagacagctggaggctcccccaggagctgaggtgaggcacctggctcacatgccctgtggtcttgttgaattcttgttcctggactggtaaacagctacccccacagctggggagcatctccasytgccttcacagggtctcaaagcacagacccaggtgctcctgcccccstcctcctcatccgtaagtgcctagaggacaattcaccaaaccaagatgggtagctctggagtcccgttgggcccagccactcatcatacagcagccagtcagatccagttcctaagccatccagaccccctttcttgaagccccagggccatgtgtgatctggcctccaccccctcactgcccactactttccccctttcccgctgcacacaacctttatcttgggattttcaatgtgctgtgcattctgcccgccgtgcccttggcccctttctcctgggcctccttcaagcctctgcccgaacgctgcccatctcctggctgtgctccccsgccacacctaaatggagctcctccttagccactctgtttttctgcatcacacacgttacatttagatgtgyctctgtgtgtctttcccctcattccactaggctccagtgccaggcacaccccgagtacccaaaaaatacatttgggatgaatgaatgaatgaatcttgaacaagtgacttaattcctctaagcctcaatcttcgtctgtaagagggggacaatgagtttttattttgtttatttatttatttattatttttatttttatttttttttgagacggagtctttctctgtcgcccaggctggagtgcagtggtgtgatcttggcttgctgcaagctccgcctcccgtgctcacgccattctcctgcctctgcctcctgagtagctgggactacaggcgcccgccaccacgcccggctaattttttatatttttagtagagatggggtttcaccgtgttagccaggatggtcttgatctcctgacctcgtgatccgcccacctcggcctcccaaggtgctgggattacaggcgtgagccactgcgcccagccgagcttttatttttttgatttttaatttattttaatttatttatttttgagacagagtctctctctgtcacccaggctggagtgcagtagcgcaatcacggctcactgcaacctccacctcatgggttcaagcgattctcatgccacaccctcctaagtagctaggactacaggtgtgcaccaccatgcccagctracttttgtatttttagtagagatggggtttcaccatgttggccaggctggtctcgaactcctggcctcaaatgatccacccacctcagcctttcaaagtactgggattactggcatgagccactgcacctggcccaatgatagagtttttaaaagatggatgtgaaacaaacagcacagtgccaggcaaaaaaggattgttcttaacttctgataaggaagggttggctggcatttagaattccacattccacaagaagcttttgtgggggtgtccaccctgggctaggatctcagagcctcatggagtcagtgtctggctcccagcacctcacwccacagaggaattgcctctggccagggcactggctgtctaggtggcctcctcacatagaggcagtgcagggagggtgtccaatccttcactccgcagatcccaaaggcaccttgaccctgcagggtctgtgtaggcttaaatcaamcaggcttagatctagccatgaagacactccctgcctggaatggacttgagaaaaggacacaaattactgtaatagaagttgagaaacaatgcctttgatataaacgttcagaggagaaaaacctcagatccacgtgggagagtcagggatgtcttcacggaggaagaaacattttatctagaagttaaagtagacattggattgagacgtgtggggacattgtgtgttagaagagggcatgccaggtagagaaaacagcttgaagaaagggctggaggctggagagagtgggccacatggaagcagtagtttgcctagaatgtggaacacatgaaaagacgattaagacataggcggccagtcgcggtggctcacgcctgttatcccaggcctgtctcgtgggagaccgagacaggtggatcacttgaggccaggagtttgagacaagcctggccaacatggcgaatccccacctctgccaaaaacacaaaaattagccgggcatgctgacgcatgcctgtaatcccagctacttgggaggctgaggcaatgagaatcacttgaacccaggaggtggagattgcagtgagcagagatcacaccactgcactccatcctgtgtgacagagcgagactgtgtctcaaaatgtgtatgtatgtatgtgtatgtatatatatatgtgtgtatctatatatgtgtatgtatatatgtgtgtatatgtgtgtatgtatgtgtgtgtatatatatgtgtatgtatatgtgtatgtatatatgtatatatatgacataggactgtaagaacattgtatcagtcatctatttccataatagggttgtattataacaaagtattccacagtgagaggcagaccacagtgttgtttgtgactgcagataggctggaatttggtttatctaggctgcatctagctagatccaagtctgctctgcacatatctcatccttcctggaccagtggccatttgaggttcattcttctcatggtgaagggtgggagcctaacggagcaagcccagccatgcaagcatgtttcagatcatgtcctctaatccctgtggcaagtctcatggccaaacgtaagatcaagggcagagtttaattccccacccactatgaagccaaagcaagttacatggaaaagcacaaggttaatgggatagggatatttactcctcccaaggagggagagggaaggagtgaagatttgttgaacaaccatctaatttccccaggcaagtagaggccagagtgtgaagggtctctgtgtctgctgttaggagctgaccagagcagtagctggactttgatgtctggtgggatgagcggcaaagggctctgatttttgcccttctccccaytgaggcaaaragagtactgcagtcctattgggtagttaaaatgccccagtccctgcccagctctgtcctgacttccccatggctcacactttctgcttgcctggcacaaaggtagtaccttctctgctgggccaatcatctgccagggctcttagctttgccaagcctgagggtgactttctctgctggaactgaaccttgtgataacagccccatgcattgagtacctactggtatgctgggtgtgtcatattctcctgtagtgagtgcctgctgagtgctggacagtgtatgggggttctttatatgtattcttccaaactcatcaccataccaccctaaaagggagacctcattgtcccattttactttgtttaatttttgtttttgcagcagrgtcttgctctgtygcccaggctggagtgcagtggcgccatcacagctcactgcagcctctacctcctgggctcaagcaatcttcccacctcagcctcccaagtagctggggccacaggcacatgcccctatgtctggcaaatttttgcattttttgtagagacagggttttgccatgtcgcctaagctggtcttgaactcccgggctcaagcgatccacctacctaagcctcccaaagtrttgtaattacatgcctgagccactgcaccccggctcattatcccatttcactgagggtgcaagaggtcaagtcagttgcccaagctcacacagcaaggatggatgaggctgagatcagaaccgggtctgtttggcttcaaagcccacgctgtcttccctatccaggcctcgcaggaaacataaagttcacgtgctctggaaggtggcttctggtcacagctctgccctgagttttgtgactttggaratatcactccagaattctgggcttcagttttgagatgaaagcagttcagagcttgctctacagcacggtcagagggagtttttaaacacaggtttccagatcagacagcaccctcagctcttatttaaaaacaaacattaacattttacaaacacaccctgttttccaatgaggagctgtgtccagcagactgcttcagtgaactgtgtccagccacttgtcacagggaaccttctccagccattggctgcrgtaatcattctccagccagctgtggcagcaaagcgtggcatctgctcaggaagggtggaggaagccattagttccaccagggccctgacgtctgtggctgcccatttcgcccccccgwcagggatttccttggtagctggccactactgtgtgtgctgtgtcttctccgagtcccaggggcctggtaaagtgttggagagccccaagaaagagctgttggcatttccaatcgccattcattcattcattcaacaaccactcgtttctgccttctctgtgcccagcctgaggatggatgctggggccactgggaaatgttagacccagccactgcaccctgggattcacaggcacctatgcagagacatacaatatcrtgtacacagtgctgggacaaagtcacatgcagcagagttggtgggcatcaatgggcatggtcagttctgcttggtggctcaggaacgtcttgggaaaaggctgaatgtatgagccaaggcyagaaagatgagtaggtgtttaccgagccatctctgcaaaggaaggcatcccaggcagagggacccatatcagcaggcacgccagggagtctgaggagctgctggtggtctgatgtgggtcaagcatcactttgcaaagagagcaggacaagaggtgaggctggagaacttgccacggctgggaccatgggttctgcacgctgtgtccaggagtttgaacttggagaactgaggcaggggtgaggttgagggctgttaaacagggcggtgatgtgatcattatgctcatctttcatgtatcagcctccagtaagagcattctattgggttccaggaagaatccctaaaaaatatctttccttccagaggcttcaagaaacctttgcctggaaatattcagcctcagagcacagtgctatgtcacccaggaaatagctatcatgggaaaattcaaggaaaatattcctgctcaaggaaaaaaaattaaaacacgacacacgagaaacagaccagatagaaatggagaggtcccagtccgtaaatgggttttatgccgccagaagacctcatcatattagacgatctggttttaaacaataaactttgggtaatggggatgtcactttaattcatcttcctaaaaaacccatgtggcaaaaacattccagttgctattgctacattgcaaattactccaaaacttgggggcttaaaacaattattttattatgctcacagattgagtgggtcagtaattcagaaagggcacaacaggggacagcttgtctctgtgcagtcatgtatagaccctcagctgggaaggcttgaaggctgaggctgactcgacagctgggtggtagtattatctggaagctttttgagtcatgcgttgcaattgatgctggctgttggctagaacctcagatgggactgtcagtcagaaaactgatacatggctctctacatgttttctccttgagagctagctatcttgggcttccttacartatggtggctggttccaagatccaacattctgagaggcaggaagtggaagctgccagtttcttaaggtctgggccttaaggtcaagccaggcacagtggctcacacctgtaatcccagtgctttgggagactgagatgggaggatcgcttgaggccaggagttcaagaccagcctggacaacatagtgagacccccatctctacaaaaaaattttaaaagttatccaggcatggtggtgcactcctgtagcccctgcttctcgggagttcaaggatgcagtaagctatgatcacaccactgcactccagcctggatgacagagcaagagaccctgtctcaaaaaaataaagaaaatagcacctcatcctttctgcttcattccgttggtccagatgatcacaatggtctgcccaggttcaaggggaggagccrtgggaggtgtgtcagtgtcacaagaaaagcttcgttcttcttgtgggataagatacaccacagcagctgcctttgaaaagatggtctgccacacagccacatgggtttctgtggatgctgagaaaaacgtgtgtgttgtttctttacagattaagaaaagtctgtgcattgtctcattaaattaaatgcagccattagtatgtggctctggggatattgtgggaataggctatgccttgggtgattttttttcttctaaatgttcttcctggagtttgtgttgccagcctgaccatttctctttgctaatatgatatcacataaaaacatcatcrtcattaatatggcagagtcagcagggtgggatacagaccgtgatccagggaggcaggctggttcctggctcagcagctcctggggaggaggttctgggagctggaggttcatttccttgtagagattgacacgctcttcacagaaagctttgtgcagggcgaggctttgggcacatgttgtcactctgggcagcctggtgggagggtctttgtctagtggtggcagcccctggagtagacacttaaccctgctctggacgtagtcaccacagacgcccatgctgtgggctcgttttgttcagccgaaccccttacctttaatgcctcctagggtcagactgtagccaggcactgggagttgtgaatgcsccacagccccccttgaagccctccccatccagttggagggggcctttctttcattcctaaatacttaygggcccccgtgggggctggaaastgttctgggcagtggaaggtggcggtgaaccgagttctctccctaggagccaacccctcaggagaagacagagtggctgggaaagcagatccgtgcgtgatgcccctggtgatgaaggctggggaaaaccagagaagacaaggagacagtgagtggcatgaacagtttcagcagagtagcccgcagctaccagggcctaggcaaggagcaggtttggaggccgaagtggaggctgaagggacagcgtgcagccaaagtggaggaggagaggcagtgagggaaccaggacagatcacagggccccagggacgggaaggactaaggctttcaactctcagtcagatgggagccatggggggtttcgagcagaggagtggcatgatatgacttgaatttttgttgttgttgttgttgttgttgtcgttgttgttgtgacggagtctcgctctgtcacccaggttgaagtgcagtggcgctatctcggctcactgcaagctccgcctcccgagttcatgccattctcctgtctcagcctcccaagcagctgggactataggcgcccgccaccatgcccrgctaattttttgtatttttagtagagacggggtttcactgtgttagccaggatggtctcgatctcctgacctcgtgatccacccgccttggcctcccaaagtgctgggattacaggcgtgagccaccgcgcccggctgacttgaattttttaaaaaatctctctggctgcaacgctgaggacagatgggtggatcggggaagagggaagggcaagggtagatgccaagggggcggggaggaagccagtggaataaatgcaagagagaggaggtagctgggtcagggcagtagcacggagaaggtgagatgtgggcagtgtctggaaatctcgcagagacggccagcaggatttgctgcaggactggatgagrgggtgtgagacagggtcaagggttgggggccacagctcttgggaggaggacattggtgttaatcaagatggggaagactggaaggaacaggtctggaggaaggcatgggattggctttcagacagtgaaacatgcgatgcccaaagaccttcaagtggagacatgcatgcagagttggatatgtgacttttagtagagacagggtttcactatgttggccaggctggtctcaaactcctgacctcatgatccgcctgcctcagcctcccagagtgctgggattacaggcgtgagccactgtgcctggccgatggattttaagatttgaaatcactaagagaatgagggaggacagaaaggaagcccaaaggcagagccccagggcaccccagtctttagaggtctggagatggggaggaaccagcacaggagactgggaagaagccatcccagggtagaaggagaagcaagaggaagaatggcagcctgaaggccaagatccagtaaggagccaggatccgtgacacccggagaccagcctggctcctgccctcctgccgtcccactgtggggaggacacagatgcagactacagtccccactattataaagtgacagggacagggaaacgcatgagtccattagcatgmgatgagaatggggggaggtggaggtgcacagtgtaggggcctagaatgtggacattggggctggggaagaccctctcacagaagaagggctctaagccggacatcagagggtgagattgcatgcatggctttgtgggcaatgagccattagaggtgggccctagatttccacaggagaaggtgggatgggaaaaggcagttctggcagagtctgtagaagagtcataaaagtatcggtatgtaaggagggaatggcaagtggcccatttgggttggggggttctgacctttgggatgcttggagacaaggctggaaggttggtggggaggggtatgagagaggcagtggggacccttgacctcaaggggctcacagtctagttagggaggcaaagccccacagtgcagggaggtagtggtgggtgcccaagaaagtgctgtgggcactctcagggcaagaagaggttagctagtggaaccagttcaggctgcccctgggaggtagaccttgaagaacatgttagtgttgaacatgccaagatgcacagagaagatttcttggcagagaagaccacacttgccaaggtatggaagcaggagcttgcaccccttcctacatgggtactgaggaaccattggcagttcctgagcttggggagagacccaagttggatctggctttagagtgaataagaggtaaagggaaggggtcttggagataggaggacccttttggaggcaactacacaaccagatcaggtagtgatggcctcggcagcagatacagatgggacctgtggggcggttttcctttaagttgggccaagggtttttgcaagctgcaatctcacgctcacgttgccctgcagggtgagagagagggcygggaatgtagttgcaccccaaggcctcactgacccaagaagatttttgtggaggggctgcccagtgccagtaggggcaaggagggccacatgtactcactatcatgccagcccttgtccatcaacctaccccatttaaccctcccaggagccttatgaggcaggtcctagtgtcaccgccattttgcagatgagggaaacgaggcacaaagaggtagaatggcttgccctattgcacagctagggtataagaggccaggatttgaacatctccctgacaccaaagccagcctcttagctatgtgtgaggttgccttgcaaaggctttattcagtagccaaaggtccgaaccctcccaaaggaaaggatcaagagggtctccctgacctcgttgcccttcctcactccctggccaggctrctatttcaaggtgaactaagggaccccagaactgatgaacaatcggttcaatgaactgatttatcaagcacttagtctgtgccaagcatatrggttgtatttatcagatgtatctaggccaggtgtgtatgtgatgtatttatcctggctcaggaacctgcagtggctccccagtgccctggtccagtggtcttaacctcattttatagatgagaactttgatgcttagagcagatgtgttgctggctcatagcggcatttgaacgcggggctgctgatttctgggcctgtattatttctaagacacctcactgccttctgcactagcaggaaggggtgaaccccatggcttcagaactggaacaggaaagtggaccaacatggagcccgccccagccacagccctagggaagcgtccaagctggctctttgtgtataaatcatggtctgtttactgaacagggagtgtgtctttcctcctggggagctgccccagggtggctgcaggtgcaaatagggttgaattcaggatagggccttctctcctgcccagcctgaccgctgagtagcctctggactggaatgaaaggctttccagtaagtgccttgctggactgcagctcagccatgtgccaggtgggaatgggggtgggagaccaaccaagagaaggattcaggagcctgagagcaggggcaggaacttgccaacaaatctcttagcaagctgctttctcagctggcctcatagagcgtccccagggacgtcacrgggcagagctggtcacgaggagtcctggctgccctcccagcctgatctagaggaagaagggcgcatggggtgaaaacaccagggagctcaaggcaggattcagaaatcagacactgcggctgcctctcccctggccttgaaggacatacggcctgggcctctcttgatccgtaactgatcagagtgggtggggtggggtgagcaatcagatctgcaactgttttcacagagaattgagcggccctgcaatgcctgatgcgtggaaaacacattccacttggcctggggctgggccagtccccccttggtctaatcttgagtgtgtcccatcccctctctgaggtcttcatctatgacaatgaaggggtaggggcagcaggatcccccagattcttccaggcccttcaaacgtctggtttgaggtcctgtgatagaacaggaaggggcctgagctacagccaggagcatggacaccaggcctgtaccctgtgtgctgggcacgatctgctttgctcagtctgcctgggctcctcagtgcctccctgsttgagcacctcgagagggtgaatacgggccaggaactctgttcagccctgccacctacaggggaagcagctgggatgaaccggcaaaggatcaagtctgtttggctttgggatgtgttttcctaccacttcttaagcatgggaggggctgacattctggaaattcacttcagcccaaayagggaagccatcccaggacgcagtgctgggtccttccagccttctcctccctccttggcgaactcccttctggtaatagattctccgacctccagcccatcccaggacacagggctgggtgcctccagccctctgctccctccttggcgggccctcccttctggtaatagattctttgacctccagcctcatcttcctcctaacttctccctccctctcaccctcacttccattctttttccaggctgtatcctttttcagaccttgcccagcctagagaggtggttaagtgtgtgaatttcagaaggattctctgccttcagtcaacacaagtgagcagttaggaagcactcattaaggagattagaggctaactctgaattcaggaggtgccgcaaagcccacgctgcagactcaagtgggctcaacaggctccagagtttccactgcggaaggtggagcctgtgactctcaatgttttcagcctctgcagggaggacactgaaggaacaattactcctcttagggttacactctggtccctaaaggaaactactgctgcctgcaatgactccatagttgtaaggagttgatgggaggcgccacctctttcaggaagcctttcagatagtagcaggcatgtccctttctccctcccctccaccttcacagttttctgcactgagtgcaaaaggctctggttgtgccagagggtgtcttcctcattactcttctgtctggttcatgggatggaaaactatcattttgcacttatctcagcctttactcccaggacaggtgcctgatgcccagtggtaggggccaggcctcgtagctggttcgtgcactagaatgagaatggccgcaaatttttactttgtgtatttgtttggtttctttgcccaaattttctttccttttttttttaatggaaataagtttctggttataagaaagtaacccatgagctgaagaaatcaaaaggcacctgtaatcccggcactcagaggtagtcagtgggtcataccagacttagttctgtacacttacactttgatgtacaataagaattatactgtgtttttttcttatttgcaatttacttaaaaagaaagaaagaaagaaagaaaaagatcccgtggatgtctccccaggtaaataggcacaggtcgacctcacctgcgtggatgactgcatggtatcctattttatatttgagccatagttcaccctctattagctacaactaatcttgaagagacagaggattggcacggttgatttttgggccaggtgcagtggctcacgcctgtaattccagcactttgggagaccaaagcaggcagatcacttgaggccaggcattcgagaccagccttggccaacatggtgaaacccactctctactaaaaatacaaaaattagctgagtgtggtagcatgcatctgtaatcccagctacttgggaggctgaggcacgagaatcgcttgaacccaggagatgaaggtctcagtgagctgagatagcaccattatactccagtctgagcgacagaacaagattctgtctccaaaaaaaaaagatttttgtatgccaggctggatgaggtggctcacggctcacgcctgtaatccagcactttgggaggccgaagtgggtggatcacttgaggccaggagttcaagaccagcctggccaacatggtgaaaccccatctctactaaaaatacaaaaattatctgggcgtggtggtggacacctgtggtcccagctacttgggaggctgaggtgggagaatcgcttgaacctgggaggcagaggttggagtgagccgagatcgcaccattgcactccagactgggtgacagagtaagaccctgtctcaaaaacaaacaaacaaagatttttatatgccaaagcagagaaaagtgggtggctgattggcactgatagttgacccgctgaccaacagaagagtggaccgagtctgggaagtggctcagcctgggccctcggtctctctggccgctgtttgctgccttgaggaggaagcagcccatggcggggactctgggtctcggcgtcaccttcgatggtggcactggagtcccccggatggtgcctgaggccagcctttgccaccaagcctgcgctggcattggaggggccctgagaacggtggcttgtccagttggggaaaagagaaagatggccctgggtcacaccctcaatgctctgtgcctgcaggaggcctcagcggggcaacagtcattgactccctcgataccctctacctcatggagctgaaggaggagttccaggaggccaaggcctgggtgggagagagcttccacctgaacgtggtgagtcagaggccctcggcgggggaggggggcgggggccagaagaggcccaacagccagcttcaccctgtcatctctgagacccagagatgttgagggtctctcccacggctgcacagcccagcrgtctcggaaccggagctgccgtgcagtctgtgctgagtccctyccttaagacagccttgaggtggggacatcctccccagtctagcatcttccctggggaggggacacagccacgaccatccawcccctccctgcaaggtcagtcattgctcatctggggcacattgcttccaccctggacggcccctggggctggatctatcacacacagcagctgcagcaagtggggaatggctttgtggaggggggacgtggctcatctgctgagagctgctccagccttgagcccgccctgcactggcctgttgagatggccrggtggggtgggygtggagtgggtggtgcatatccctttgcagacccatggccaggcctgggacctcttggtctccagccttgcaggcacacttggtcagggaccagagcctttcagagggaatggtcgtgtgtctggatggcacaacagccttgaacaccacagcccaccatgttgatctctcagcccagactaaagcaaggcatgcatcccagaggggagctccccacggagagaggctatttacatagacttggggagtaagcagtggagaccgggaggggccgcatccaagcacacaccaggctccatgtgggctcygggagtgccaggtcctgctgcakacaggtctggggctggttcctgcagctcctggcagcagcgaggaccctgcctccttgagagacagcttgccagcacagagcagggtggagagagagtctgggagagcctgggaacgcaacactttaggggagcttccctggagacagagacctctggagtcctggctgccctgcgtctcttggaaaagtcattgaccctccctgagccttagattcctcaactatacaatgagaatgatgacaacagcaacaatattaataatgcctaactcataggcttatcatgaggattaaatacagtggagagttgtaaccgcattttataacactatgaagtctgatactgatgtaaagtgaggtcacccttgtcattgttaggatgattttgaggcttgttgacatttctggttgtttgtgtgaggccaaggaagctgagaatccccccattacccctctttgggttggagaaaggtggaggaaggagaaggaaggagtgtccccataggcctgcctcgttccctgtgtagacagtggctctttgggatacagaacgggctcaggcagctgcccacagtgccttaggagctgggggacactcaggcaggtggggcaggtgaggaaatgtccctggaagaaagcaaggtggggtcactcgacctcgaaccttgactttctcatctgagaaatgggaatgatgaccctcgccacactgacctcaccgagccctgggaagctgaaggggagcggttttgcaggtgctctgtggatgaagagctcccccaggttaacagatgagcactgctgttctcagtaataaagacgatggtgtgcaaagcatgctgagggaaccctctggggcaaggagggtgacaacaggcatgtctggctgtgggcaggcctctctctgcagctcccctgtgtcctgtgttcaccctgcacgggaggggttggcagcccccttctgcagctgaggaaatggggcagggaaaggctgcacatcttttctgaggtgccaaagccaggtcagtggctcaggtggggtttaccccagatctggtcctggcatgatgctccagcacccctgatttgcaatcccaacttaagaaagaaaatagaaatgattaaggcaagtgtgggcatgccctgtgcgctccgagctgagggcccaagaaactgctgttcactgaatacgtagctgcctggctgcctggctccctccttcttagccccagcctttccctgtctgccccacagcctcctcagagaaccaggaaagggccttgctgtcttcctgctgagccttggggtctcctccargaaggtgaagtagcctggccagagtgggatttacctcccctcagtctaagctccagccagcagctctcccggcaggttctggcgctccttggagcacaaccaggcatcgctttgctgccatcatctcagcaagggctggggaaggaagccaagcccagcatttatttggaatgctagaaattgcaggagttctgccaggcaggtgcagattcctcttgacttttgttatgaaaaccatcgtcaccttgcctggcttaccagagccggggacaggtatgggaggaatatcagtggccagggtgacctgtctcaagggcctgcatcttacaagtgtccccactgtccccctccttctttctgtcctgcagagcggagaagcatccttgtttgaggtgaacatccgctacatcgggggactcctctcagccttctacctgacaggagaagaggtgggttggcctttcatgacccctgaactgtccaggctggaaagggctttggagaatatccagtccttccccctcatgccatccatgggaaaagggacttaagggggcagggatgggcctggggccacccaagtccacccctgagggcctgttttccctccgaccatccctccgctccctgtttaatcagtcattgctcatcatgggcatgttgctcccaccccagacggcccccsagggctgaatctatcacacaaagcagcggcagcaagaggagaatggctcttcctcctttactctctgatccctccattctgctgcccaggtgagcccaactggctcccacaggtgcttgtatgttctctgagagcagcagctgggtccatacatcatccactcagatcccactcagcatccagcaggcacctgggctgcttttcacaagtgttggttcttaggactgataaagccaagaccaagacccccaggccttgtcctccacagccaccccttgccctcccctcctgggccaaccaccagccagacacctgctccaggtctcacgggggcagcaggtgaggtggggcagccactgctgtatctgccagtgccaggccttgcccccaggtgagctgtgttggtttccacaaggagggctgggaagtgcacgctacaggaaggcagagctggtgcggtcaggaaacctggccctcactccacaccaccctcacctactcatggccttagcgagctccttgtcccaccctgggcctcgcttccttccccagcatggatggttctgataccccttcgctcaaagacctcttaggacatgggataggaaggaaagggtggggccccaaggctgatggctccaaagcccatcttctcctccctgcgagagaattttgaaaaccacagagctcttagaaatgggaggcttcttcatccccgctcccgagctccggtaaaagcacagcccagatatctggtggcgaggttggctgagtccccaaaacatcagtcattggtcagttctgttccccattactcagagaggctgctgtgaggctggacgcccccctgctctgaccacccagagacaaataatgatgcctgccccccgccacccaaggagccatggaggtgaggcgggcaagccacagaataatccctcttcacctccactgctgctgtctggaaagtcatttccgcttcccttcatctgtgaaggtgccaggggctgaagtcaagggtttcgaagcaacaggcgggcaccttatctctccaattgctccaggcctctctccatcgagcataatctcctcagcagagattagcgcttgtaccaatttgtccccaaataattgtagatggaagccctcggctttgagccacccggagcctgaatttcatttgaaaactccagaacaggaaaatgacagaaggagcagaaaaagcatctgtgttcttcagggcatatgcccagccttcctacttggccgtggtcagtggagatggcctgcrggraggaagaggggaggacacagctcagggctctcggggcggtttgggggtgagcaattcaggaaagagttggtggctgttgagacacattgcttcttccttccctctcttccatccatctttcctcccttccgtccatctttccttctgtccttccatccatctttccttccgttcttccttccttctatccatctttccacccttccctcccccrtttccatccatctttccttccttccttccatccatctttccttccatccttccttcccttcgttcatctttccttccatccttccttccatttatctttccttctgtcttatcttccttccattcgtctttccttccttccttccttccttctccttccatccaycttttcttctgtcyttttctccttccatccatccttccatcattctccttccatccaccttttcttctgtctttttctccttccatccatccttccatcattctccttccatgcatcttccctgcatttttcttcccttcctcccttctctcttcaagggcatctgtggttctgagaacttgctttgaggcctcaacttcctagaaggcaccagcaacccagctttccagaacatagaccagatagtggggtgtggacaggagcacctgtgacttgaaaaacagctcaaaagactcaaggaggggccaacgtggccagaacccctgggcaggcaggcaggctcctgtgtcagtcagtgcagcccctgccctctggccacaccttcctgatctatcccccgagcacctccctgagccagatgccatgctgcatacctcgtgtactttctcactggagcctcggatggccccatcaggtgcatgttatcaccgatttgcagatgaggaaactgagacttagaagcagtaactggctccgggtcgcacagtgtctgagggttgtgttgggcctgactcctgaccctgtggcctttgtgctatgggcctgggtcacagcttggcatggcgtcactgcttgtcaccagggctcagccacaccagactgaggcctctctcttcccttagtccttgagctcacatgcagtgggtgcctgttgggtgggtctttccattcttaaaatttcccacaaaggtttgtggaatgaagggtgaaggagaccccacacttttcctgggctgaggcctttctttgcttaagatgaagcttcagagggagaccccctgctgggtaggccagtcctaccgagagccagtgcccatgggagtaactcgtataaccacagctgcacacgtgaggttggcacggcacttcacagtttataaagtacattcatttctctacatcctctcatttgatttccacaaagacccctgcagcagccaggctcgtgccaccattgtgttgtgcagatgaggaaaccaaggtgcagcgaggtttcctcccactgtccccgctcctccacctggctattttttgtatttttggtagagacggggtttcaccatgttggccaggatggtctcgaactcctgacctcaggtgatccacctgcttcggcctcccaaaatgctgggattacaggcatgagccaccgtgcctggcccacagcatcatttcaatagctgcatggtattttgttgcatggagccattatctaaccactttcctattgtttgatatttagaacacttccagtttttcccactattctaaacaatgctggaataaataagtctttacaacattctcgattatttatttcctcagaataaattcccaggcaggaaacggctgggtcagaaggtcacaggtccttttgaattaatcagacatctcagaacagtttgaaggggtctgagcctcaggcaggggccgtgaggcctgggacctcgctgtggctcccttgctgtcctgtgggtggttgaggataagccactcaccctctcccttcattccccatttgtgaaatgggaacagtgggcaggatcaggatgtcaaagcgggacaggcctgtccactgctcttacgcaggaagagggaaactgtcgcccaggaggaagggtctctggaacctgagggtggtcttggctcccagttcagtgctcttgacagtctgtccgaacggcaccacctgttcccatgccctctgcctgtggtatcgtagtcctgcagtgtgggcaggcattgacctttggagaccggcccgtctctgccaggtcttcatctggacttggaggtgccccccaccccccgcacctcactgctttctccctcatcttcccagtggctgccccatcccaataagcagcatccagcctttgccaccagagtcctgacactgtggtagatgctttgccacaattatctaattttcatttctcccaacaactctctaagaaggccagtattatcctattttatggacaaaagctgaggctcagaagtaccttgccaaagtccacgtggccagcagttggaagaaccgggctggtggactgcagcactgccccctactctagacctgcagccctggggggttcatcctgcctgcagcagttctggggttgaccttccctcacccagcctggagtcaaaagccctttgatcccctcctttacaggtgttccgaataaaggccatcaggctgggagagaagctcctgccggcgttcaacacccccacgggaatcccaaagggcgtggtgagcttcaaaaggtagggcgccatcgcgttccccactggggctttactgcgaccatgcccaccatttgtgttttgtctgggtggtgctggtgaggaggctccaggggcagtaggcaggcaagcaggaggggggacccttgggaccacctctgttgaaccygttcttttatgatgtagaaactgaggcacagggagaggaccatacctaccttgggagccacagtgagtcggtggcacggtgaaagtgccagcgacttccctggacaggtgtttgtcaccaaacctgggtgtcagggtttagtccacataagcctgagcctcctggggtgggcgggggcagttcctctggacatcccacagtgctgtcttgacttgagagtcttccacaatggccccaaacactctcttcccccgctggggttccggagccagcaggcacatcacaccatcctcctcccacgaggaggtccctgaagctgctaggagatctcaggatcccagccctcccaaacaggagcctagctctcaaggagccctagccactgtccctgtgcttcatggagctacttagtagaagccacatccccgggcaccctgcagctctctggggccatcctcgaggccctccaacaatcccgacgctaggaaggctgtgacgttccactgcaccagacttcccatcccatctcctgaagtgatttctcatctcaggsctctcaaaccaacagaagcttcagccagctgtctgggaggggaggcaggggccctgggctctggttggaggacccatggctccgatcactgtcctggggaggttgcaccttcgtgttggcctcaagggcttcaccacctttctctggtcttgcaaaaagagggcttggcatgttcagcatcttcgtcaactgtcctcccctgtagttgggaagaattctcagggtgtgaactcattggaatctcaccataggccagggaggggggtgctctcgggggccgragaaatcccagtctcgatgccagggttgactcctcagagctggactcctggatctctgctcagatccctcttccataaacactgatcctggagagacacagccagctgtcatgaagcccagacacacacacactgtcctctggctccccctccccgggtctggggtaggacatcattgggggcatcccttcctcttctgtccccagcccttccctaggtctctcagagcagggacctgatctgacacgaatcctgacatttgtgattaaggaagcgcgtttgcttttaggctgtttgcctgctgtccgtgccgtgtgcgcatgtacattcatgtatatttcctggcaacatccgcctttttgttcttggtaagaaagtctgttgctaaaaatgcctggctcagagagtggcagggctgtatgggcccatgtggcactgagtttgctcttcggagggggcctcctggcaggagctgggctactgttgttgcacctgcccccggcagggctcgctgtgggcagccccaacaggagggggaagaacgtgggcccttcaggagagtaggtaaccagccctgccctactcgtcagggtgggaaggaccctgaggagaggccgttccctggcaggtgtgagctgcacctcctcactggtgtctgcacagaccggcctgggagactgaggcagggccagcctgacctgggaccttcagggacactggactgcctgggagagtgacggtggcctgtgcaaggacctctgcagccaagctggtctttttcactcatgctctctcacacacatgcagacactctcctgccacccttatagatcataaaggcctggatacacaagctggcctttgtcacagacatgctggcatccatacatgggcacacacattcacaaacgaatatccatttacacatgcatgctcccgccacacacaaatagacatgtcttcacaattgcaaacgtctggtgagaagtcactgtgtgtcaggcatcacgtgagcacgtgacatggattgtcttttcaacctcacagcaaccacagggactccattttaccggtaaagaaactgaggctcagagaggtgaggtaacttgcctgaggtcacacagcagcaaagcaaacttaattagaatccaggtctgtctacctccaaagttgatgattacaccatactcatgagtgtacctgcctagaagctacagccagggtgggaaggggcattgtggagcagcccctcctgccaggagagagaacacaggctatrggcccacttgcacttgaaaggctgggagaggagatcagagcttcctgctggcccattggctcacagggctgagcagaggccctcctggtctctgggatgctgcccagagcagatgcatttggggcacagaacacctaggatttggaattggattcagttctaccacttactctgtggcctcgccctcattctatgaaataaagacaatggtatctrcctccgaagttggttgtgaaggtaaaataagaaccaccagaaccacctggcacagatcagaaacttagtaacaacaacatttacatgtgcataattacataatgataaaaatgacaatacttacatgcataatttatacctcacaataactatgaagtgtgggtgctgtcacttaagggatgaggaaactgagttctagggaagttaaccaacctgcccgaggtcactttgttgggacccggagaagccaccattggaagctgggyaggagaggaaaggcgcccagccacctgcctgcctctgcccaggccagctcacttgtctgccagggcatctccaccacaggaagcccacttgggagggtgagcatgtgggggtgggagagaggaaggagaggcccatgtgggggaaaaggagaacaaaagactgttggagggctggtggctttttcctaccttaaacttccctgagaatgcaggaagaatcaattattcaggaagctctctgagactcactgagatcacaagctggagagagaagtctcagttagccttgggggaagagggacagagatggggcagggtggcacctctctctttccctctgggtgagtgcggggctgtcttagggtgggaggcccagcagacctgwttgaatcctgtctccgtcgtcttccgcctctgacctcgaacacttcacttccctgtatgagcctcagtttcctcctttgcataggggtatgaatgatgctttacgttatgggctttcaatgaaagtagtgatgcaaactgcttgtccccgtgcctggcacactataccggctcaataaatggaagttgttttgtttattcagatcaggagccaagtttcccctcctgtgcaacccatccctcccccactgtcccctgccccaagccaggatgaaggtggctgtctctatatgtgttgaggtcacttgaccccaaagatctcaaaacccgagcccttcrtctgttcccacaagctgggaggctggtaagtgtccctactttcccagaaaccacatccagccccaagaatggagtttagagagaacagcagtatcaggggatccccagccctatcccaggaaaagcagcacccctcaagtggcaaacagtgacctccacacccccacgcctgccttcctaagtcctgtccgtggagatggaggggcagacaggggccagttcctgggagggcagtgtgaccaggagcaaggaagcagagtgcccctggcagagccagtygctcaacctgctccacactaactacacctcagagcgtctacaaatgggaggaggtcacaccaccctgctctgccccacctctgtccaccacagccttcctgcagaccctgtgcccttggttgtcctaaatatcccacaggaaagataatcatgatacatatgaggaaactgaggcacggggggggcagcttgcccagaaccacccccattctgcaccttcttttcctctttattcccacaaaagcccaggaaggaggaggcatgaacctaggagatggaggcwtcgccttcactgtgtcttacggatgcaggcacggaggcatgcgaggattaagtggtttgcccgagggctccagctgagcgacacttgaacctgcaccttctggctccagatctcagggagactttcagtgaatgctcccggaaaggcagtgtccttgttccctatcctatgatcaaaagagaagcaaactgcacagcagttagcacaggctctggcatcagagccagctctgggtcccagctcttcaaattactgtgtgatctcaggcaggggacatcactgtcctgtgccttgtttaccgcgtttgcaaaaggggcagctgtgaggattaaccaggatcctgcctctgcattctttgtctttgaaagcacacagctccagatgtgtggtcacaccagagctccctgcctgtcctatgtaggttccatgaaattccaggccggggccatttcatgtccttgggcagcactgacagtgtgctgggagagggaaagagctaggcggggactctgcttttcattggtcccatttgcacccgaatcacagcactgtttatcctccacatgcagaaccaccaatggttgtgagccatccggtgccttcagccagaggacagcaacygggtgttctgtggggtctttgtggcccctgatagcattatccacatcatctgtaaattcagcataactcttgtaccaggtctcgagctcccaagtcttacaggggttgcttgatgatggagacaaagaatattccaagtcagacaggcctgggttcaaatgaacttcagtgagtcactttatctcagtgtcctcatcaggacatggggccagggaggattcactgaaattgtacggcgaaagctcctggttccatgcctgtcacatagtaggtgcccccaccgagcagctgctgttactgtcagcagaggagccagcctggccaaagggggatgacgggggctgcttctgtcttttcagtgggaactggggctgggccacagccggcagcagcagcatcttggcggagtttggatccctgcacttggaattcttacacctcactgaactctctggcaaccaggtcttcgctgaaaaggcaagtctcctccccamccttcttcctgcggagcagagggatgagcrtgcggctgccacagggttttcagaggcgagtgggtcctccctcatggatcagcaggagggcagtggggagcccgggagcccaagctaccactaaggtagcaaatagtagctacctataccccaacgccaggtggcagggaaggtgagcacgcagagtcaataagattctacagagggaaaaggagagacaagattctgccggggaaaaggttctcactggtctgcgtgagctcagtggcaaccacccatatgtgaaatctggagaaagtgcaactgaaatctaggcaccaccttgcattggcaggaattggccacccactgcagaagtcccctttccagagacatttagcttttccatgtgagatctgcctgccttcttccctgtgcctgtttagctcatgccatcagcaggctggcatggcaataccctgccatggcagatgccctgactgttcattcctgctgtttaaggccacatggggagcttagaacaccaatcagccctgacagctgctcatacctggccttgggcagtccccactagctagaagtgtcgctgtaggtctgacctcaaatccaaagaagggaagtgctcacacctccctcatatggcactcaggctccagcagctacagtccctccctgagggctgcctggggagatggaagccctgcccatcctctggagccctccaaggagaactctgtggcagtgccactcccaaagccttgtcttccccctggaatgcccgcctcttagaccagtatgggagctgggagatgactgatagattcccacctctatgccacggctcccagcaggcaactgggagatgatagattcccacagctaccccatggctcccagtatcatgtcgccatccagcctcaaagcattacctggcacagctgtgaggaaacagatttctgggcttcactccagggccaggcatctacatttttaatatgcattcatgtgctttttgacgcatggtttgggaccactacttactcaatgtaggagtccacctgagtgtccttaagaagctcaagaagagctgttcagcctcttcttgattactttctctgacaaggagctcactgccgccacccttaaacagtccgtcctcctggcagcccttccttcaaaagtgttttccttacattgagagggactctgcctccctgaaactcccccatttgaaagttcgtggaatgagttcaacctcacttcctggtagctcttattttctgatcctttcccacctccaagtcccatcccccaacctccctgttgccattgctcttaaatcagactcctctaggaaggttctgaccagctccgaatggagtgggacagggagctcactccagtccctggttattctggagtaatagctacccctgcctgagcacccgctatgtgctgggcactttataatggctctactcttcccaacaaccctatgaggtgggtcttcctggagttcccatatttacagaggaggaaactaagactcagagaggtcaagtcacttgccctgggccttccagctggtcagtgataaagccgtgattcaagcccaggatgtgctggctccttccagaccagattgatagagcaggctgcaggcttttgctctagagtscatccgtctatctctgtctcctctacatttacatactctggctattttcatcccccaatcatgcctcccacagaggcaattattggcagtcaacaaattggcccaaattctagaagcgcccgcaccctccaggggagctaatttggcctgcttcactgctcaccaccaggacagtcgagagtaacgcaggtacaagcacattcctgtccccgtaatggacttcgttaacataaatggatatgaaatctgacgtggcaaagccaagtgctgtcacctggaaaggaaggtctgcctgcagaaaggtggctctcccgcactcccggccccgtacacacataactctatcaacatgagacagtgtggtcccaagggcctttctctcccaaggggtcttgtgctggctaggacgtgctgagtaggatttaaccactgtcggagagcaggcactatagataaagccctcttgaattccacttctcaccttcatagccccaaaggttgcaaacccagcctctttctgctccagctggggcaggctgtgctccatggtcacggccctgatctgtgttggcccagtgctgccctgtgttgggcaggaatatgtatggtttatgttgtcagaattcattcacgtcctggctctgccacttaaggaccaggtggccatcagcaagtcaccagacctctctgagattcaggtttcttgtctgttacactgagataatcccttgtcggttatgagggttggagataatgtatataacggatctggctcaaaggaactgaaaaaggataacaactgttattgctttttataattattattatttttattaaaacactgaaacrcctgttaggacatggggttattcaggagcccaagcctctcccccgaaataattccagggcatcagataaaatagcatattactagattgggccatatgaaactgccaatattggacctttttttgattgccttatatacttaactgttttttaaatggccagaatacttaagcattctgaatacttaagttagcaacacttagcactaagcagtttttaagaatacaatacattgttatgaactacagtcatcatgtcttataccatagatctcttgaacttattcctcctaactgaaattttatatcctttgatcagcatctccccaacccttggtaaccaccattctactctctacctctacttcttttttttttttttttttttttgagacggagtctctctctgtcgcccagcctggagtgcagtggcaccatctcggctcactgcaacctccacctcccggttcaagcgattckcctgtctcagcctcccgagtagctgggattacaggtgcccaccaccatgcctgggtaatttttgtatttttagtagagacgggatttcaccatgttggccaggctggtctcgaactcctgacctcaggtgatctgcccgcctcggcctcccaaagtgctgggactacaggggtgagccactgcacccagcctctactctccacttccatgagttcaactttattacattgcacttataagtgagatcaagtatttgtctttctggactggcctatttcacttaacacaatatcctctgggttcatacatgttgcaaatgacagaatttctttcttttttaaggttgaattatattccattgtgtataccacattttctttcttttcttttctttttttttttttttttttgaggcagagtctcactctgttgcccaggctaaagtggagtggcacgattatagctcactccagcctcaatctcctggacttaaacaatcctcccacctcagcctcctgagtagctgggactatgagaatgtgccatcacacccagctaatttgtttgttttgtagagacagtttcgccatgttacccaggcttgtctcaaactcctgggctcaaacaatctgcccaactcagcctcccaaagtgctgggattacaggagtgagccaccacccctaacctatactataccacattttcttttctttttttttttgagacagagtccaggctggagtgcaaaggcgccatgtctgctaactgcaacctctaccttcaggttcaagcagtgcttgtgyctccacctccagagtagctaagattacaggcctgtgccaccacgcctggccaatttttgtatttttagtagagatgggggtttcaccatgttgccacggctggtctcaaactcctggcctcaagtgatccacctcccttggcctcccaaagtgctgggattataggcgtgagccaccatgcctggctataccacattttttttattcattcatctgttgrtggacatttaggttgattccacatcttgcctatttgaataatgctgcagtgaacacaggaatatagataatctcttcaacatactgatgtcatttcctttgtatatatacccaatagtgggattgctggatttgaccatttttgacctattaacaaggcaattttacctaaagctaacaaacgagctactgtcaattaaccccacctttaaaagaaccctccctaggccaggcacagtgactcacgcctataatcccagcactttgggaggccgaggcwggtggatcacttgaggtcargagttcgagaccagcctggccaacatggygaaaccccatctctactaaaaatacaaaaattagccaggtgtggtggtgcatgcctgtagtcttaactactgaggaggctgagacgggagaaccacttgaacccgggaggtggaggttgccgtgagctgagattgcgctaccgcactccagcctgggtgatggattgagactgtctcaaaaaaaaaggtcaggagtttgagaccagcttggctgacatggtgaaaccctgtctctactaaaaatacaaaaattagccaggagtggtggcacaggcctgtaatctcagctactcaggaggctgaggcacgaacattgcttgaacctgggaggcagaggttgcagtgagccaagatcgtgccactgcactccagcctgagtgacagagtgagactgtctcaaaaaaaaaaaaaaaaaaaaaccctccccaaaagaatccctcaaagtacccctaaagcagcaagcaatgaggaagtgttgagagttgggtgggrtaggagtcggccaggcagtggttctggggttgagactgtccaggtgccaggcagagcagtcagtggagaggctatggatcaggccctgtcacacccttcacgtggcaccagggcaaggccacgtcaccatccccgggttggagcctgcagtccgttgggcagctctcccttcctgcctcctcataaggtttcctccatgcatctgaaccagckgcctcccatcctcagcaggctgggtgcagtcggcttcttcggaagcatgaaggctcacctggtgtccgtctctcggcaggtcaggaacatccgcaaggtcctcaggaagatcgaaaagccctttggcctctaccccaacttcctcagcccagtgagtgggaactgggtgcaacgtgagtacagagacrccactgccccttattcagcrggttcctgcccaggcttcctaggaagaccctgccaggcccctgggctgagtgaggatgtgtctgtcagagccatgcagccagcaaggcattcgctcggtgctcctggacaccacctgccttcccatgcatcctgggggcttgcctgtggttgtctgctgctgcagtgccggatgtgatggctgctgtttactgaaggcctgccctgtgcgttccaaaccctaccttctctggccccatcaatggcgcagccttccatctcttatgctgctgcgggagcctcctgcattataccccaggttctcgggagggtcccaggtggagtcatccattctagaagtggctccaagagaggccaggcatcctttccaagcctctttgatcaggctccccacttccaacttcaatttttttttgtttttttgtttttgagacagagtctcactctgtcacccaggccggagtgcagtggcacgatctcggctcactgcaacctctgcctcccaggttcaagtgattctcctgrctcagccacccgagtagctgggactacaagcatgtgccaccatgtctggctactttttttgtatttttagtagagatggggtttagtagagatgttggccaagctggtctcraactcctgacctcaaatgatccaaccgcctcggcctcccaaagtgctgggattacaggcgtgagccaccacgcctggctccaactttaatttaaaaaacaaacaaacaaacaaacaaacaaaaaccatacaacagtgtagaaatcatgaattcaggccaagcacctgacgggaggccgaggcaggyggatcacgaggtcaggagttctagaccagcctggccaacatggcgaaaccctgtctctactaaaaatacaaaaagtagctgggtgtggtggcacgtgtctctagtcccagctactcaggaggctgaggcaggagaatcgcttgaacccgggaggcggaggttgcagtgagccaagaccgcaccactgcacttcaacctgggcgacagagcaagactccgtcccaaaaaaaaacaaaagacgtcatgaattcatctatacatcttagacctacaagaatcagtcccagagttttcagaaggtctctgttcagagacttgtttctcagccagataacagccagtcacccatggaacatcattcacaagcccccagccctacccattgcaacagaatggggtttggggtcgcttaggtgtgagagtgtggacaagtcccccaggcctctggaatgtgcatgcctgttgagaagcccagctytgggaagcagaggcaggccctggtcacatggtcatggtcagctrgaactggcagtgacaggttccgtgggcactgcctctagggcctcccaagacctggcagagcccccacycccactgtctgtgtgcaaacaaggacccccttccctttcccctgcctccaacccagtttttgtgacatcagcaagggctcaggggcaaagtgggtatgagtctaatgactgtgtggcttaggggggaattcactgtatctctttgaaccttggtttcctgtcctgcaaaatgaaagaagagaatgagatgcattctttgtgtgccatggaggggcgtaggaagaatggtcaaaggctgcaggaaacagatttcacttccatctgccaaagatggtccaagttgtcccaaaagggaacaatgcaagtggggcctagagaggcagcattggggacactgtggcgmagcagctgaggcctttccttccaacctgaacctcccccagaaaactcaacccaggaatttcccccagggacgacctcaccccaagtggcctcccgtaaaaaccacttagagaaatgcagagtatttttaaccaaaacacactgccgaatccaaaagtacggggagaaaatgaagcttgaattgcagattatagccacgggaagaggcagttcgataacagttgctggttttaattgcgagacctgactggataaggagataaacccctctgagctgctccagggcaaggcagcagaacccatgaaaagggctgaaaggggtgtgggcttcctagctcaacagttaccttggcaaattataagggagcccctgccgggaagcataattttcttctcaggcagagycagggcctgcaggtctgggcaaagtcagtcgcatatgggaaattgtttcctattaataaaatctgagccctcggcctgctaaagagcagagggggttataatgcccagctcgcccaaacgtctgccttcctcctcccctggccttggtgcccggggtcatctcaggtttcctgtggttttttgttggttttttttttggtgcatacgtattcttttagcacttgatagcattaccaccttgcataagcttaagtgcacgcacatcattttctcttcttgaatcttcagaacaagcctgaaggcaggacaggcaggttctgcgtagcccatttgcaaccacagaaattgcagcctagagaaacgaaggaggagttaggactgcatctcagttacctaggcctctgctcttgttggcttcccactcctcctggaaaccgagcttcaggggtaacaggggagccccaagacccgtcctattgctaagagttcacatccaggataaatccaccaggctcccgatggtgcccaacacaaatgagaccaccctgaggccaaccccctgagagctgccgaggaggggtcaccagcccctcggtgcggcacctgagtaacttgtccactgcctgaatcccacactttcttctgtgggagggaagtggcaagtccagacctccttggtaggtacaggagtgtgagctgcagcctggcagcttccctggcatcagatcggctgatttccaggcttgtggcccagcctcctgctgccaggtgtgacgagcgcattggcacggtcaggaagcagcagagcctgcctctgctctggggctcacggacaccagctcgtgcccccttcacacatctgcagatggggagaccaaggcccagagtgggcaggggtgcaccctgagctaatgcagaacaatgtcttctcattcctatgcctgtgcttctcccagcccgcctcgcagtgttggggaagaccacactcgtacacacacacacacacccctaccaccccacccaccctcccagacacacacacattacacactcccccatacacacacacccacactcccctcacatccacactcccctcacacacacacattacacactacatacactcctactctcccctcacacacccacactcccctcacacactccccccacacacagacccacacaccactaccctcacatacgtccacactccacacacacacacacacacccctaccaccccacccaccctcccagacacacacacattacacactccaccatacacacagacccacacacccacactcccctcacatacatccacacttccctcacacacacattacatactacatacactcctacacacactcccctcacacacactcccctcacacacacccacacacacagacccacataccacactaccctcacatacatccacactcccctcacacacacacattacacactccccccacacacagacccacacagccacactctccttacatacatccacactcccctcacacatacattacacactcccctcacacacacagacccacacacccacactcccctcacataatccacactcccctaacacacacgcattacacactcccctcacgtacatccacactcccctcacacacactacacacacattacatacactccccccacacactcccctcacatacattcacactcccctcatacacacacattacacactcccccacacagacccacacacccacactcccctcacatacatccacactcccctcacacacaccacacacacattacatacactcccccacacacacagacccacacacccacactcccctcacatacatccacactcccctcacacacacacacactcccccccacacacagacccacacacccctcacatacatccacgctcccttaacacacacacactacatacactccccctacatacactcccctcacacacccacagtcccctcacatacatccacactcccctcacacatacacacattacacacactcccctcacacacatccacactcccctcacacacatcacatacatccacactcccctcacacacacgcattacacactcccttcacgtacatccacactcccctcacacacaccacacacacacattacatacactccccccacacacactcccctcacatacatccacactcccctcaaacacaccacacacaattacacactcccctcacacacatccacactcccctcacacacacacattacacactcccccacacagacccacacacccacactcccctcacatacatccacactcccctcacacacaccacacacacattacatacactccccccacacacagacccacacacccacactcccctcacatacatccacactcccctcacacacacaattacacactcccccacacacacagacccacacacccctcacatacatccacgctcccttaacacacacacactacatacactccccctacatacactcgcctcgcacacccacagtcccctcacatacatccacactcccctcacacatacacacattacacacactccgctcacacatatccacactcccctcacacacaccacacacattacatacactctccctacacacactcccctcacacacaccacacacatattacacacactttcctcacatacacactccccttacacactacacacacacacttcccctacacacacccccacactacacacactcccctcacatatacatacactacacactcccctcaggcacacacactacacaccacccacactcccacacacactacacaccacccacactcccacacacacacctatcacccacactccctcccacacacacaccacacactcccttcacacactacacactcccctcacacattccacacacacaccccacacattacacacactcgcctcatgcacacaccccacacactacacatagtcccctcatacactacacaccacactccttgacacacacacacactctccctacacacacatccacacacccatacccctcagcacacacacacgcccccatacacctacatacaccacacacattcattcaccacacatacacactcaccccacaccccatacatacatacacacacacacacacamaagctgtaaagcagtgggactttcacatgtgagatgcccacataagtgcccctgagaggcagctgcatctcaacacygcggaccctaatgacctggctccctcccctgcgtgcccctccagaggaagcctggaccttgtcacgcacacactccaccaccgcgtgattgtggctaaactccttggcttggcattccaggcccttcctggcacagcccaagcctcccatcccggyagagcccaggcctcccttccattcacctgctcagcactccatgggcatctctgtgcgccgtgtagttactgggcacagagcgggagtcgcatgcaatccctmcccacaaagagcccacgagctagtgagggaggcagacccgtacgcaggcactcatcgcacacccggcgggcacccgatggcaaggggggcccaccacccaaggggagtgctgccgccgagggcttcagatggtgcctggccttgtttcacttaatccccgtggccaccctatggggagggaccgggagcaggcttgtgagaatgcctgagcccccgcgtggggaatgaggtggggagggtgcgccacaccgagaggtgacagtgctcgtagctgccgtgcccatgacggggctggagaagggctctgagcagaggacaacccatgacttccagcctccccggcccctcctctgcaacagacctgcccctcctcaacatgccaggcctggcccagcccttctcttctgtggggcacctaggaaggagagaggtgccacttctctcttccctccacaccagagcatagtccagcccaccccagccctttccagctcctccccaaagcacatgcttcatcttgtctgttccaatttttgcagatgctggtccgctctggaacacttgctgggccaggacttatttctggatcagggctggagggggccggaagggcgagtgtaccatgtggctggcctcctctcgacccccattcctgggtcccatctgtctttgccctgtcttttggtcccttggtcctcacatttgtctttctttctctacgtatctctgtcttcactctctggttgactttgtgcagctgtggaaggtgaggctctgcctttcaccagcttgatggtcttggatgagccatttaggcccagttgccgttctcccacctgggaaatggggccgatagcacctgccttgcagggtgcccaggaagattaagttataaataatacattgaggctcctggcccacaataaatggtagctgttgacgtgttctctctttctgtccctcttccccccgcccactttccttctcccctctctgtctgcccccttcttctgctgaggagttgaaaacactctgcccattccccccgccccgccttcagtccacccccattttctttcttctctctgtctctctgcttaagtgaatcagaacacagaactggtttgttctttgttaaatctatcaaatgcctttacgtttccctgttgttaattttcaaagcctgggagcgaagtgttttctgtcttgcgtctgcggtgaagtgttcctcgggcaacccgtcttcctcctgggwcggccctgggtggagagacctctggttcagccacagcctgtgaggccctgctccttggctggcccactgtccagcaggcagaggccaccagggcagagagggggtgttccaactcaattcttctctttcccgctcctttgaactccatttatctcaatttgctaaatttaaactctgtttttccagagtggctctacttgagggcttggccagctaaattaaggtttttcttcctctttccygtggccttttatgaagctacccagcattaattatcatgtttgtcactgggtaataaaaatctctgaactccctgccaccagattatctttgtaaagaaatgcaactcacttacagttaataaccagaggccctgccgtccccagcctgctaaggcgaggtgatttatagcacccgccggatgagcccgtgcacttttgtgcaggatgagcgctctctagacagccctggtttcctccaagtcgcaggctgtgtctgcctcgcagtacccattccaggttcggtggctgctggcgagatgcccgcttcctacccgtacaggcaccgggcccctgaggtcaggcgggtgtgcgaggccctgccccgtgagagccggcrgcagatggagataatgttcttgtcctctttcccttcacagaccatgtctcagttggaggactcggggacagtttttatgaatatttgatcaaatcctggttgatgtcgggcaagacagatatggaggctaaaaatatgtactacgaagccttggaggtaagacaagccctggattattcacaggccgctggtcaccagcccccggctctctcacggccgagcgagrgtgctgcgggcagcggrgccagatgggccgagacttgctcccaccccctgcaatgaaccggtgagaagattgacaggacagtcccctcccagccaggcattttacaccctgcgaccctcccacatgctctaagactggggctttgttagatgtgaaacctaagctctgggaggtgaagtcatttatccaaggtctcacgggaagtgaccgtcagtctgattcagaaaccaccacctgcttggtgtctatgctttggctgatgtatcagagcccagagtgcagctagactgtgggctggcacccccaagggtggctgccagagtgagaccctcagctgtgtcttccttggacagtagaggtgacatgagaagtatgtccaagctggaagaggcctccttcagtggagcatccagttttgctccttctctttgtgtggatggaaaccaaggcctagagaggggaaggcacttgcccaaggccacacagcacagagctggccaagctggcaccactgctggtctgtccgcggggtgtggaatgaacgagggctggaaggctgaggtgagtccttccaaagaggagagacgaggacgaaagagggaatcagttagcytgagccattgggaagagggctaaggaatcccaccactcaacagatactttggagcccaactaaggaaaaggcactgggcctgttctgggcctcagtttccccataaagcaagttgagcaagtcggatctactctgccaccaccttggtctacactacctccttattttctctaaactggcttcccctctgccctgccctctgaatgctgtgtggggaacagaagccagaagagctggacacgcacatccctctcctctctggcttcccttagcacctggaataaatccaactcctctcctttacccatcgggtccgccttccctgggccctgctgatcaccctgacttcacgcctgcctctctgctctgtgctctctgggccctgggcaccagtcttcctgctcttcctcagacaccccaggcgactcccacctcagggcctttgcacttrctgtcccctctgcctggaatatcattccaatggctgggtccctttcactagtcaactctcaattcaaatgccactgaaactaccattcccagcctgtcacatactcaggcttattctcttcaccttcatcagcctctaaaattatcacaggcacatatttgtttacttgctcattctctatcttccccaaatagaatatcagttatctgggatcagagatcttgtctgctcctaaaacagtgcctggcacatagcaggcccatggtaactgttttgtgaatgaatgaatgcatgggtgcatgaatgctgaaaggatgaatggagggaaggatggatggagggaaggatggatgggtgagtagatagatgggtgggtgggtgtgggcagttggatggatggatagatggtctgtgactaccctctgatcacaggaatctggccaggaatggtggtgcttaaaagacacacattgaaacggactgctagagccatggaccctttaaactgtaggctcagtaatgatttttccctgctcagctccctggcacaagacctcagtcatgaagcagcttctgggactgcagtcccatctcagtctgggtcccagtcttgttcactcctgtctttggctgagctcagaccagagccccggtcagagaattagtgtgcagctggtggtggccggagtgtgctgcccagaggccctttctgccttcccttgcagagtaaacataaagttaatgagcagccaggctccctgccctcrgggcacacagtagttgagccatcaagggaagaaatggccatgaattatttaaggaaactcagagcacttgattttgtaggagagaactttgaatagaagaggctttgctctctgcatttgatcttcccagtgaagagcctggagcatctttgaccctgggtgaaggctgggcctctggcaagtttggggttttgaagaattttctggtggttctcaaccttgttgccatgttaaaatcacctagggagctgcaaagtcctgatgttcagactgcacccctgactcagaacctctgggcactgggcccgggccacacataaacctccttgggatttcgtgtatagtcagggttgggaaccacccaccaaagaccttcacccctgcctgcaccttaggatcacctggagagctttaaaaatcccatgtctagcctcaccccaggccaataaatcccaatctgagatttttaaaaagttccttccacaattctgttgtgcacctggggtcagaaaaccaccaggttagaccagtgtccagctgggatggaccggggagggtcagacagatcggactgggcacacccctgagtgtcacggcaggagacaaagaagaagaacaggaagagctttggtcactttggcctcctctgagctagtgctctaagtacctcatcttatttagcccccatcttacagatgacgaaactgagggtcagaaaggcccaaggtccatatagcaacaagtgtcagagccaggacacaaacacgggtctgactccasatccattgggctggcctctacttaccagcagccaaatcacagaggggcctggcttgcctgaaacccctcccgcgagtgctcagatggggctcctgcaggcggcaaaggaaggaacagccagcgccaggcactgagccaggcttcgaatatcctctcctttaatcctcacaaccaacccaggaatcattactcccattttatagatgagcaaagtgagtsttcattaaagtgaaataacttgcccaaggtcatctagctcctaaatcgcagagctgagattcaaacccaggcctctcgccacgctgggctcactgcctatgggttagccctgctccacaaggaacagcacaaatatttttgttaatacattaaaaaaaaaaaaccctggtcttgtgccccacttagctccytgcaccgctgcttgctgtgatttaaaccttttaccagtcgtctgccagcctgcactgtcttgtgttttgttttaraaagccttgttttttatctttgcatctgcgtgtctcagttgtgtcttcaaagaggcagtggtttataatttcctcttgactgcaattacttagcttggggccaacccccagtggaaataatgtgtgggaggcggtctggaaggtgcaggtgccaggtctggtgcgcagcatcctgaggtctccctcagatgtctgtgttctctccaaagtgttgacaactggtgactcggacccaggtttctgagccctgacactcctcccctgcaccgcaggcttagtgacgccgagcagctgccagggacatggctctgcccgggagccaggccgggcccagagcagacccctgcctgcagcccggctgctctgcaggtgtcctcagcactcccccatgtggagcaggtgccctggcatgtcacattgtcagcgcttttccatctgccactcagtgtgggtcctgcagccagcccaccagccctgggccctgacaggagagaaaaaaggaaaaaacagacccaggagtgagcgagtgttccttgagcatcttctgtgtgtcgggcactggctggaggctgctgctggtggcttctgctgtcacacggcactcagagtctgagagagagacagatatacaacagaaacagatgccaagtaggaatggcaccatgtagaagggtgacaggggcccataggtaatggcagtggcagtgctggtttaaattggggcattctctccaaggaagtgacattctggaggaggtggggttagcagagtcagggctggagcatgcaggaaggaggcgcagcaccagctaagccccgaagcaggaagaaaaatgcagctttcaagaatgtcacctttgcagagagattttccctgacctccctctgcaaagtacagcactgcccccaccccagttttttttgttttgttttgttttcttgggttttttgtttgtttgtttttttatgacagagtctcactctattgcccagagtggagtgcagtggtgcaatcttggctcaccgcaacttctgcctcctggattcaagtgattctcccacctcagcctcccaagtagctgggactacaggtatgcactaccgtgcctggctaattcttatatttttagtagagatgggtttttgccatgttgcccaggctggtttcaaactactgggctcaaatgatccatctgcctcagcctcccaaagtgctgggattacaggcgtgagccactgcgtccagcccctccccgcatacccctgcattttttaatctcatcctctcactttgttttattcaaaatgctgatcacaaattgtacctctcagccagttgtggtggctcacgcctgtaatcccaacattttgggaggccgaggtgggtggatcccctgaggtcaggagttcaagaccagcctggccaacatggtgaaaccccatctctactaaaaatacaaaaattagccgggggtggtggcacacgcctataattacccagctacttgggaggctgaggcacgagaatggtttaaacttgggaggcggaggttgcagtgagccaagatcatgccactgcacttcagcctgggtgacagagtaagactgtgtctcaaaacaaaacgaattgcacctctcatatatatttggttttgttgggaattctctgcactaatgggtgagctccctgaggcagagtccaggctcctctccagcacacctgtagccccagtacctagcacagcgctgacaccaaggaaatattacatggctgccgagatattgtaagccaggagggtacctgagtraaaaaaggccagtgtaggtgaggtagggtgtgaggagggaggggcaggagacagactagagtggaatcataggggtcagtaattagtggggactcgctctgtgctgggaaataggccaagtcctgcaggcatatctcatttaattctcacaaccctatgaggcagttaatgctcttatccccagtttacacgttaggaaactgaggcacagagagaacatacaacctgcccagtgtcacacagcgtggaactggtggagatgaaatttgaacctgatgagtctgtgccccagagccatgtccatagaatcaggtccaccctcaaggtccagatcgtggagtcttggaggcccctctggtgttttcacataagggcacttggaaaccactgaaggttctaagcaggcagatgatatgatccggtttgttaattgcagagtacagagaccccctggagagtagattggaggggtgaaagtggaggcagaggcctggaagggccccagaggaccccagccatgggccaggccccaccagcccatggagtctggcctcgagactgtgtgagcagcttcctccctccccttggtccccagggctcctggggtgagagcagtctgaccccctcacgcccccgacatcccagagtctttacaacagcrtcacctcccttcccaccaaaaggcatggccatcaggtagtggaagaagcagagctctggacattgtggggtcttgtttctaggctggtgtggctgggtggcctgggacaagctgccacacctcccatttgtctgtgtagggcgcggcagcccrggtgcctggcttgctgtaggcattaaatgaggaaacgtgtgacaagatactcctagagaacagctcttaattttctgcaggttctttttgagaaactggtaagaatagatggacactcttcccataaagatgcacatccaccagaaagtgttgggtacagttttaagggcctggacccctgaagcccatccacaggccagctgggcttctggttaagatcaaacagaggacataatggaggaggaggatcaccttaaaatattttttaacgttttttaaaacatggaagattttaaaggctgtgtaagagacttgccctggggagctgccctgtgtctgagcctcccagcgaatagcagcccctcctgtgccctggcaggcatcttgaccagcagagatcaatgggcctcctttgcctgggatggagggcttggcagagctgcccttgctactgtctccaaaatgttcattttccatcctttcccccccttctctgtgccctcccacgccccttctccctgcccaatccccaccttgctcccaggcgatagagacctacttgctgaatgtctctcccggggggctgacctacattgccgagtggcgaggggggattctggaccacaagatggggcacctggcctgtttctccgggggcatgatcgcccttggcgccgaggatgccaaggaagaaaagagggcccactaccgagagctcgcagcccagatcaccaagacgtgtcacgagtcatacgcccgctcaggtaaccctgcaaggggaaggggcagcaggagagactgaggctagacaccaggaagaactggaaagaccggcagcagtgagcgaagggagcacatggccttagggaagcctccccttggaagttaagtagaatttgagagaggtactctccaggctccragaccataccctgaatgaaagggaaactagtacagacacaggaagcgctttgcatgtacctggtactcttccgcacttgacacaacatcactgaacctcaccacacagatgaggaaactgaggctcagagattacttggccaaggtcccttgagaggggcacagagtaaaggatcctccagccccggaggcagaaacggcggcttcctgagcccggcacatgtcccaccctgagtctcctactttcaaatgtgcctctgcctttcccccggcaccctccttagagggggtttcaccgcctcctgctcccacctgtttagtcgccctctttgacccatgatcaccggaaagcctgagagcttggtcctccccacccaccactcaccactgaattgtccgatgctagaatcagaggtcacatttgagagcctgagcctggctcctcattctacacagagaagtggagtcagcccagagaggggaagtgacttagccaaagtcacactgcacatgaggaattgatcctgggctggaacccaggccttctgatgcctggttccaccccgtgcgcaaactgcacccctcagaaaaatccccagcccccgtgtggtcccaggagacgcccaccgctctgagtggtaatcccagtgttggttggaggggacgacccaagatttgcagtaaaaatcccaggctcaagcagcgcttgacaaaatgactgttttctgatggccaggagccgctacaccatttgaaaagattagagaggccagatgggcagcctctgttttcttatctgttcgatgggaatcatgacacaggtctcagagtgaggcacagggtcccatgagaaagtaccttggcagccacctttggccagcagcactgcaggcacttgctgaccgcccatcatgatgtgtctgtgcccrccccagctgaatggggtctcctggagctgtttccaggaagtcagagaytcgcaatgggtctttaaaactggttgtccattctcttcaaagagcttgctctgccagggccataaacaaataagaaatctcaggactaataaaaggctcgctatttgtctgagacaatcagcccagaccataaaagacagccgcttaataaagcatattgttctagccagcctcggcttgtcctgtggacgcctgtagcagtggctcctgccttcaccccactagcgacttggcaaaatgactgttttctgatggccaggagccgctacaccatttgaaaagrttagagaggctagggtctagctaattcctcttccctgaagccctccatggaagagcaggaagtcctgcaaacctctaacccctgcctctaaagtaaaagcaacctagggcctctcagggttttgaaccctggtagtagggaagagggctcacattaggaatggagctggggacttgggtgacctggacaggagggacaggcattaaagggagaaggatctggccctcataccctacatgttgggcctatgagggttagacccaggagggaaagagcaccgccctaggagaggcatcagacacatccagggtcaagtcccaactcagccacaactcgctgtgttaccttgggcaaattacttagcctctctgatcctcagtttccacatgcgtgagagggatagtagcaattaccttactaaagaaacattttttaaggatagaaatagtgtattaaagcacccagcacggcctttgaaatcataaatagtggctacagaggtggttataattatggccatatgacaagaatgacagcaaattgcctcaaaaccaaacagtgacaatgacagaacccaggctccctcaggccctccttcctcagctccctctgtgggagtaggtgcattcctgggcaatcttccctccatctctacctcagctgttcccaaactctcgaagtttgttctgggaggtgttaaaagcagttttctaagacaaagggtcccaaggagaagcctcatttcacattagcatattaaaggatctgataaatcctgcagatgggagacttattttgtttaaccctcggttccccagatgtgttgaaacccgaaaccctcttggctgaggtctggctaacctcttgcagagctattgcctcaaagtacacagttgtggaaccccgcccaaaccttcacctacccagactgctgagtagctcatttggactctcagagtccaaagctgctcacatttccagtccccragggtcttgttctgtccagcccaggccaagagggaagctgtgcatctgcccggtgcagccttacacagcagtccaggcaggggcaccccacacccacacacmcctgacatcaccctggccgcgggttcaaggcaactgacatctctcctggatcccgaaaagcaggaggtgggaggtctgacctgggccctctgcttggctgtttccccagacaccaaacttgggcctgaggccttctggtttaactccggcagagaggccgtggccacccagctgagcgagagctactacatcctccggccagaggtggtggagagctacatgtacctgtggcgacagacccacaaccccatctacagggagtggggctgggaggtggtgctggtgagtgggccccagggatgggcagcaaggtgctagatgcccctgagaatttacaggctgggtgctaggtgccctggcttgggcmtggagtggaaggccaagccacgttgacctctgaccacagttcagagtgcaaagggtcaaggtggtggttacagagccaagagtccccagctgggcaaagttgtcctgagacaggacaggccagacttgtgaagagggttctgagtgcccatatccttggggcctgggaccaggcctcagcaaacttagagggtcagaggctaggcagctgcctagagcaccacgcaggcaccacgcggccaccgctgtcccaacagacgctttcctgatctcgaagctgggcagctcacctccacctccctcctcttcccacaggcagcccagcctgagggacccccccaccctagtctctactggcccttgaggcctaccctgccctcagcctccggccccacacctaggtggaaatttaatggctgtcttgggggaggtgtcaaaggcaggtgtggggattccagcaggttccctggtggatgctgagccttctctgcccctatctcccccaccacccccgtgcccattccgagcattgcactcagacggggtccagggcatgctcaggtttactggccctgttaagtccacctgcttccccaggaccattgttcttggccttcaaaggccaagcgtcttgtgctcctatgcccagtccatagaccccctccgtgggtagaaattgtatttatcagcctataggcaacacggcraaaccccatctatacagaaaaatacaaaaattatccaggcatggtgacgcacgcctatagtcccagctgcttgaggggctgaggcaagaggattgctcgaactgcagaggttgaagctgcagagtgagctctgatcgccccactgccctccagcctgggygacaaaatgagaccttgtctcaaraaaaaaaaatgcatttatatagaaagatgaatggcttggctcacttgcctccagcccaggggccatctctcctgagaatccctggagtaccaagtccgtccccaaatcccagcccatggccatcacccgtggcttctcttcacctctgcctaccactgtgggtgaayctgtaagaccagcctagtcccctgaaacacaaagagaagcttcctctaagttcaaaccaggtgaagagctcaggacaggcagcccatcgggccagagctctcagaggtgtgggtggaaggagtgtggcccctccagcctggggacaggtggctaaaccccgaaagaataatttgaccttctgttcccacaaatgccaggagtccccagccaaggggtgggggtgctgtctgctttcttctagctccagcctgccaggcatgcacaagtcttgaggggcctttcctgtcccgtgttaaggctgttttcctcctcctcttccccttcctcaggccttggagaaatactgtcggacagaagccggtttctctgggatccaagacgtgtacagtagcacccccaaccacgacaacaagcagcagagcttctttctagcggagacactaaagtgagcagtgtgggctcttcctagggatggacaggtgggaggttgrgggtaggggtccgcagtccctcccctccacagtcaggttctgtggtcacaggacgggagcccaaaagggstgaagggcttgggatccagagggctgcaccccaggtgtgagccttgggccaggccgctttctcggagagtgagactgggctagaatccaagttccctagggacgcaccgtgtgataccgcaggttccttcagtttctcgcttatctccccaggttgcttccgttctgggaaccgcgtcctcgtgtgtaaaatgggatagggttaacgatgatgatgtcagtgctggttgctggcattgactttccctcctgtggcctctgcagtgtggctgctgtgccctcctcgatttcatgccatggaagttggccatcccacttcctcactgttccccaaagcaagccccttgtgctttaaccctttagggtgggtcagaatgatcagttccttccagtgaggaaaaaacccacaacctggaagctggagttctagagtcacaaccccatgttcttctcagtgccccaatgtgtactctgaatatagagtcttagtgggcagcagcggggcacgtgagagtcaactggactgcagcagccctcaggcacccctgcagagaatctggaccataagggctcacatacagggccgggcaggtgaagctggctgatggcagagccagggtaaactaagtccttctgaccccaaagctcaaggcttttctctgcagccacagcctccttccccaggactagcacccccaccctgctgcccacagttttggggttgcaaggctccagaccttgaccataggcctatcacaraggccctgagacttgttcccaggcccacccttcttccccaggccactgacagactgtgtcttgcttccctgccctgcrtggggcacaggtatctctatcttctgttctctgaagatgacttgctctccctggaagactgggtgttcaacaccgaggcccacccactcccggtgaaccactcagacagctccggcagagcctggggcagacactgaccccatctcctgccgccgccctggggccgccgcagggatgccttgccttttcaggatttgagactgttctcaaagggattgggaacgaaggccccatctcgggcagacccccagcagatgtgtcggacaagcaacttcttttcctctgtgaggagacaagacttggagactcagcgatgtcaggccagggccatggccacactggcccacacattcctttctacagagaatttctatgaagcccactcacttgccattccagggccaaaggaccggaggtttgcatatccgccccttgtatttgatttgcttccttttggtttcttggtttttgtttttgcttgattttgtcttttctctacagtttagttttgtcacaattacacatatagttttcaaaatcatgcactttctaaaatggtgtcatcctgaaaaacaaaacccagtgtttgcacacacacaaaatcttgaccccgttatctatattttaaatgctttttgcccaacactgaccctatgttcaactttgtgtcatttaccttataatttgaggaggggtttccctttgggcctcagtgttacaaattactagtgctattttcattattattgtaatggaaaaatctgtggactagaataaaagagtttattgaataagaaatatgattgggctcattgcacatcagtgactcctagaaaaaccattgcaatgttaccatcagaaataataatcagccagcagttgatttaaggtataatttagtaaacgattccaacttctattacctcccctgaaatcggtcctgatatattcgagaagcatgaggccagcccttcagatgcagttgtttatttatactcaggtttagattgggaagaggcccagggaggagcagcaacttgcctgaggtcacacagcccaaaaaaggcaaaggagagtctcgcccctgccgtctcctggccaccccagttgagtgtccgtctgttccatcattcagcagatgcttggtgagtgcctgcaacggaccagacactgggctagaggccagggacaccgctgagagtgagacagtcataagccctgcagtcaaggggtcaagaggggagaaagcgatggtaagggaaactgacaagtaagtgaagtgactgcaggtcataggaaatgctacaaaggagatagatagacagctgaggacctaccctacggggtcagggagggcctctctgggcaggtgaccttcaagccaagacccagaagataaaaaggagcagccgaaagactatctggcagaagaatgaacttcccataacccagccccctttcccaccctccctgatgccctccctgggagggggcctgaaacactggggctgttgtgcagagcaaggagctcaggtcctaacactgaagtgacagctcttcctcccctgacccttttttttttttgagacccagagtctcrttcagtcgcccaggctggagtgcagtggtgcaatcttggctcactgcaacctccacctcctgggttcaagcagttctcctgcctcagcttccccagtagcagggtgcgtcaccacacccggctaattttttgtatttttagtaaagacgaggttttgccatgttgcctaggctggtcttgaactcctgagctcaggtgatccgcccacctcagcctcccaaagtgcggggattacaggcatgagccaccacacccagtcctttcctggcacatttgcagcttgtcaacacagcggaaatcacgggagaatgttgagcccttccctgggctcagctgcttgctctgttcataagctttaatagcccccggggctctgggccaggtgacccggctttaaatccctgctgtgtgaacttaggcaggtacctcccctctctgggctcttcttttccatcaagcagacagaaaacctcaaccccacaaggttgctgtgagaagaagtgggaagctgctggttccctgggcacaggaagtgcttgttccttgttctggagactcaagacattcccagaatcttcttaagcagagctgctggggagtagcccctgtagcaagtaccatgctcttgacaggcagcatgagagcgtgactcccatgacccacctgtgctcaaaaaaaaaaaaaaaaaaaaagcaaaccaggaaaactgactacacaaacattgtagaaagattagaaaatagaagcagaaagaagactcattggccatcccactctctggggtgaatactgttatattttcttctaggcctttttctatgaatatatagaatatagattttgccaccgtggtatcctactatgcacactgttttcttataatctgcttttgcacttaactgtacattgtgaacctctttccatgtcaacaaatacatgtttatctcatcgctgtacgtgcttgtggagtattccattgtgtgctgtagcctactttgctgatctaagcccctgttgccaggcatttgggtttgtgtccatctgggattttagttacaaatcacagaaaccaactctgtcaacttaagcacagaaagggatttactgaaatgccatggggtggcttatggaatctcaggaaggagtaaacagccaaacctcaataagggctagaaagaggacttggccagggaccccttcaagaaccagggaagcctctctaggcaccaccatcaggagggctgaatccaaatgtttccagatcctgctgtggctcctttccatgtggcctggcctgggtcacatgcccgccccagccaagggcagagccaggcatcttggcttggcagaccccctaagattaccctgtgcaatgggtgttgggctgttccctagagaaaaacatgagattcatcaccaaaataagggatctgcaggctgcacaggcaaaaacagcaggactgtttacagttagctttgatttcttcagtattatacagagagttatgaagagcatacttaaccatcctccttttcacttttgtccaattatgtcctcagaataacttctagaatgtctctctgtctcaaagccactttgcagttccccaagccccaggctcccccgccaggcccgtgcggctgtctacctctcctctcctgtcctctgctgtattgctgggaggaaattgtaaaaatgaatattttaaaatgtatcctccaggagggcccttgcaggtggagaaatatcatccttttggcaacttaactccattccacggataaaaataagtacgactcaagacaggccgagaggagagaggaattaagggatgactcatcctcactgaaggtaggagagagctttgcaagccacagaatctgaacacccaaacctctcactgaaggtaggagagagctttgcaagccacagaatctgaacacccaaacctctccctgaagcagccctctccttccccagctgggggtcagcctgtggctgccaagctcattttaagcctcatctgcgccctcgctgaggatggaagcaccatttgcacctgcttccctcatagaagggtgtgatgtcagctccttcccagaaagcttcatcaacacccagctcctggcactgaggtctgcagagcctcaaggccccgggaagggggacgagcagggcacagtccttttctaggtgcctccctttaaatgactggctatttggtcagaccagccaaatgcattgggaagaaaagcaaaaatggaaaatctgatttaaaggcagcatccaagatggatgctcagttccgttccctctgctttgaggaggtgaccccactgtggtttgagaaagtgctagagatgaatgggccagcttcccccagcgtttcccctgggggcctgtccttggaagtatggtcattggtcatgtggcacaaagatgctcggccctctgtgactaatgcttaattacaccctactggaggaagggggctgattctattttttgtatctgaaaatatcagtttggtttcctatatttggagcactgttttgttcctgctcagcctgtctcttaagtcagagcttctcaaacgtgcacaggaatcacctgggagcttgttaaaatccaggttcatgttcagcggctctggcatggagcctgagattctgcctttttttttttttttcctgacacagggtcttattctgtcacccaggctggagttcagtggggccatcatagctcactgcaacctccatctgcagggctcaagcagtccttccacctagcctcctgaatagctgaaactacaggtgtgccgccacatccagctaattttttttttgtcgctacatttctcaggttggtctcagaatcctgggctcaggctatccttccgcctcagctttccaaagtgctaggatggcaggcatgagccactgtgcccagccagattctgcttttctctaacaagctcccgggagatgctgatgctgccagtccttggaccacactttgagtagcaagaccccagttggtggccactgccttggtttctgccttttatttgcatccctggagctgtaactgctccagagtggagtagaggggctcaggtattaggatagcatctatagataccttgactgcaaagcgacctaccttaaaacaggtgtgtgcctgccacctatgtcaacagctctccattcttcaggacagccaggataagacaggagcaggctgctggtggcttagaacagtggcgtccaatagggtcaccccatgtggatctggaatacttaaaatgtggcaagtgcaatggaggaactaaacttttaattttatttccttttttttttttaattgaccagagtctcgttctgtcaccaggctggagtgcagtggcgcgatctcggctcactgcaacctctgcctcctgagttcaagcaattctcctgcctcagcctcccgagtagctgggactataggcgtgcgccaccacacccagctaattttttttttttttttttgagacgaagtcttgctctgtcgcccaggctggagtgcagtggcttgatctcggctcactgcaacctctggcacccgggttcaagcaattctcctgcctcagccttccaagtagctgggattacaggtgcatgccaccactccaggctaatttttgtatttttagtagagacagggtttcagcatcttggccaggctggtcttgaactcctgaccttgtgatttacccgtctcagcctcccaaagtgctgggattacaggcgtgagccaccgcgcctggccaatttcatttcattttaattaaatttaaagagctatgcattgctgctggctgctgttttggacagtgcagaattagaactcagaaagcaactaccctgttggtgctgcaaagacctccatcacctgcaccactacataaatcatgttagcagaaaatacattgtttagggactcaaggattcccttgaacatacctggttatttttatactcatcccagcctgttttctgcacaagcctctgagtttggttttgttttgttttgtgttttcttactcactgtctgcagcagggcatgcagtgggtaggctgaaggcaagagaggcagaggggtgcgacaggagaggacaacccatgtcggtttcatacaagcacaacatttgaaactggtggacctgtgttcagctctgccctgcccttttccaggactgtgtggccttgggcaagccccttagttaagctcctctgagcctctgcttttccatccatggaaaaggaaagtgctttcaagggttaatcaagcctccccaccccaccccttgtaagaactcagtgcatcctagcagtgattgttatgatgtgaacctctttgtaaactataaaaccttgtgtaaatgtgaggcaaaacactgctgtcaaaaattcttctttttaaacaaaatgctctgaaacttgggggaaaccgcatcaaccaggcccaggagacagaccaaaatctcaaagcaataaatctgaacgttttctgcttttcccattgaggaagcattttgccattagctagccctgaatctacagaaattgggaaactgggatgaagatttgttgactgtccaaggtcttccagggacccgtctggtggtgggggatgctcgggcaggggcccagggctgaggaagatgccgagagcttgcccaggaatgtttgaggtccaattagtgtttcctcttcatggagtacctgataaatcctgtctacaaaactttggaagggagatgggcaggaaaagatggcacccccatttatagaggagggaactgaggccctaacaggcttgctccagggtcaggctctgcagccctagccacctcctgggtcaactcctacattgctgatgtcgtactttcaccttctccactgttgaattaaccctagcccaaatttctggagcatctgctcttccaaagtctgactcaatagagatgagattcccagcagctgcccgaggttagaaaataccagcacactccttttcctctggcagttatcctagcaaaatcatgctcccagaacccagataacccagatccacgatgtcctcgccatccagggaccagagcaaggacagagtgtaaacagcagagaacggagaagatgtgggccagcgccatacccctctgggccacttctcaaagagagagacctttagggataattccatcgtcttgcacaagttacaaaatttcaactgtggctttcccaggtcttaggacctgcatggaccaccttctccaggaattgagttcgcacggagatcactagagatggagaggtcagggatggcccctggggagctgacatttgtgacaggctgtgcaaagagcattccaggcagagggaacagtgaatgcaaaggctcagaggcaggaagtgttgttgcatctgagacacagaaaggcagtaagcgagtgggagggtctggggggtcaaaggaagtcggcagaaggggttccatccctcagtgcctggtgggcaggtaagtacttgctatggtttgaatgtcccctccaaaactcatgtcgaaatgcaattgcctttggatggtgttaagaagtggaacctggcttgttaagaggtaattagaccatgagggctctgcccttgtgaatgcattaacgtgggttgttctgaaagccgattcagccctcgcttgcttgcttgcttgcttgcttgctctctggcactcttctgcccttctgcctctggccacaagtggacgcagcacgaaggcccttgccagatgcaggcccccaaccttggatttcccagcctctagaaatacattcctttctttataaattatccagtatgtggttttctgttatagcgacataaaatggactaagacagagtttaattttaatctgagagcagcaagaagctaggaagagtttaaagcagcacatgagatgacccactttacatttctgaaagtttcctccgacttctgagtggagagacctaggaattctttttcctctcacatctgtctcagyggaaaaccattctcagattcctaagcggaagcttctgaagcctgtgccccaggagtgccgcgaggcccgagtgccctctgccctgtgtgcatgacctctcctctgcttttttactccctgggttttgaggagcctgggagacttcaagggcaccagaaacctttcctctgacccttcttccctgtagccgtggatcaagcctccaggctgctgccccctctgtttctaccactcctttcaagcgggcccagctgcgcttttaaaaaatggaagctgcttcccaaggtggcccggctccttctctcgcacatgcgccaacrgaggctgtttgtggggcctggggccttcttttcattcttctttgaaaccttcaggatttgtggcaggtatgaagtcagggagttctgggtctctcaaaagcacatattgctgaaacataacattgtctaccttcacccctcctccatgggtaattccaagcaggacactgagtgctccgcacctgcccaggttctaactaagtctgcctggctgggtcaccttctgctgtgtcattctccgtgtgcttcctgaagggtcctgactccacacggttccccacctatgatcaccatgtggtctggacaccttccctgtccacagctcacctgatcaccaagggaccaccccacagccttgactggtgccaccaactatagctctcaa

SEQ ID NO: 95167 - DNA, 71738 bp, Homo sapiens
  misc_feature (1)...(71738): n = A,T,C or G
ttcttatagaaacaggtccctggggccagttacatttcagaattcagaatgttccagatttcagataggtaatcaggtgcttataccataaacataatacccccaagcagcgcctggaggaacacccaggagtcacacgccttagagttctgcagtagaccaaaatgggggttcaggtgaggttctgctgccaaatgaattcaggtcagatcaggttttgtcaaatgaattatgaaaaacctttgggttttagagctttgggggctttggaaattccagtaagggattgtgagcccataattgacactcattgagttctgaccatatgccagatttgggctaaggatgtgcattctcacagccctgtgggagaagcaggtttttgagattttttattttattttatttttgagatggagtcttgctctgtaacccaggctggagtgcaatggcacaatcttggctcactgcaacctctgcctcaagggttcaagcgattctcttgcctcagcctcccgagtagctgggactacaggcttgcaccacgctcagctaatttttgtatttttagtagagacggggtttcaccatattagtcaggctggtcttgaactcttgacctcgtgatctgcctgccttggcctcccaaagtgctgggattacaggtgtgagccaccgagcccggccatttttgcgatttttaaaccattttccttcctatatatccttcccttcacttattctcattcaagtcagaataaggctctgcattcattgatgtggaggtgggaggaggctgggtagagcctgaaaatctctcttgcttaattttgacaaagctgctcaagcctcagactggggaggaaatgtaggcctttgataaaacacttctgataagcaaaataaatacataaataagtaaaaaacacaaaacaaacacaaacaccaaagactggaaatagatcccacacaccaggctaggtagaggaaggagaagggctgggggcttctggcagcattcccaagccggcaacactccctgaaggctgcatgctgtgtctaaacaactggcatcctgggtgcctctcagtgtgcttccctgggaatggagggaaggggcatcctggctagacactgcttggctcaggattgtctttcatttgctttctcattatgttgtgtaagtgagtcttctctttgcaccagagcaagtctatttctctctagcccaagtacagaacttgttgttgaatagatattgctcaataaatgctcatttagggccgggtgctgtgagaggtcaaggagggtggatcgcttgagcccaggaatttgagaccagcctggggaacatgacgaaaccccatttctgcaaaaaatacaaaaagtagccgggcatggtggcaataacctataatcccagctactcaggaggctgaggtgggaggatctcttgagcctgggctgcagtgagccatgatcacacactctagcctggataaaagagtgagaccttgtctcataaaataaaaaacaaaataaaataaaataagctcattgagggactctcttcagtgagtactgtgggtccctggcccctccctctaggacttcctgtgtagtttacatgctctgaaatatttgctttggttaggagaccctctgtttgtgtgttttttgttttgtttttgtttgtttgtttttttgagatggagtctcgctctgttgcccaggctggagtgcagtggcgctatcttggctcactgcaagctccgcgtcacaggttcaagcaattctccctgcctcagcctcccgaatagctaggattacaggcatccaccaccacgcctggctactttttgtatatttagtagagacagggtttcaccatgttggccaggctggtctcgaactcctgacctcaggtgatccacccaccttggtctcccaaagtgctgggattccgggcgtgagtggcacccaaccctctgatctatttcatcaaggcttctgtcagatttcatgtatcatcctcccctcargggaccagagcctcatgctaaatgagtgcaatccccaggcctaaagtaggagagtggtttgagtgctaggcttgtccttttgggagcgaatcttaccatgtgatttgactttggccccagaatcccagggatagcctttgaaggactggttttgtccttttccccttcactttgaaagtatcttaaagatatgactgccctctggtggctaaaattatatatgtcaayggccccctgcccttcaaacatgatcctaacaagtgattgaatgtcctaggaaggagtgagctgcagggttaggttatggggtttgtttgggattggggtgagagagtaggccataacacttctctctgtgtttactggcataaataccagacttcgggtagttaacaggatctgggtcattttgggtgtaaagttcttgagggcagggaactacttcagtttggctcaatgttttatctagtgcctagcagagcgccgggcacacaatacctgctcaaaaatgtttattgaatgaataaactgctccctcaaagggagcaaccacaacctcgttcattattacctcactttgctgccttttcatagatgatacaaaggcatttgaaaaaattcactacctattaaaaaaaaccaaaaaacaaaaccaggtgcagtggttcacacctgtgagcctagaactttgggaagccaaggtgggcagatcacttgagcccaggagttcaagacctgcctgggaaacataatgagacttcgtctctacaaaagataaaagcaaaattagctgggcatggtggtgcatgcctgtggtcccagctactcaggagtctgagccaagaagatcacttgagctctgggggtcgaggctgaagtgagcagtgatggtgccactgcactccagcctgggtaacagagtgagaccctgtctcaaaaaaaaaaagccagcctccctgggtcctgggaccaagggcggtgcagtttaaaataaaaaaaataaataaattttttaaaaaagaataaaattggactaaaaggatttccttgacatgataaataaataaatctgaacccaagcttaaaggcaaaacccctttagtagaagaatttccattcaacttaggagcacaataaggctgttctttctggccgactgttttccaaaggtggttatgtgcttttcttatgatgtaatcctaacactccacccattgtggggagtctatgtccccttcccttgactctgggtagactactatgactgccttgattgatatgtatggtggaagtaattctttgactctgggtggactactatgactkccttgattgatattccatggtggaagaaatcctttgtgacttccaaggttaggtcataaaaatgccatatactttgttgagacatttacccttaaaaaccagccgtaacgtcaaaataaactcaaactagccatcacagaggagctactcagagaggtcatgtataagcgttttagccagaggctgagatcttgaccagcattcagacatgggtgaagacatctccaggtgattctactcctcagctatggactggatgattctttaaatattgctaacttgaggccccagatagtaaggagcaaagataagccatgtccactgtactctgtcaaaatttctcaccccagcagatgtgattgttttattccagttttcaagtagcttgttatacagcagtaatgactaaaacacttattatcactaccaccaccacactggtattacctgttaaacataaacacagctgcacagtagttaaagtggtgaaaacagattttactggccaagggccttggctcatgcctgtaatcctggcactttgggaggctgagacaggaggattgcttgaggccaggagtttgagaccaacctgggcaacacagtgagacccttgtctctacaagaaaaacaaaaacacaaaactcgggttttattcagcaactactgacagaagaaagagccagactccattctgcacttgatcccaaaggccgagaagcccaagctccattctaatttgtgctgagatgactgggccttttaaaggcagaatgacagaggagacaagtgaggtcccgctaaagtcagcgaaaggaaaaattgcaaagggttggtcagtatcaatgcaattaggccagctgtgcctgctagctggcaattatgcaagttagggattctgcccttccacagcaactgggagacagagggcctatccttttttgatgattatatttcaaaggaatggctctctggtccttgagaaagacacttctgaattggaggaattatatatatacctcaaagggagaaatgaagtattcttaattttaagcccttcttactaatgctctgagaaacagggggtctatcattagaagtttgctagaacaaacagtagattctcctggcagcatcgagcttgctttcttttgtttttatgttcagtttttgtgagtatatatattttgtaagtatatatgtatggggtatataacataatttgatacagacatacaatgtgtaatattcacatcagggtaaatgggatatccatcacctcaagcatttatcctttgcattatgaacaatccaattatacttttggttattattattattatttgagacggagttttgttcttattgcccaggctggagtgaaatggcacaatctcagctcatcaaaacctctgcctcctgggttcaagcgattctcctgcctcagcctcccaagtagctgggattacaggcatgcgccaccacgcccggctaattttgtattttttagtagagacaggatttctccatgttggtcaggctggtcgtgaactcccgacctcaggtgatctgcccacctcagcctcccaaagtgctgggattataggcatgagccatcgcgcacacctagttattttatttatttatttgagactgagtctcactctgtcgcccaggctggagtacagtggtgcaatctcggctcactcaacctccgctgcctgggttcaggtgatttttctgcctcagcctcctgagtagctgggactacaggcacgcgccaccatgcctggctaatttttgtatttttagtagagacggggtttcaccatattggccaggctggtcttgaactcctgaccttgtgatccgcccacctcagcctccaaaagtgctgggattataggcgtgagccactgtgcctggccacttttagttattttattttagacaggactctggctctgtcgcccacactggagtgcagtggcacaatcttggcttattgcaacctccgcttcccaggctcaagtgatcctcccactttaacctcctgagtaactgagatcacaggtacgcaccactacactgagctaattttgttttgttttggtagaggtgggcttttgctctgttgcccctgctggtctcaaactcctgggctcaagcaatctgcccgcctctgcctcccaaagtgctgggattacagatgtgagccactgcacccagcccaaactgtgttttaaaactttgttttctttcctcctttctccccaatctcaagatacaactgtgagacaaactgcgtatgtctttcctttcatcttcaaatacagcttcggaatgtgctgtgaacctccaatccttttcttttcctattctatgttcccaagccttacatatacatatttacttagatgcatgttaagcacataccatactcacttatctggtcatatatttccttagaagcttcaggggctggatcctgatatggaccagacacctcgagccacgaagtcgccaaccccctcaccggatggaacaataattcaagacaagctgttggaggaggtcacgccacctgacacctgctagctccccttcctcttctgcattccaaaccctctgtgtgtgtgtgtgtgtgtgtgtgtgtgtgtgtgtgtgtgtgtgtgacagggtctcactctgtcacccaggctggagtgcagtggcaccatcaccactcagtgcagyctctacctcctgggctcaagtgatcctcccacctcagcctcccaagtagctgagaatacaggtgtgtgccaccatacctagctaatttttgtattttttgtagagatgtagttttgccatgttgcccaggctgatcttgaacttctgagctctagtgatctgcctgcctatgcctcccatattgctgggattgtaggcgtgagcaaccacacctggcccaaatcctctctttaaaaccccctgcattccctctacaaattcaaaagtagaatttttttcattctttcccttactggcatggataataaagtctcgctctctttttttttatcacatcttgttattattttggcttctttttacamacggtgagcagccagacccttttgccagttacaatatcagggttgtgagatagatagatgattgatagatagatagatagatagatagatagatagatagatagatagatrtrtagatagttttttttttcttggactattcttcataacaaaggggtrtgatataatattagcttcctataaaaggaatgtggccaggcacagtggctcatgcctgtaatcccaacactttgggaggccggggtgggaagattgctggaagccaggagtttgagacaagcccaggcaacatagagagaccccatctctacaaaaaaaattagccaggcatggtggtgcacgtctgtcatcccagctactctagagactgagagaggagtattgcttgagctatgatggtgacactgcactccagcctctgtaacagagaaaaatcctgtctctaaaaacaaaacaaaataaacaaacagaaaatgtgaactgtagtggttaacttcagacctggtgggaaagtatggcgaaatctatattaagtaaaaatgtaggcctatgtgagtagatgaatccttttgcagagaacaactaggaaagctgaaaaaatgcaaagtaaaaaattgtttgggcccagtgtggtggctcatgcctgtaatcttagcactttgggaggccaaggcaggcagatcacaaggtcaggagatcaagaccatcctggccaacatggtgaaactctgtctctamtaaatacacaaaaattagctgggcatggtggcacacacctgtagtcacagctacttgggaggttgaggcaggaggatcacctgaacctgggaggggaggcagaggttgcagtgagccgagatcgcgccactgcactccagcctggcaacagagcaagactccgtctcaaaaaaaaaaaaaaaattgtttaaaggtatgagagagctgcccaagcagccagtacttgaggggctaatgttcagagggaagagaaacttcttgaatgaagcctctctttgcccttgaggaatgtgctgattcataaatggtgtaggataggcatgctgaaaagctgaacaaaaactggttgacaagctgggcacagtggctcatgcctgtaatcccagcactttgggaggctgaggcagcaggatcacttgagcccaggaattcaagaccagtctgtccaacatagtgggaccccatctctataaaaagttaaaaaaataataaaaagaaacatccagccgggcgtggtggctcacgcctgtaatcccagccctttgggaggctgaggcgggcggatcacgaggtcaggagatcaagaccatcctggctaacacggtgaaaccccgtctctactaaaaatacaaaaaaaaaaaattagccgggcgccatggtgggtgcctgtagtcccaggtactcgggagactgaagcaggagaatggcgtgaacccgggaggcagagattgcagtgagccgagattgcgccactgcactccagcctgggcgacagagcgagatcacctcaaaaaaaaaagaaaaaaaaaaagaaacatccagactgaaggaggaaaagacaatggggaaaaagaggagagaaaaagagggtggaaaatagagaaaagagtgcaaaatatctactgaagacagtgagaaagtctaacatctaggtcattggaggtatgagaaacaaggaggaaaagaatggagcagaggcaatacttaaagagataatgctgatttttttccaaagagatgaaataagtcaagctattaatacaaggagttctatgaaccctaattaggagaggttaaaaaagaaaaattcacctagcatgtcataggattgctgaaaaccaaagagagagagacaatcttaaaaatgaccacagaatggccaggcacagtggctcacacctgtaatcccagcactttgggaggccaaggcgggtggatcacctgaggtcaggagttccagaccagcctggccaagatggtgaaatcccgtctctactaaaaatacaaaaattagccaggcacggtggcaggcacctataatcccagctactcaggaggctgaggcaggagaatcagttgaaccgggcggcagaagttgcagtgagccgagatcatgccactgtactccagcctgggcaataaagtgagactctgtctcaaaacaacatgaataacaacaacaacaaaaacacagaaaaaaatacacttacttaaaaataaacaatgttagtttggtggacagatgatttcttggcagaaattttatgtagtggacagactcagagtggtccccacgagccttgcctcctggtgttcatgcctttgtgtgatttttccctcttgtgtggagacagggcctgtggcctgcttctaaccaatnnnnnnnnnnnnnnnnnnnnnnnnnnnnnnnnnnnnnnnnnnnnnnnnnnnnnnnnnnnnnnnnnnnnnnnnnnnnnnnnnnnnnnnnnnnnnnnnnnnnnnnnnnnnnnnnnnnnnnnnnnnnnnnnnnnnnnnnnnnnnnnnnnnnnnnnnnnnnnnnnnnnnnnnnnnnnnnnnnnnnnnnnnnnnnnnnnnnnnnnnnnnnnnnnnnnnnnnnnnnnnnnnnnnnnnnggggagtgtagtggtacaatctcagctcactgcaacctccgcctcctaggttcaagtgattctcctgcctcagcctcttgagtagctggtattacaggtacgcgccaccatgcttggcgagtcttcgtatttttagtagaggcagggtttcaccatgttggccaggctggtcgctggtcttaaactcctgacctcaagtgatccacccatctcggcctcccaaagtgctgggattacaggcgtgagccaccaagcctgttctgagctcaatagctcaagaccagcctgggcaacacagtgataccttgtctctattaaaaaaaattattttttaattagctgggcatggtggtgcttgcctgtaattccagctacttgggagagtgaggtgctatgattgtgctactgcactcaggcctggatgacagaatgagaccctgtctctcaaatctcttttaaaaaaaaaaaaggtaaaggtgacaagatgtatgtgattatgtgcatgtgactacgtgaattacaagattacatgattgtgttacagaggatcataacacttgtcttactggagtctctcctcctttgctgactttgaggaacaaggagccatgttggggactgtcacttggcaaggacctgtgggtacgatgaggaactgaggttggcctcagctgatagctagcaaaaaacagaagctctcagtcctacagactcaaggaccagcatcctaccaacaaacggaataagtttggaagcacattcatttttagtcaagccttaggtgagaatgaagtcctggccaacccttttttttttttttttttgagatggagtctcgctctgtcacccaggctggagtgcagtggcgccatctcggctcactgcaagcttcgcctcccaggttcatgccattctcctgcctcagccttccgagtagcttcgactagaggcgcccgccaccatgcccggctaatttttttgtatttttagtagagacggggtttcaccgtgttaggcaggatagtctcgaactcctgaccttgtgatccacccacctcggcctcccaaagtgctgggattacaggcatgagccaccacgcctggagtcctggccaactctttatttgcagccttgtagaggacccagttaagccatgtccagatggctgacccagagaagctgagataataaatgtgttttgttttaaaatgctaagtttgtagtaatattttcacatagcaatagaaaactaacacatgaccgggcatggtggctcacacctgtaatcccaacacttttggaaagctgaggctgaaggatcgcttgagctcaggagttcaagagcagcctgggcaacatggtgaaaccctgtctctacaaaaaaatgtaaaaattagctgggcgtggtggcgcacgccagtagtcccagctactcagtaggctaaagcaggaggattgattgaacctcaagagtttgaggctacagtgagctataatcgtgccactgcattccagcagcctgcgtgacagtgcaagaccccgtcaaaggaaaggaaaaggasaaggagaagcagaaggagaaggagaaggagagagagaaagaaagagaaggagagaaggaaaggaaaggagaaggagaaggagagagagaaagaaagagaaagagagaaggaaaggaaaggagaaggagagagaaagagaaagagagaagaaaaggaaaggaaaggaagaaagaaaacctaacacataatggaagtatgaaaacacttgaatcatgtattgaagctgctaaaagaaaataaccgccaacctataattataaacccagtgaaaatagctttaaaaataaaggtgaaagcactaatcataaaggaaatgattgataaatcagatactaacattaaaatctgttcatcgaggccgggcatggtggctcatgcctgtaatcccagcactttgtgaggcctaggcaggcagatcactggagatcaggagttcaagaccagcctggccaatttagtagagacagtgaaaccccatctgtactaagaatacaaaaattagctgggcatggtggcacacgcctgtaatcccagctactcaggaggctgaggcaggagaatcgattgaacccgggaggaggagtgtgcagtgagccgagattgtsccattgcactccagcctgggtgacagaaagagactccatctcaaaaaaaaaaaaaagaaaaaaaatctgttcattgaaagatgctattaaaagggcaaaaaggcaagccacagaataagagaagacatttgcaatattttagcaggtaaagagytaatatccagaatatataaagaactgccacaaatcaataagaaaaaggcayagtctaatagaaaaatgggcaaaagactaaacagccaatttacaaaacagagtatctaattagccaacaagtatgtgaaaatgttcttaacctcgttaatcatatagaaatgtcaaactaaaactagaattgtttactactaacactcaaaaaatagtttaactttttttttttttttgagacggagtcttgttctttcgcccaggctggagtgcagtggcgtgatctcggctcactgcaacctccacctcccgggttcaagcgattctcttgcctcagctgggattacaggcacctgccaccacgcctagctaatttttgtatttttagtagagacagggttttaccatgttggcgaggctggtcttagactcttgacttcaagtgatccactcacctcagcctcccaaagtgttaggattacaggcatgagcccctgtgcccagcctaaaaaaatttttaatagcaataccaaggatttatgagaaggtggagcaacgggaactctcacacacatagctgatgaaagtgtaaattaaaacactcattttggaaaactttttgtagatttttctaaagttgaacatactagcaattttagtcctacatatccactttacataaatgcacacatatgcatactaaataacatgtatgagaatgtacatagcagttttattcataagaacgccaagtagaagcaacacaaatgtccatcaacagtagaatgggtaaataaaacaatgaagtattctaaagtagggcactattgccattttgggtgagataactttttgctgtgaggggctaacctgtgtataccaaatactatttagcagcgccactgtyctctacccactagactgcagtacaactagcactaccctagctgtgacaaccaacaatgtctccagagattgtcgaatgtccccaagggagattaaatcatcaccaattcccacccccaagaatcactgctctaaagtcaacagaaataaactaacttctgctaygggcaacgttatagacaaatgtcaaatacgtaatgtgtgaaagtggctaggcacaaaagtacatgctgtctgatttcatttaaataaagttctaaaacaggaaatactaatcaacataatacaacttgggatcttcatgactttgggagaaggtactgactgggaggggacataagaaaggtggtctccggccgggtgccgtggctcacgcctgtaatcccagcactttgggaggccaaggcgggyggattacctgaggtcagaagtttgagaccagcctggccaacatggtgagaccccgtctctactaaaaatacaaaaattagcagggcgtggtggaacacgcctgtaatcccagctactcgggctgagacagaagaattgcttgagcctgggagacggaggttgcagtgagccgagatcttggcactgcactccagcctggccaacagagtaagactttgtctcaaaaaaaaaaaaaaaaaaaaaaaggtggtttctgatgatactttatatgaaccctaatctgggtaatatttccaggggtgtgttactttgtgaaagtttatcaagccatacccttctggttttgctatatatactctgctttaaagaaaggttactcaagaatatatgtttgtgaatctggagatgaggagagacataattctagaatatgaagcaaatgttaaaatgttactctaaaaaatacaaacagtagggaatctgacatctcaatttggaagagaaagaaaaactgagctttgttagaacaacaggtggcaggaaaagaagtggcaaagctgagtaaaaagaaagaaaagaaatcttctttccccaaagaatagaaagtgagctaaagcagaaaattcaacccaggactcgaaggtaaaaagcatttctactctggcagaaactgctagttactcatgttaatccttcctgtcatwcttccttaactaacagaatcgcaaatttattctgtgcaacaatttgaccactaaaacactacattttctagcccttctcgcaagtaacctttttcaaactgatgtggacacgattgctgatgctgcagcagccatcatataaccataaggtgaccttgaggagggaaatgtagtggagcacaaagaaggaactttgaatccctgatgactatagaggctgccacctccaacctggactgcctgcctctggtattttacataaaagagaaataaacctctcttttgcttaaaccatgttttttgtgttttctgtcacatgcagctaaatgcaattcaaaactgacacagtgacccagagctgcatgtgacagaaaacacaaaaacatggtttaaataaaaagagaggtgtatttctcttttatgtgattgcatttagctgcagatgacaggaaatatatcaaaaacagaaaaacatttgtctataatgttgcatgtagaagtctggccaagagagagcattgggaattataaacctgagctgatgatccttggcagcaatagaaccatagttgccaacacagcacagcacaggggatggggcagagacaacaaagtatcaagaagaatcccgaatctttatacacataggaggaaaacatggacactgaatgtgtaccatgtattaaaaatgcattaggcagtcacagtggctcacgcctgtaatcccagcactttgggaggtgattacactttgtaatcacctgaggtcaggagttccagaccagcctgaccaaacatggcgaaatcccgtctctactaaaaatacaaaaattagctgggtgtggtggtgggcgcctgtaatcccagcttctgggaggctgagacaggagaattgcttgaaccaggaaggcggaggttgcagtgagctgagaccgtgccattgcaatccagcctaagcaacaagagcaaaacaccctttccaaaaaaaaaaaagtgtatatttttggatttgaatagctaaaagtctagagggatacactccaatgagagtagttacccttagggagtagaattggagataggagtggaaataatcttagacttttttttttttggaaatggatttnnnnnnnnnnnnnnnnnnnngcagtggtgcaatcttggttcactgcaacctccgcctcccgggttcaagggattctcctgcctcagcctcccaagtagctgggattacaggcacccgccaccatgcccagctaattttttgtatttttagtagagacgggttttcaccatcttggacaggctagtcttgaactcctgacctcgtgatccacttgcctcggcctcccaaagtgctgggattacaggcgtgagccactggcgccggcctgatcttagacttttaagttttatatattttagaattgttggaaatgcttacaataggcaggtatttttgtggttaaaagttgtttggagtttttgttgttgttgttgttttatgaaatttgttgttttacatttgaggagcttgggtatctcccgtctagatttctaaagtagataaaagctagctatagggattgaggttttaattagagtttagccaaaggtaagtgatgaggaggaaaaatctttgggatgggaagtaagcaatttgcattctgatcttgactggctgtgacatctgggccgtcgttttacttctttgggccttagtttccttgtctgtaagactaaaatttgcactggacagtcccttccagcctgacattctgtaaatttataaattgcctctctgagattgaggggaaattcttatttatctttgtaactcctcttctaacacatagtgcttattaatacttgttaagaaatgagtgagtgatgtgtgaggacggtaaggcagctgtgatatccattttgacatcgcagaatttacatgatgtctttaaagatcatattgctaagtagcataagggctaggtttcctgttcggtgtctgaatatgctgcagaaaatctggatcctgaaaaagtagagagagcaattctctctcccaacactgtggaggcagcctgtcagcccacaactgctgctgcagaatttaaaggaaaccaaaaatgtgagagcagggtactgcaagataagyctaaaaatatacacctgcacaacgtgagaggaagctgcgctaggatcagaaggacgtccatgcatcatggtactaaataaagctgacagactgccctctttgggtggcatctcatctaacccacaacatcagcaatccagacacagggtcacagccagcctgcagtgagccatctgtcacgtgctcctatgacaatccacaagaaaaagttctcctggcaatcaaacaagttccaaggacatttacacacaatcctcagtccactcttaaaatagctgcacattttcacaagggatatcttttcattcatgatgcacttcttatccaatattgagcttcgcatgcttcccatggaacagaggctgtctcaatttattctattctaatggtaacttgaccccttgcctaggctgcgagttcttaattaagtagcagccaacacaaatctcttgactgtattgcccctcccgcaggcagaacttcggggcaaagaaagtcttgggcttcaatatacaatggttcctagatttgtgccatcctgtctgatctgctcagacaactgaatttgggaaagaaagtttcatagacttagacataggggcctaatgaagcagaacggtcaaaacgaggtctctaaagctggcttaagacagacacaactacacacaatatacgatcctggattgggaaaacaactgttataaagtgcattacaggccgggcatggtggctcacgtctgtaatcccagcactttgggaggccgaggcagggagatcacctgaggtcaggagtttgagaccagcctagtcaacatggtgaatccccatctctattaaaaatacaaaaaaatttagccaggcatggtggtggacacctgtaatcccagctactcggtaggctgaggcaggagaattgnnnnnnnnnnnnnnnnnnnnnnnnnnnnnnnnnnnnnnnnnnnnnnnnnnnnnnnnnnnnnnnnnnnnnnnnnnnnnnnnnnnnnnnnnnnnnnnnnnnnnnnnnnnnnnnataataataataataacagtaagagcattacagagacaatggagaaatttgagtatggattatatatattatcaatgttaacttgatacttttcttttttttttttttgagacaaagtctccctcttgtttcccaggctggagtgcaatgccgtgatctcagctcactgcaacctctgattcccargttcaagcaattctcctgcctcagctttctgagtagctaggactacaggcgcttgccaccatgcccggctaatttttgtatttttagtagagacggggtttcaccatgttggccaggctggtctcgaactcctgacctcaggtgatccaccctccttggcctcctaaagtgctgggaatacaggcatgagccaccatgcccagcccccaaattgataacatttagtaatattgtatcaatgttaaattccctgtttttgatcatttcacagtggttatctcagaatgtctctgttcttaggagacaagtggagaagtatttaggagtaacgtggtggttctctacagtcagacatgcagtgtagggatcagaagtggagacaaaaatatggaggctcctccctctcacgccaccatctccccataaatgtgtgtgtatttgatgtttccaagatatatgcaggttagagacctagaaatggaattatagcaaaaattttaattttggactgccttaaatgtttgcttgtccacaccccacattcctcccggcacatcaaggcaaagagacagaaggtccttggagcagctgcccctgtctcctccaggatctactccactcctctgtgctctctggacccagctttcctggcttcctgacgagctgcactccctatcccaccaccttttttataactccaaatgttattggaacaagtaagcaaaggagattcactttagattctggaggcaagaaaatattatgaataatgcaatctctatttatttaaaaatttacataacatggcaaatttcctagtcttttcaaagaaccaacttttggtttgtttatcctctcctttgtgtttattttccatgtcattattattataactccaaatgttattggaacaagtaagcaaaggagattcactttagattctggaggcaagaaaatattatgaataatgctatctctatttatttaaaaatttacataacatggcaaatttcctagtcttttcaaagaaccaacttttggtttgtttatcctctcctttgtgtttattttccatgtcattattattattttttgagtcagggtctcactctatcacccaggctggagtacaatggcacagtcttggctcactgcaacctcctcctcctgggctcaagtgatcctcccacctcagcctcccaagtcgctgaaactaaaggcaccagctgccacacacagctamtttttggtattttggtagaggcagggtttcctaatgtagttcaggctggtctcaaattcctgagctcaagcgatcctcctgcctcagcctcccaaagtgctgggattacaggtgtgagccactgcacccagcccccattaatcattttgttaccgtttcttggtcaatgtttttttgtttgtttgttttttgtattttggttttttctgagacagagtttcgctcttgttgctaaggctggagcgcaatggcgcaatctcggctcactgcaacctccatctcctgggtttaagcgattctcctgtctcagcctcctgagtagctgggattacagacgcatgccaccacacccagctaatttttgtatttttagtagagacggggtttcatcatattggtcaggctggtctcaaactcctgacctcaggtgatccaccagtcttggtctcccaaagtgctgggattacaggtgtgagccactgggcccagcctggtcaatgttttttatatttacccacatacacatatttgccacattctttgcagtttattctccattgtgttccaggccttcaatctggaatcattttccttctgataatttttttttttttttagaatttccattaatgtaggtctgctgggtgttttttaattttttaaattatttatttatttatttatttattgagacagtctcactctgtcacctaggctagagtgcagtggtggcacaatcccggctcactgcaaccttgtcctcccaagttcaagygattctcttgcctcagcatcccaagtagctgggactacaggtgcgtgccacaatccccaactaatttttctatttttagtagacacaggttatcaccatgtcggccagattggtcttgaactcctgacctcaggtgatccacacgccttggcctcccaaagtgttgggattacaggagtgatccactgagcccggactttttgtttgtttcagagacaaggtcttgttctgttgcccaggctggagctgcagcctcaaccccctgggctcaagcaatcgagtagctaggactataggaaggtaccggcatgcccagctaatttagatctgctcttaataaactgtctctgtttgtttgtttgatgtcactttacttgaattctttttttcttcttcttctttttttttttgaaacagaatcttgctctgttgcccaggccggagtgcagtggcaggatcttggctcactgcaacctctgcctcccgggttcaagcgattctccaggctcagcctccagagtagctgggattacaggcatgcattaccatgtttggctaatttttgtatttttagtagagacggggtttcgcatgttggccaggatggtctcaaactcatgaccttgtgatctgcccacctcagcctcccaaagtgcctggttttttgttttgttttgttttttaatgagacagggtcttgctgttgcccaggctggagtgcaatggcacgatgttgactcactgcaatctctgtctcccgggttcaagcgattctcctgcttcagcctcccgagtagctgggattataggcaccaaccaccatgcctggctaattcttattttattattattattattttttgaggcggagtttcactctttcacccaggctgcagtgaagtgacttgatctcggctcactgcaacctctgcccccgggggttcaagygattctcctccctcagcctcccgaatagctgggattgcaggcgcttgccaccatacctgactaatttttttgtatttttagtagagacggggttttgccatgctggccaggctggtctcgaattcctgacctcaggtgatccaccctcctcagtctcctaaagtgctaggattatgggcatgagccactgtgcctggccttaattattgtatttttagtagagacaggtttcaccatattggccaggctggtctggaactcctgacctcaggttatctgcccacctcagccttccaaagcgctgggattacaggcgtgagccaccgcgcccagccttgtttcgtactcttttctttgcacacttatcctacttagaatttgatagactctttgaacctgtgtgaaatggctttgtgatgtgtcaacttgggtaaactacagtttatagatttctcttcctagcatgtttccagttagaatgggttacaagggagattcatgaggcttggagagtggaaggacagcagaagacactttgtagcatacatacaccttctcccagttactccatcatacattagtcaggtgttgccgtacaaggaatttatttatttatttatttatttatttatttatttatttatttatttttgagacagagtctcgcactattgcccgggctgcagtgcaatggtgcaatctcggctcactgcaacctccgcctcccaggttcaagcgattctcctgcctcaggctcccgagtagctgggattacaggcacctgccaccacgcctggctattttttttgtatttttagtagagatgggggtttcactgttagccaggctagtctcgaactcctgacctcatgatccacctgcctcggcctcccaaagtgctggggttacaggcgtgggccatcatgcctggcatagaaatttttaaatataattaatgtttcaaatcagttgagcttctggcttgggcttgcttggttgatctctgcagtttgctggtggctcaattggaactagatggcctaagacctcattcacatatctagcaattggcagccagttttgtcttaagggttgggggcaaggttcagttggaattactgtctctgcttcatgtagtttctttttttttgagacagagtcttgctctattgctcaagtggtgcaatcttagctcactgcaacctccacctccagagttcaggtgattctcctgcctcagcctttcaagtagcttggactacaggtgtgcatcaccacgcccagctaatttttgcaattttagtagagacggggtttcaccatgttgcccaggctggtcttgaacccctcacctcaaataataggcccgccttggcctcccaaagggctgggattacaggcatgagccaccatgccaggctgttcatatagtttcttctcctccaacagrcctgtccaggcttctttaaatggtggttttggaattccaaagagaagtaaggaagtaagagagagcaagccccaatgcatagtttatattcctttgcttttgtcacatctgctgttgtctcattggccgaaacaagtcatagggccaagccagatacagcaggtggagtatagattctcctttgatgggagaaagagccacgtcatgttacaaaggggtgagtgcatagagatgagaagaattattgtggtcatttccacaatcaatctatcaaattgccttatgaagagcactgcaattaagtcaaatgacaaacttggaaaaatatttgcaagtccaatcacaaaagattaatttagctaatacataagaagcttctataaattgttaacaaaaagaccaaaagctaatacacaaatggcaaaaggatatggacagtttccaaaagaaaatacaaatgtctttttctggctgacagcaagggaaaggaaaaaagaaaaaagctttaaagacattgaaataatttttttaaagctgattgttttttaattgcatggtacaaaactttaaaaggcacaaaaaggtacagtgaaaaatctcctcctgtactacatttatcatgtcctttgattttacttacaatagattttgccatgcaggtatttttattatttcaaaatatttaaataggccaggcgcggtggctcatacctgtaatcccagcactctggaaggccaaggcgagcagatcacttacggtcgggagttcgagaccagcctggtcaacatggtaaaaccccatctctactaaaaatacaaaaattagctggtgtggtggtgcacgcctgtagtcccagctacttgagaggccaaggcacgaaaatcgcttgtacttgggagatggaggctgcagtgagccaagatcatgccattgcactccagcctgggagacagagcaagactctgtcttaaaacaaaacatttaaatattttaagcacttatttatggcacctgggttctggtcatacatttctgactcacaattatttaaaaatcaaacattaggctgggtgcagtggcacatacctgtggtgtcaggtactcaacaggctgaggtgggaagattgcttgagtccaggattttgaggccagcctgggcaatatagcgagaacctgtctcttaaaaagaagccaaaacgttaaaacttcccttcaatttcttctagtacctttattttcaaattttttatatttaaatctttgattctttggattatcctgacataaggtgtgaagtatggacctaataccaagggttgaattatccatctttctactactgatttaaaaggtcatctttttcataaactaaattcctgcatatattaacatttggaggcaggcagtgagctgatcaaaaagaatgacagcaaacccctggagaaagaagagagtgggagaaacatactggagctgtggaacctttccttttcactttagctgacctaatgaatacatgcacaactgttgtaatgtttgccttgtagagctactgaaggatgcttaaccaccaaccacacagaaacaaagtaagagaaaaggctttttaatatgaaaactatgtatttgggcacaaaaatgcaacacacagtaagaaaccatattctatcaattatgatattctgtaatctaagaacacagaaagttttgttattaggaaatgccaagaggaaaaagaactctgtaaagtcctattcaatttactttgttagggaaaaggatgtttatttggcttttgtcacagttccatcatgtctactcttcttgtaagttcagcttcaatgctatcctacaggaagaaagacataccatagataaggacataaaacagatgctctaacttttatttaatgttatttaaaataagggaagcaaaaaaggaaacattagaacaaaaaattttaaaaataccattatgaatatcaaataygcttttagatattcccttgyttttacatctcccctcttcccctgcaaaagcactcagactcctaagtgattctaagaaatatgtgaagggaagggaaaaaagcctttagagagagagaaatctgtaacgacatatgaataaatttttctggcctttgctactaaaacaatgtgcttccacaatgtcactcacatcacctcttttctgtgtttttttttttttttttgagatgcagtctcactctgtcgcccaggctggagtacagtgggacaatctcggctcactctgcaatctctgcttcccgggttcaagcaattctctacctcagtctcccgactagctgagattacaggcgcccaccaccatgcccggctaattttttttgtatttttagtagagatggggtttcaccatcttggccaggttagtcttgaactcttgaccttttgatccacccacttggcctcccaaagtgctgggattacaggtgtgagccactgcacctggcctcttttccattttcattgccactgtcctcattacttcttatctggcctaaataagctaattggtttctgcaattttctttctcccaatctaccctcaacagtggctacagaataatcttctgaagcactaacctgatcaaaaagtatagctttggccaggcacggtggctcatgcctgtaatgccagcactttggaaggccaaagcaggtggattacttgaggtcaggagttggagaccagcctggccaacatggtgaaaccccgtctctactaaaaaaatacaaaaatttggccgcgcacggtggctcacgcctgtaactccagcactttgggaggctgaggcgggtggatcacctgaggtcaagagttcaagaccagcctggccaacatagcaaaaccccgtcctactaaaaatataaaaattagccaggcgtggtggcaggtgcctgtagttccagctactcaggaggctgagacaggagaatcacttgcaccagggaggtggaggttgcagtgatctgagatcatgccattgcaatccagcctgggcaacagagcaagactccatctcaaaatwataaataaataaataaataaataaataaataaataaataaataaaaatgcaaaaattagccaggcatggtggtacacacctgtaatcccagctgctcaggaggctgaggcatgagaatcgcttgaacctgggaggcrgaggttgcagtgagctaagataacgccactgcactctagtctggaggacagagcaagattctgtctcaaraaaaaaaaaaagaaagcatagctttgatcatatttctcttgagcttaaaaaacaaggaaacacacagcagctttctgtggtccctacatcctctaagttcaacactctttatatrttaaggccttctacatcatgaaccaattgaccttttccaactttatcttacatttcatgtttctaagcagccggactttatcacttgctacagcttgagtaagtcctccatgtttcagcttatatgcctttgcaaattctttttgcctagaatattctatatctctcaatatattcccctttttccactagggaaatgtacacaaaattttaaaaggcataaaatactactatgtgtttttttgttttttgagagggagtcttgctctgtcccccaggctggagtgcagtggcgtgatctcagttcactgcaacctccacctcccaggttcaagtgattctcctgcctcagcctcccaagtagctgggattacgggcacgcatcaccacgcccagcttatttttgtatttttaatagagacagggtttccccatgttggccaggctggtcttgaactcctgacctcagatgccacccaccttggcctcccaaagtgctgggattacaggtgtgagccactgtgcccagctactatatgtttcttaatggaaaaaatatatacacacgtacacagccaaaaaagtattaaaagatgcaggagaatgatacacagtaactttaggactgcagcttaccactgaggagaaaggaaagaaggatgaagaagactttagctatattagcatttattttctttttaaaaaaatctgaaaaaattacaggaactacttactagttctcgctttgcttcttcaattttcacttgagcaagagacggattctttaaaaaaaaataaaacaaggaaaggttatattgcctcaattcagacccaaggagaaaaataatgccataatccttttcaaaaggcaaaaatcctcccagagggatacccaatgtacatataacactgaaatttaccactgactttaaacctttaaaaaccaacacattattttctttcttttttwtttttttttgagacagagtctcactctgttgcccaggctggagtgcagtggctcaatctcagctcactgcagcctctgcctcctgggttcaagcgattctcctgcctgtctcctgagtagctgggattataagcgcccaccaccacgccctgctaatttttgtatttttagtagagacggggtttcaccatgttggtcaggctggtctcaaactcctgacctcgtgatctgcccgtctcggcctcccaaagtgctgggattacaggcataagccatcatgcccagcctttttttttgagatggagtcttgctctgttgagcaggctggagtgtggtggcacgatcttagctcactgaaatctctgcctcccaggttcaagtgattctccagcctcggcctcctgagtagctgggactacagttgcgcaccactgggtccagctaatttttgtatttttagtagagacggggtttcaccatattagccaagctggtctctaactcctgacctcaggtgatcagcctgccttgtcctcccaaagtgctgggattacaggcgtgagccaccgtgcctggcctaaacacactattttcatggtcatatagtaccctcagggaaggttggaggaaataattgttttttaattcgcgaaaattattaccggcattaagtctaaataggactccaattttttcttcaaaggtatagtctgttgctttaatcttgccagtttctgggggtaaaagaacacagtcacagagtaatagaaacattcacaatgcaactaatactgtccatttctgaaataaaacacaacaaagcattaacattagtatattttaaataacgttatcgaataaaaagcttcaaagatagacaaactcactccaaatggaaacaacacctgttagatgcttaaaataggaaagttatagtcttatttaattattattattataatttttttttgagatggagtctytctgtgttgcccaggctggagtgcagtggtacaatcatggcttacggtggcctcaaactcctcagctcaaccaatcttcccacttcagccttccaggtagctgggaccacaggcgtgcaccaccatgcctggctaattttttttttttttttttttgagatagagtcttgctctgtcacccaggctggagtgcagtggcacgatctcggcccactgcaacctccgccccctgagttcaagtgattcttctttctcctgcctcagcctcctgagtagctgggattacaggcatgtgccaccatgcctggctaatttttgtatttttagtagagatgaggtttcgccattttggccaggctggtctcaaactcttgggcttaagtaatcttcctgcctctgcctcccaaagtactgggattacaggtgtgagccaccatgcctggcctttgctcccatttattaacaataggattgaagtatgctgtcttagaatagaaaagaatgtgattaagaggaatcaaaacataaaggaggctgggtgtggtggcttacacttctaaccccagcactttgggaggccaaggtgggaggatcacttgagcccaggagtttgagaccagcttgggcaacatagcaagayccccatctctatttataaaaacaaggggaaaaaaatgtaaagggagaactagaatcccaaatacatatttatgaattgtcaacattagattccaagaacaaagtatgaaaaacgttaagaataataaaacaaaacaaaaccctctatttctctcttcccaccaaaacaggtaaaacctttatataacctaaaatcccagaattgcatttggtaactacaggagtttggagacctgcattttactgtctactgaaagagaagaaaggggagcacctagatgattagctcatggtccttcaataaatttgtttaataaatacatcaataatacataagtgactccagcggagtttctaacttataataaaaaggaaaccatgcaaatgtgagggcatatacagctaaacaaggaataaaagatataaataccagtgaatataaagtacaaaggtaaaggaaaagaaatcaggtccacagtgaataaaagccgaataaaaagaaacaaatgaaaaagcagactgtggagtaaaattttaaagaaagttaaattaggttaaaataagctcacctctgatagtgctactaaggactgatgagacagagaagcatccatgcctctggctgaaagttgctcctacaattaccaaaaaaaggagttcagttaaaaaattatttsaaaagtgaccaccatcaaatatttttctttttcttcttttttttttgagaccgagtcttgctctgtcacccaggctggagtgcagtggcgcgatctcggctctctgcaaactccgcctcccgggttcatgtcattctcctgcctcagcctcctgagtagctgggactacaggcgcccaccaccacgcccggctaattttttatatttttagtagagacggggtttcactgtgttagtcaggatggtctcgatctcctgacctcatgatccgcccaccttggcctcccaaagtgctggattacaggcgtgagccaccgtgcccagcccatcaaatatttttaacatataacacagtaaagaggagctacaagtataaatgaaaaactgtacatgtatctaagcatttgtacgttacatgtgaatcctttccacactcacgcatttgtgacaagatgggtgcagtgtgtaaggcctgagtttcagagcctgratgcctgagtttggatctagatctgcttactgtaatagctatgtaatcttgggcaacataccaacttctctatagtcctctcatctgtaaaaagggaataataatgcctagctgtgaggatgatggtaaaaaatcaggccgaagagagctaactatattcggtccttcatacaaacctctgcagccttgattccaaatctgaattcctctgactttgcttttagaaagtccatgttctgacgacgattatcaactttggccctttctgtagacagatgcaactctgctttcttgacatccctttaaaaagcaaaattaaaaacattttcttcttcttcttctcagtaaaagtattgtacaatagaaactctactacttttggattcaatgctggcttggccaagagttggtaaccaggtcatcttcccctccatgttgcactctgggttttttttttttttaagagatgaggtcttggtctgtcacccaggcttgaatgcagtggtgtgatcactgcagcctcaagctccttggctgaagtgatcctcccacttcagcctcccaaatagcyagggctacagacacatgccactatgcctggctaatttttaaatcttttgtagatggccaggcacagtggcttacacctataatcccagcattttgggaggccaaggtgggcagatcacctgaggtcaggagttcgagaccagcctggccaacatggtgaaaccctgtctttactraaaatacaaaaattagccaggcatggtggcatgcgcccataatcctggctactcaggaggctgaggcaggagaatcacttgaacctgggaggcagaggttgcaatgagctgagattgtaccactgcactccagtgtgggtggcagagtaagactccatctcaaataaaaaaaaataataaaataaataatttttttgtagagacagtctcactatgctgcccaggtttacaacaattttacaattaatgtaagccmattattcttgaagaaagtaaatcagccattcaaaaaaaaattggtgctcactttggcagctcatatactaaaattagaacracacagagaaaattagagtggcctctactcaaggaagatgggtaaatttgtgaagtgttccayattttgttttgtggcttatctagaaataatatggaaaatattgctgttatttttggcaaagaaagtcaattttgtatagtttatttcaacctaaataaactgtgaattttgtttaaaaaataataataataataataatttaacatatctgaagccaatttgaaataggaggtcctaaatacctctgtactaratgtgacatgaagttcgagaccagcctggccaacatggtgaaaccccgtctctgctaaaaatacaaagaaattagctgggtgtggtggcaggtgcctgtaatcccagctacttgaaaggctgaggcaggagaatcacttgaacccgggaagcggagggtacagtgagctgagatcgcgccattgcactctagcctgggtgacaagagagaaactctgtctcaacaaaataaataaataaaataagtaaataaataaataaaaataaacgtgacatgacagtgccttgcacatatgtagtcatttgttgaataaatttacataccgtcaaattacttgtgcatatatacacatactcctgatctataggccctaatctctggggcaaaaaggaacagaaaaaggcctaaagtatcataagagggataccctagctatagcaagaatgcacmacmaaacataatgtgactttaagtatragaaaaatcacatacattttgaaaattctaaaacccatattatttgtttttaagaaaaggcaggaggctgggtgcggtggctcatgcctgtaatcctagcattttgggaagccaaggcaggtggaccacttgaggtcaggagttcgagaccagcctggccaatatggtgaaaccctgtctctactgaaaacacaaaaatcagctgggcatggtggtgcacacctgtagtcccagctactggggaggctgaggcaggaaactcgcttgaacccgggaagtggaggttgcagtgagccaagactgcaccattgcactccagcctgggtgtctcagcgagactccatctcaaaaagaaaaaaaaataaggtaagaaattgtatgaagtaaaattgtatgaagtaaaagctgaaaaagtcaggccgggcgcagtggctcacgcctgtaatcccagcactttgggaggccgaggcgggmggatcacctgaggtcgggagttcgagaccagcctgaccaacatggagaaaccccgtctctactaaaaatacaaaattagctgggcatggtggctcatgcctgtaatcccagctactcgggaggctgaggcgggagaattgcttgaacccaggaggtggaggttgcagtgagctgagatcgtgccactgtactccagcctgggtgacagagtgagactccgtttcaaaaaaaaaaaaagctggaaaagtctatatccaaccatctccagctccactaatcattcaacttaaaaaaatgttttatggatcccatttcctaatgtttttaaaatcacacctactgccaaaactaaatttgacaatgtcctattactcccttatttataaattgtcaccactctgaactcaattacttactcttgtagacatttttctaatactaaagttgcagttaaatttttttcaagtttttccagttcaatcttgatttcttcacttttggatttggtacgaaagagatcagaggtcaaatcattcactgcagggataaaactaaaagaagaatctggtcatatacatgggcttaatgggcaataattataattactcctcattgctaaaaatgactttattgccctgtagatttttatataaccatgctgttcatacctttatgcctttttttacacactgttcccattgcctggaatgcccttcttcattcggcaaagttccatttgttccttcaaaactcagatgagcgtccctgtcatcctggcattaactacctccttctctgtgctacccagctataccttgtacatacttttactgttacagctgtcacactatgttatagtcacatttctatctcccttatttgactgtaagcagagactgttctttaaggaagttactatcgtattcatctcgcttccccagttataacagagctatagtaagaaggcacmaaacataatgtgactttaagttgtatgatagtatgtaagtataaaaaaaaagtttaaaaaattctaaaatacacattatttgtaaaaaaaaaaggcaagaaattatatgattcatccctgcttccccagtgcttatacaactaacatacaactggtatttgttatctgctgaacttatttaattcaagtctagatttctgctgccatacagtagggatgctcttatacctaaaacactactctttgagcttatacataaattgcctttaaattgacaggtaagctgttctgctgtgttgttctctgattatgataagttgtattaatattcgtagttctaccgggcgcagtggctcacgcctgtaatcccagcactttgggaggcagaggtgggtagatcacaaggtcaggagtttgagaccagcctggccagcatggtgaaaccctgtctctactaaaaatacaaaaaaaattagccaggcatggtggcaggcgcctgtaatcccagctatttgggaggctgaggtaggagaatcgctttaccccgggaggcggaggttgtagggagccgagatcacgccactgcactccagcctgggtgacagaatgagactctgtctcaaaaacaaaaacwaaaacaaaatattagtagtcctagctaagatatggccaaaagtggtagtcatatgaactttataagactggttttgaatctcagctctgccatttagtagctcggataaattatttaacccacacctcctgattcctctaaaggttgttggaagaatcatgttattatataagtaaaatgcctgttaaaaagaatgaaaattcctgacctacttaacaaaaaggtagacataaccaaaatttattatgctcaaccaaatcatttagcctactatctttcttattatacacagggaacaatgtgatactaacccctttccaaatatacatgagaaccacccttcataaatctaatcctggaagaagaaaacactaaaaattaaccaataccayatttatccaaattaattatactcactggcaaagacatgaagtaactaaattcagtgctttgtatttattgccaatttttcatatagaattatgctgagaacaaaaagtctttaagaccttatagcagatatgattgcrgaaattaaaactgtcataagaattacctagctagcgaggtatcctttgtttcaagggccaccgcactgtcaaccaaagcattcagatacctggaaccagtgctagagagattggcgggggaaaaattcacactctccatgagaaggtcttgaagatacttggctaaaaacatgaaagagttccatagtgactgtttgcttttttaaaaatttttaacagctttatcaagacataattcacatagcatataatccacccacctaaggtatgtatgtaattcagtggcttttagttgtatccccatcagtacaacctattcttaaaaacattttcatcactccaaaaagaaactctacatcccttagtcatcactttatttttctttatttttctttttgaaatggagtctcgctctgttgcccaggctggagtgcagtggcacgatctcagctcactgcaacctccaccccccgggttccagtgattctcctgcctcagyctcctgagtaactgggattacaggcgcccaccaccatgcccagctaattttttttgtatttttagtagagatggggtttcaccatgttggccaggctggtctcaaactcctgacctcgtgatccgcccactttggcctcccaaagtgctggaattacaagcgtaagccactgcccccggtttattttttcttatagagactagatctcgctaggttgcccaggctgacctcaggtgatctgccagccttggcctcccaaagtgctaggattacaggtgtgagccaccatacccggcccccttagtcatcacttcctaatctaccaacccatgaaaccctagcaaccactccctgtctttattcatttgcctatttgggacatttcatatgaatggtatcataagatgtgtggtcctttgcgactagcttctctcacaatagtttcaaggttcatccatgccacagcatgtaccagtacttcattccttcttatggctgaataatattccattatacggacatatcacattttatttatccacttaaccactgatggacatttgggttgtttccacattttggctattataaatgctgctaaaaacatttattcagtaaatgttaggttttgatatgaacatatgttttcatttctcttgggtgtaagtggaattgctggtcatatgttaactctatgtttaaacattttaggaactgtcagattgttttccaaagtgattgtatgattttacattcccattagaagtgatgaaggctccaattttccacatcttctccaacagttgcaatatgtctttttgattatagccatcctagtgactgtgaagtggcactgtggtatttgttttcttgagacagggtctcactctgtcatccaggatggagaacagtggcacgatctcagatgatcctcccaccttggcctcacaggtacctgtggaccactatacctggctaatttttgtatttttttgtggagatggtgttttgccatgttgcccaggctggtcttgaactcctggactcaagcgatctgcctgccttggcctcccaaagtgttgagattacaggcgtgagccactgtgcccagcctagcactgtggttttgatttgaatttctctgatgactaatgatgccgtgctttgtgaccatttgtgtatcttcgtaggagaaatgtctgtgtataccccttgcccattttaaaattgggttgtctttttattattgaggttttgkttttttttgtyrttattttttttttgggacagggtcttgctctgtcacccaggctggagtacaatggtacaatctcagctcactgcaacctccacctgctgggctcaagtgatcctcccacctcagcctcccaggtagctgagactacaggtgtgcaccaccatgcctggctaattttggtaattttttagagatgtagtttcgccatgttgcctaggctgacctcaaactcctgggctcaagcagtctgtctgcctcrgcctcccaaagtggtgggattacaggtgtgagccactgtgcccaggctttattattgagttgtaagagttctttacatgttgtagatacaagtcccatatcagatatatttacaaatattttctcccattctgaggactgtctcttttcatattctttctttcctttcttccctttctttctttcctttttccccctcccctccccttcccttccctttttctgagacagtctcgctctgttgctcaggctggagtgcagtggcacgatctcggttcactgcaacctctgcctcccaggttcaagtgattctcatgcctcagcctcccaagtagatgggattacaggcatgtgccaccacacccagctaatttttgtatttttagtagagacagggttggccaggctggtcttgaacttgagactcaggtgatccacctgcctcagcctcccgaagtgctgagattataggtgtgagccacaatgcccagcctgtcttttcatattcttgatggtgtcctttgagaacaaaagttttaaattytsatgatgtctaatttatatactttttattttgtttgcttgtgcttttggcatcatatccaagaaaccaatgccaaatccaaggttacaagggtatatacctttgttgccttctatgcattttaggtttagctcatattttttaggctttttttttgaggcagggtctcactctgtcacccaagctggagtgcagtggcacgatattggctcactgcaacctctgcttcccgggctcaagcaatcctcccacctcagcctcccaagtagctgggactacaggcrtgcaccaccacccctrgctaattttttttttttttttttttgagatgcagtctcactctgtttcccaggctggagtgcagtggcacaatctcggctcactgcaacctctgcctcccaggtttaagtgatcctcctgcctcagcccctctagtagctgggattacagggacatgccaccatgcctggctaatttttgcatttttagtagagatggggtttcgccatttggcaaagctggtctcaaactcctgacctcaggtgatccacccacctcggcctccccaagtgctgggattacaccgtgcctggcctttttaggcgctttattcattttgagagaattcttctattttgtgtgagtttgagtccaacttcattcttgagcatatggatatccagttgtcccttttgttgaaaaggctattgttttctccgttgaattgtcttgttacacccttgtcaaaattcaattgaccaggagatcaacttccagcataatagtgtgggagttgggctgacctgctcttctgtgaaactggtgaaaatcagaagaaagaaagaaaacaaacccaagcatttaaagcctctaaaaatggtcctaagggtacacagcaaatgaagaaacaactattcaataaaatctataaaaactcagtaaggacactgagaatttgtggtatttgaaccaagactcctccctccctcctcccttccagctcactgaggtggagactccactccagacagctgcagtcaacatggggctttctttgctcccagctcccagctggaaggccttcttcctgggagaagcaagactttagtgtttttcatcctgccactagctatctgctactgcgtccaagtcccagcgggatgtggttgagaggtgtgtctgcccagccactgctcttggaatggaagctccttgagtaaggcaagctgagaatactggagtcccaatggcccttgctccggctagtgaggtggtggttccacaccaggagaggcaagccaagaggacctaaggctgccgcactccctctctaccaagcagttcctatagctggcatatcgctcagtgacaaacttgacattttccctacctacctccaaccccaactccagaggctgggttcagagattttgcctcatgggaaaatcaagtcataaaacagatggctctccatctcttcccaaaggaactgactacatttgcaacagagcttagaaaggttcaagcctaagggcaatctcaaaaagagtagaagttgtggtcaaagaaattgggagcagattcaagatacaggctaaactgtagggcaaktagtttgtagttaagacatctaggagagccatccagaagataaaacaaatatctaactgacctcagaaactattcctctaagagagctagaatttgattggaattgctcrtagagcagtttatgcccagggcattgttgaaaacaacagctgtaaattagtggaattttacagtcaggtgtgctcagtgaaagagaggaagtcagcttgacccaaacactgtcaactcagagtgaccttggagatactcaagtatgtgtctccctgaggagctgataacatcaggagtttaactctgttggggataaacagacttcattaaaataatccagctagcaatcagacaggtaagccaataacaataacaggaggaagtaagattagtacctagcaaggatacaatatgttgtctgaaatgtccagtttccagcaacaacaacaacaacaaaaaagaggaatgcaaagaataagacaggaactgtaatagaaaaaagcaagcaacagaagctgcctgtgagaatgacmagatgttggctttatcaggaaaaacttcaaatatccataataagcatgttcacagaattaaaggaaaccaaattaaagaaggaacatgaggtaagatgacaatgttgcatcaaataaagaatatcaatgaagagaaagaaattgtaagaaaagaactaaatgggaattctagagtgcaataactgaactgaaaaattcactagagagaattaacactagatttgcagcggcagaagaaagaataagtgaacttgaagatagatcaaagatattatgggctgggcatggtggctcacgcctgtaatcccagcactttgggaggccaaggcaggcagatcacttgaggtcaggagtttgagaccagcctgggcaacatggtgaaaccctatctttactaaaaatacaaaacttagccaggcatagtgttgcacgcctgtagtcccagctacttgggagactgaggcatgagaatcgcttggacccagaaggtgaaggctgcagcgagctgagattccgccactgctccagctgggcacagagtgagacnnnnnnnnnnnnnnnnnnnnnnnnnnnnnnnnnnnnnnnnnnnnnnnnnnnnnnnnnnnnnnnnnnnnnnnnnnnnnnnnnnnnnnnnnnnnnnnnnnnnnnnnnnnnnnnnnnnnnnnnnnnnnnnnnntatatggaatatatatattatatatataatatggaatatatacatattatatatattatatatattatatggaatatatacccattatatatattatatatataatatggaatatatatacacattatatatattatatatatgtaatatggaatatatatacacattatatatattatatataatatggaatatatatacacattatatatattatatatataatatggaatatatatacacattatatatattatatatataatatggaatatatatacacattatatatattatatatataatatggaatatatatacacattatatatattatatatataatatggaatatatatacacattatatatattatatataatatggaatatatatacacattatatatattatatatataatatggaatatatatacacattatatatattatatatataatatggaatatatatacacattatatatattatatatataatatggaatatatatacacattatatatattatatatataatatggaatatatatacacattatatatattatatatataatatggaatatatatacacattatatatattatatatataatatggaatatatatacacattatatatattatatatataatatggaatatatatacacattatatatattatatatataatatggaatatatatacacattatatatattatatatataatatggaatatatatacacattatatatattatatatataatatggaatatatatacacattatatatattatatatataatatggaatatatacacattatatatattatatatataatatggaatatatacacattatatatattatatatataatatggaatatatatacacattatatatattatatataatatggaatatatatacacattatatattatatatataatatggaatatatatacacattatatatatattatatatatatggaagccaaagannnnnnnnnnnnnnnnnnnnnnnnnnnnnnnnnnnnnnnnnnnnnnnnnnnnnnnnnnnnnnnnnnnnnnnnnnnnnnnnnnnnnnnnnnnnnnnnnnnnnnnnnnnnnnnnnnnnnnnnnnnnnnnnnnnnnnnnnnnnnnnnnnnnnnnnnnnnnnnnnnnnnnnnnnnnnnnnnnnnnnnnnnnnnnnnnnnnnnnnnnnnnnnnnnnnnnnnnnnnnnnnnnnnnnnnnnnnnnnnnnnnnnnnnnnnnnnnnnnnnnnnnnnnnnnnnnnnnnnnnnnnnnnnnnnnnnnnnnnnnnnnnnnnnnnnnnnnnnnnnnnnnnnnnnnnnnnnnnnnnnnnnnnnnnnnnnnnnnnnnnnnnnnnnnnnnnnnnnnnnnnnnnnnnnnnnnnnnnnnnnnnnnnnnnnnnnnnnnnnnnnnnnnnnnnnnnnnnnnnnnnnnnnnnnnnnnnnnnnnnnnnnnnnnnnnnnnnnnnnnnnnnnnnnnnnnnnnnnnnnnnnnnnnnnnnnnnnnnnnnnnnnnnnnnnnnnnnnnnnnnnnnnnnnnnnnnnnnnnnnnnnnnnnnnnnnnnnnnnnnnnnnnnnnnnnnnnnnnnnnnnnnnnnnnnnnnnnnnnnnnnnnnnnnnnnnnnnnnnnnnnnnnnnnnnnnnnnnnnnnnnnnnnnnnnnnnnnnnnnnnnnnnnnnnnnnnnnnnnnnnnnnnnnnnnnnnnnnnnnnnnnnnnnnnnnnnnnnnnnnnnnnnnnnnnnnnnnnnnnnnnnnnnnnnnnnnnnnnnnnnnnnnnnnnnnnnnnnnnnnnnnnnnnnnnnnnnnnnnnnnnnnnnnnnnnnnnnnnnnnnnnnnnnnnnnnnnnnnnnnnnnnnnnnnnnnnnnnnnnnnnnnnnnnnnnnnnnnnnnnnnnnnnnnnnnnnnnnnnnnnnnnnnnnnnnnnnnnnnnnnnnnnnnnnnnnnnnnnnnnnnnnnnnnnnnnnnnnnnnnnnnnnnnnnnnnnnnnnnnnnnnnnnnnnnnnnnnnnnnnnnnnnnnnnnnnnnnnnnnnnnnnnnnnnnnnnnnnnnnnnnnnnnnnnnnnnnnnnnnnnnnnnnnnnnnnnnnnnnnnnnnnnnnnnnnnnnnnnnnnnnnnnnnnnnnnnnnnnnnnnnnnnnnnnnnnnnnnnnnnnnnnnnnnnnnnnnnnnnnnnnnnnnnnnnnnnnnnnnnnnnnnnnnnnnnnnnnnnnnnnnnnnnnnnnnnnnnnnnnnnnnnnnnnnnnnnnnnnnnnnnnnnnnnnnnnnnnnnnnnnnnnnnnnnnnnnnnnnnnnnnnnnnnnnnnnnnnnnnnnnnnnnnnnnnnnnnnnnnnnnnnnnnnnnnnnnnnnnnnnnnnnnnnnnnnnnnnnnnnnnnnnnnnnnnnnnnnnnnnnnnnnnnnnnnnnnnnnnnnnnnnnnnnnnnnnnnnnnnnnnnnnnnnnnnnnnnnnnnnnnnnnnnnnnnnnnnnnnnnnnnnnnnnnnnnnnnnnnnnnnnnnnnnnnnnnnnnnnnnnnnnnnnnnnnnnnnnnnnnnnnnnnnnnnnnnnnnnnnnnnnnnnnnnnnnnnnnnnnnnnnnnnnnnnnnnnnnnnnnnnnnnnnnnnnnnnnnnnnnnnnnnnnnnnnnnnnnnnnnnnnnnnnnnnnnnnnnnnnnnnnnnnnnnnnnnnnnnnnnnnnnnnnnnnnnnnnnnnnnnnnnnnnnnnnnnnnnnnnnnnnnnnnnnnnnnnnnnnnnnnnnnnnnnnnnnnnnnnnnnnnnnnnnnnnnnnnnnnnnnnnnnnnnnnnnnnnnnnnnnnnnnnnnnnnnnnnnnnnnnnnnnnnnnnnnnnnnnnnnnnnnnnnnnnnnnnnnnnnnnnnnnnnnnnnnnnnnnnnnnnnnnnnnnnnnnnnnnnnnnnnnnnnnnnnnnnnnnnnnnnnnnnnnnnnnnnnnnnnnnnnnnnnnnnnnnnnnnnnnnnnnnnnnnnnnnnnnnnnnnnnnnnnnnnnnnnnnnnnnnnnnnnnnnnnnnnnnnnnnnnnnnnnnnnnnnnnnnnnnnnnnnnnnnnnnnnnnnnnnnnnnnnnnnnnnnnnnnnnnnnnnnnnnnnnnnnnnnnnnnnnnnnnnnnnnnnnnnnnnnnnnnnnnnnnnnnnnnnnnnnnnnnnnnnnnnnnnnnnnnnnnnnnnnnnnnnnnnnnnnnnnnnnnnnnnnnnnnnnnnnnnnnnnnnnnnnnnnnnnnnnnnnnnnnnnnnnnnnnnnnnnnnnnnnnnnnnnnnnnnnnnnnnnnnnnnnnnnnnnnnnnnnnnnnnnnnnnnnnnnnnnnnnnnnnnnnnnnnnnnnnnnnnnnnnnnnnnnnnnnnnnnnnnnnnnnnnnnnnnnnnnnnnnnnnnnnnnnnnnnnnnnnnnnnnnnnnnnnnnnnnnnnnnnnnnnnnnnnnnnnnnnnnnnnnnnnnnnnnnnnnnnnnnnnnnnnnnnnnnnnnnnnnnnnnnnnnnnnnnnnnnnnnnnnnnnnnnnnnnnnnnnnnnnnnnnnnnnnnnnnnnnnnnnnnnnnnnnnnnnnnnnnnnnnnnnnnnnnnnnnnnnnnnnnnnnnnnnnnnnnnnnnnnnnnnnnnnnnnnnnnnnnnnnnnnnnnnnnnnnnnnnnnnnnnnnnnnnnnnnnnnnnnnnnnnnnnnnnnnnnnnnnnnnnnnnnnnnnnnnnnnnnnnnnnnnnnnnnnnnnnnnnnnnnnnnnnnnnnnnnnnnnnnnnnnnnnnnnnnnnnnnnnnnnnnnnnnnnnnnnnnnnnnnnnnnnnnnnnnnnnnnnnnnnnnnnnnnnnnnnnnnnnnnnnnnnnnnnnnnnnnnnnnnnnnnnnnnnnnnnnnnnnnnnnnnnnnnnnnnnnnnnnnnnnnnnnnnnnnnnnnnnnnnnnnnnnnnnnnnnnnnnnnnnnnnnnnnnnnnnnnnnnnnnnnnnnnnnnnnnnnnnnnnnnnnnnnnnnnnnnnnnnnnnnnnnnnnnnnnnnnnnnnnnnnnnnnnnnnnnnnnnnnnnnnnnnnnnnnnnnnnnnnnnnnnnnnnnnnnnnnnnnnnnnnnnnnnnnnnnnnnnnnnnnnnnnnnnnnnnnnnnnnnnnnnnnnnnnnnnnnnnnnnnnnnnnnnnnnnnnnnnnnnnnnnnnnnnnnnnnnnnnnnnnnnnnnnnnnnnnnnnnnnnnnnnnnnnnnnnnnnnnnnnnnnnnnnnnnnnnnnnnnnnnnnnnnnnnnnnnnnnnnnnnnnnnnnnnnnnnnnnnnnnnnnnnnnnnnnnnnnnnnnnnnnnnnnnnnnnnnnnnnnnnnnnnnnnnnnnnnnnnnnnnnnnnnnnnnnnnnnnnnnnnnnnnnnnnnnnnnnnnnnnnnnnnnnnnnnnnnnnnnnnnnnnnnnnnnnnnnnnnnnnnnnnnnnnnnnnnnnnnnnnnnnnnnnnnnnnnnnnnnnnnnnnnnnnnnnnnnnnnnnnnnnnnnnnnnnnnnnnnnnnnnnnnnnnnnnnnnnnnnnnnnnnnnnnnnnnnnnnnnnnnnnnnnnnnnnnnnnnnnnnnnnnnnnnnnnnnnnnnnnnnnnnnnnnnnnnnnnnnnnnnnnnnnnnnnnnnnnnnnnnnnnnnnnnnnnnnnnnnnnnnnnnnnnnnnnnnnnnnnnnnnnnnnnnnnnnnnnnnnnnnnnnnnnnnnnnnnnnnnnnnnnnnnnnnnnnnnnnnnnnnnnnnnnnnnnnnnnnnnnnnnnnnnnnnnnnnnnnnnnnnnnnnnnnnnnnnnnnnnnnnnnnnnnnnnnnnnnnnnnnnnnnnnnnnnnnnnnnnnnnnnnnnnnnnnnnnnnnnnnnnnnnnnnnnnnnnnnnnnnnnnnnnnnnnnnnnnnnnnnnnnnnnnnnnnnnnnnnnnnnnnnnnnnnnnnnnnnnnnnnnnnnnnnnnnnnnnnnnnnnnnnnnnnnnnnnnnnnnnnnnnnnnnnnnnnnnnnnnnnnnnnnnnnnnnnnnnnnnnnnnnnnnnnnnnnnnnnnnnnnnnnnnnnnnnnnnnnnnnnnnnnnnnnnnnnnnnnnnnnnnnnnnnnnnnnnnnnnnnnnnnnnnnnnnnnnnnnnnnnnnnnnnnnnnnnnnnnnnnnnnnnnnnnnnnnnnnnnnnnnnnnnnnnnnnnnnnnnnnnnnnnnnnnnnnnnnnnnnnnnnnnnnnnnnnnnnnnnnnnnnnnnnnnnnnnnnnnnnnnnnnnnnnnnnnnnnnnnnnnnnnnnnnnnnnnnnnnnnnnnnnnnnnnnnnnnnnnnnnnnnnnnnnnnnnnnnnnnnnnnnnnnnnnnnnnnnnnnnnnnnnnnnnnnnnnnnnnnnnnnnnnnnnnnnnnnnnnnnnnnnnnnnnnnnnnnnnnnnnnnnnnnnnnnnnnnnnnnnnnnnnnnnnnnnnnnnnnnnnnnnnnnnnnnnnnnnnnnnnnnnnnnnnnnnnnnnnnnnnnnnnnnnnnnnnnnnnnnnnnnnnnnnnnnnnnnnnnnnnnnnnnnnnnnnnnnnnnnnnnnnnnnnnnnnnnnnnnnnnnnnnnnnnnnnnnnnnnnnnnnnnnnnnnnnnnnnnnnnnnnnnnnnnnnnnnnnnnnnnnnnnnnnnnnnnnnnnnnnnnnnnnnnnnnnnnnnnnnnnnnnnnnnnnnnnnnnnnnnnnnnnnnnnnnnnnnnnnnnnnnnnnnnnnnnnnnnnnnnnnnnnnnnnnnnnnnnnnnnnnnnnnnnnnnnnnnnnnnnnnnnnnnnnnnnnnnnnnnnnnnnnnnnnnnnnnnnnnnnnnnnnnnnnnnnnnnnnnnnnnnnnnnnnnnnnnnnnnnnnnnnnnnnnnnnnnnnnnnnnnnnnnnnnnnnnnnnnnnnnnnnnnnnnnnnnnnnnnnnnnnnnnnnnnnnnnnnnnnnnnnnnnnnnnnnnnnnnnnnnnnnnnnnnnnnnnnnnnnnnnnnnnnnnnnnnnnnnnnnnnnnnnnnnnnnnnnnnnnnnnnnnnnnnnnnnnnnnnnnnnnnnnnnnnnnnnnnnnnnnnnnnnnnnnnnnnnnnnnnnnnnnnnnnnnnnnnnnnnnnnnnnnnnnnnnnnnnnnnnnnnnnnnnnnnnnnnnnnnnnnnnnnnnnnnnnnnnnnnnnnnnnnnnnnnnnnnnnnnnnnnnnnnnnnnnnnnnnnnnnnnnnnnnnnnnnnnnnnnnnnnnnnnnnnnnnnnnnnnnnnnnnnnnnnnnnnnnnnnnnnnnnnnnnnnnnnnnnnnnnnnnnnnnnnnnnnnnnnnnnnnnnnnnnnnnnnnnnnnnnnnnnnnnnnnnnnnnnnnnnnnnnnnnnnnnnnnnnnnnnnnnnnnnnnnnnnnnnnnnnnnnnnnnnnnnnnnnnnnnnnnnnnnnnnnnnnnnnnnnnnnnnnnnnnnnnnnnnnnnnnnnnnnnnnnnnnnnnnnnnnnnnnnnnnnnnnnnnnnnnnnnnnnnnnnnnnnnnnnnnnnnnnnnnnnnnnnnnnnnnnnnnnnnnnnnnnnnnnnnnnnnnnnnnnnnnnnnnnnnnnnnnnnnnnnnnnnnnnnnnnnnnnnnnnnnnnnnnnnnnnnnnnnnnnnnnnnnnnnnnnnnnnnnnnnnnnnnnnnnnnnnnnnnnnnnnnnnnnnnnnnnnnnnnnnnnnnnnnnnnnnnnnnnnnnnnnnnnnnnnnnnnnnnnnnnnnnnnnnnnnnnnnnnnnnnnnnnnnnnnnnnnnnnnnnnnnnnnnnnnnnnnnnnnnnnnnnnnnnnnnnnnnnnnnnnnnnnnnnnnnnnnnnnnnnnnnnnnnnnnnnnnnnnnnnnnnnnnnnnnnnnnnnnnnnnnnnnnnnnnnnnnnnnnnnnnnnnnnnnnnnnnnnnnnnnnnnnnnnnnnnnnnnnnnnnnnnnnnnnnnnnnnnnnnnnnnnnnnnnnnnnnnnnnnnnnnnnnnnnnnnnnnnnnnnnnnnnnnnnnnnnnnnnnnnnnnnnnnnnnnnnnnnnnnnnnnnnnnnnnnnnnnnnnnnnnnnnnnnnnnnnnnnnnnnnnnnnnnnnnnnnnnnnnnnnnnnnnnnnnnnnnnnnnnnnnnnnnnnnnnnnnnnnnnnnnnnnnnnnnnnnnnnnnnnnnnnnnnnnnnnnnnnnnnnnnnnnnnnnnnnnnnnnnnnnnnnnnnnnnnnnnnnnnnnnnnnnnnnnnnnnnnnnnnnnnnnnnnnnnnnnnnnnnnnnnnnnnnnnnnnnnnnnnnnnnnnnnnnnnnnnnnnnnnnnnnnnnnnnnnnnnnnnnnnnnnnnnnnnnnnnnnnnnnnnnnnnnnnnnnnnnnnnnnnnnnnnnnnnnnnnnnnnnnnnnnnnnnnnnnnnnnnnnnnnnnnnnnnnnnnnnnnnnnnnnnnnnnnnnnnnnnnnnnnnnnnnnnnnnnnnnnnnnnnnnnnnnnnnnnnnnnnnnnnnnnnnnnnnnnnnnnnnnnnnnnnnnnnnnnnnnnnnnnnnnnnnnnnnnnnnnnnnnnnnnnnnnnnnnnnnnnnnnnnnnnnnnnnnnnnnnnnnnnnnnnnnnnnnnnnnnnnnnnnnnnnnnnnnnnnnnnnnnnnnnnnnnnnnnnnnnnnnnnnnnnnnnnnnnnnnnnnnnnnnnnnnnnnnnnnnnnnnnnnnnnnnnnnnnnnnnnnnnnnnnnnnnnnnnnnnnnnnnnnnnnnnnnnnnnnnnnnnnnnnnnnnnnnnnnnnnnnnnnnnnnnnnnnnnnnnnnnnnnnnnnnnnnnnnnnnnnnnnnnnnnnnnnnnnnnnnnnnnnnnnnnnnnnnnnnnnnnnnnnnnnnnnnnnnnnnnnnnnnnnnnnnnnnnnnnnnnnnnnnnnnnnnnnnnnnnnnnnnnnnnnnnnnnnnnnnnnnnnnnnnnnnnnnnnnnnnnnnnnnnnnnnnnnnnnnnnnnnnnnnnnnnnnnnnnnnnnnnnnnnnnnnnnnnnnnnnnnnnnnnnnnnnnnnnnnnnnnnnnnnnnnnnnnnnnnnnnnnnnnnnnnnnnnnnnnnnnnnnnnnnnnnnnnnnnnnnnnnnnnnnnnnnnnnnnnnnnnnnnnnnnnnnnnnnnnnnnnnnnnnnnnnnnnnnnnnnnnnnnnnnnnnnnnnnnnnnnnnnnnnnnnnnnnnnnnnnnnnnnnnnnnnnnnnnnnnnnnnnnnnnnnnnnnnnnnnnnnnnnnnnnnnnnnnnnnnnnnnnnnnnnnnnnnnnnnnnnnnnnnnnnnnnnnnnnnnnnnnnnnnnnnnnnnnnnnnnnnnnnnnnnnnnnnnnnnnnnnnnnnnnnnnnnnnnnnnnnnnnnnnnnnnnnnnnnnnnnnnnnnnnnnnnnnnnnnnnnnnnnnnnnnnnnnnnnnnnnnnnnnnnnnnnnnnnnnnnnnnnnnnnnnnnnnnnnnnnnnnnnnnnnnnnnnnnnnnnnnnnnnnnnnnnnnnnnnnnnnnnnnnnnnnnnnnnnnnnnnnnnnnnnnnnnnnnnnnnnnnnnnnnnnnnnnnnnnnnnnnnnnnnnnnnnnnnnnnnnnnnnnnnnnnnnnnnnnnnnnnnnnnnnnnnnnnnnnnnnnnnnnnnnnnnnnnnnnnnnnnnnnnnnnnnnnnnnnnnnnnnnnnnnnnnnnnnnnnnnnnnnnnnnnnnnnnnnnnnnnnnnnnnnnnnnnnnnnnnnnnnnnnnnnnnnnnnnnnnnnnnnnnnnnnnnnnnnnnnnnnnnnnnnnnnnnnnnnnnnnnnnnnnnnnnnnnnnnnnnnnnnnnnnnnnnnnnnnnnnnnnnnnnnnnnnnnnnnnnnnnnnnnnnnnnnnnnnnnnnnnnnnnnnnnnnnnnnnnnnnnnnnnnnnnnnnnnnnnnnnnnnnnnnnnnnnnnnnnnnnnnnnnnnnnnnnnnnnnnnnnnnnnnnnnnnnnnnnnnnnnnnnnnnnnnnnnnnnnnnnnnnnnnnnnnnnnnnnnnnnnnnnnnnnnnnnnnnnnnnnnnnnnnnnnnnnnnnnnnnnnnnnnnnnnnnnnnnnnnnnnnnnnnnnnnnnnnnnnnnnnnnnnnnnnnnnnnnnnnnnnnnnnnnnnnnnnnnnnnnnnnnnnnnnnnnnnnnnnnnnnnnnnnnnnnnnnnnnnnnnnnnnnnnnnnnnnnnnnnnnnnnnnnnnnnnnnnnnnnnnnnnnnnnnnnnnnnnnnnnnnnnnnnnnnnnnnnnnnnnnnnnnnnnnnnnnnnnnnnnnnnnnnnnnnnnnnnnnnnnnnnnnnnnnnnnnnnnnnnnnnnnnnnnnnnnnnnnnnnnnnnnnnnnnnnnnnnnnnnnnnnnnnnnnnnnnnnnnnnnnnnnnnnnnnnnnnnnnnnnnnnnnnnnnnnnnnnnnnnnnnnnnnnnnnnnnnnnnnnnnnnnnnnnnnnnnnnnnnnnnnnnnnnnnnnnnnnnnnnnnnnnnnnnnnnnnnnnnnnnnnnnnnnnnnnnnnnnnnnnnnnnnnnnnnnnnnnnnnnnnnnnnnnnnnnnnnnnnnnnnnnnnnnnnnnnnnnnnnnnnnnnnnnnnnnnnnnnnnnnnnnnnnnnnnnnnnnnnnnnnnnnnnnnnnnnnnnnnnnnnnnnnnnnnnnnnnnnnnnnnnnnnnnnnnnnnnnnnnnnnnnnnnnnnnnnnnnnnnnnnnnnnnngctagagtgcagttgcgcgatctcagcacccctgcaagctccacctcccaggttcatgccattctcctgcctcagcctcccaagcagctgggactacaggcgcccgccaccatgcccggctaattttttgtatttttagtagagacgggatttcaccgtgttagccaggatggtacttgatcgcctgaccttgtgatccgcccgcctcggcctcccaacgtgctgggattacaggcatgagccaccatgcccggcctttttttttttttcagacagaatctcactgtgttgcccaagctggagtgcagtggtcactgcaacctccatctcccaggtttaagtgattctcgtgcctcagcctcctaaatagctgggattacaggcatgtgccaccatgcccagctaaagatggggcagggggtgcagggatctcgatatgttggccagactcatcttgaactcctgacttcaagtgatcaacctgcttcagcctcccaaagtgctgggattacaggtgtgagccaccatgccggctaattttgttgttattgttgttgttgttttgagatagtctcactcctgtcgcgcatactgaagtgcagaggcgcaatcttggctcactgcaacctccacctggctcactgcaaccttcacctcctggrttcaagcgattctccttcctcagcctcctgagtagctggggttacaggtgtgcaccaccacccccagctaatttttgattttttagtagagacggggttttgccatgttggccaggctggtcttgaactcctgacctcaggcgatctgcctgccttggcctcccaatgtgctaggattacatgcgtgagccaccatgcccggccttgttgtttttagaaacsatattttttcctgttagcttgtgaaagttgattgggtcattcttgtcatccccaactaaaacagtgtcaagaggtaaagggaaaaaaaagcactcagggcacataacattgctccaaaaatgtaattatctgtaagcctggctgctgaaactgcccgctataacctaaaccagtttttttgtttgtttgttttgagatggagtctcactctgtcgcccaggctggaatgcaatggcatgattttggctcactgcaacctctgcctccaggttcatgtgattctcctgcctcagcctcccaagtagctgggattacaggcacccgccaacatacccagccaatttttgtatttttagcagagacggggtttcatcatgttggtcaggctggtcttgaactcctgacctcaggtgatccacccgcctcggcctcccaaagcgctgggattacaggcgtgagccaccgtgccyggctgacctaaaccagttttatctaattagctgctaaaaacaacctgcagtgactctaagratygttttacctagttgccattacttgccaatcaaaacttgccagctccccaaaaccttactagtgacaatgaactttcttaaagaacaatatacaacagttctctttttttgttgtttgttttgatatagggtcttgctttgttgcccaggctggagtgttccggtgtgatcacagctcactgcactcccaaactcctgggctcaagtgaacctctcatcttggcttcccaacgtgttgggattacaggcatgagccactgttcctggctatatttctcttttacaaaaataaaacctctaaccatctgtttgttcttctgacgtaccaaagaccaccctgtttgtgtgtatgccctgaatggcaattattgcttcccaaatgttttaaatttakagatttgtctctgtattttattttacttggacagcctttttctttttcttttctttttttctttctttttttttttttttttttttagatggagtttcacttttattgcccaggctggaggacagtggtgcaatctggggctcactgcaacttctgcctcccgggttaaagcaattctcctgcctcagcctccccagtagctgggattacaggtgcccgcccccatgcckggctaatttttgtatttttagtagagatggggttttgccatgttggccaagctggtctcgaactcctgacctcaggtgatccacccgcctcagcctcccaaagtgctgggattacaggcgtgagccactgcgcctggcttggacagcctttttgtacccctgattcccaggagaactgctgctctattttcccatggcttaccttgaaaagagtaggatactagagaaaaggatggctaatcacgtgtttacaagccatgtttcaggagatgacccttgtagcccggatatttatttgcctcaccaaaattcaggttctaggtgtaagccaggatttgggggatggaactgaaaatgcttctccaaacggtgaaaagcgggcccagcgcagaggctgaggaggaaggatcacttgaagccaggagttcgagaccagcctgggcaacatagagagacctccccccacgccctgcccaccaccgccgtctttacaaaaaaattagccaggcatggtggtgggaccacaggggcacaggctgaggtcagaggattgctccagcccaggagttccaggctgcaatgaatggtgataaacccactgcactctttcctgggcaacagagtgagaccctgtcttaaataaaataaaataaataaataaaaaaaaaagaaaagtgaaggcaacgttaataagtgtccactatgacataataataaccagcatcacacacacacacvaatcttgcatatatcacmaaaatctcagtatggtaattctgtggagaaaaaaaaaaagcccatccaggtaagcatagaaagtgttttttcatcatctccctttgactccaaatgaagaagcagagttcccaatagcatgaactagatgttggcagaggaaaaagcgagtcctcgtcctatcctggtgtaaacttctgattctggacaattctcagtaggattggcaatgactcttctaggcctccttgtgattgttgatatattttttttaatttaaagttccggaatacatgtccaggacgtgcaggtttgttacacaggtaaatgtgtgccatggtggtttgctgtaactatcatcccatcacctaggtattaagctccgcatgtattagctatttatcttgatgctcccctcccccggttaycaggatttttaaacagtttgctctaattcactgacaggattcttttagaatgaatctaaaaaagctgggaatctttaacctgagcgcagatcggatcacgtggaacggtgctggtgtttgttaaaaattcagattgccccgaattttcgactcagagggtctgaagtggggctaagatctgcagattaacgggctccgtgggagrctccctgctggtggccagtcccggggtttagctgttcactgttgctactcgtgctaaaccacggtctaacactaccgacactattaatcgccctggtcctcaagacagccgcgaccccagacgggtgaggccctcatcctctagcaccagatggggcctgggaactgctgcttagcagattcagctacccacgtggtcacccggggcaaccacaaggtcgactcaaaagaccaaaataaatgtataacgaatgccaggaccaaagccggaatatatctaatcattcattttgaggtttaaacttaaaaatgttacataaaaaaataagtaacctgccaaaaaatgcagagtggcggcgggggcggggggagaggtggtgaacgcgaggggcagtacttccgggtcaggtgggccggctgtcttgaccttctttgcggctcggccattttgtcccagtcagtccggaggctgcggctkcagaagtaccgcctgcggagtaactgcaaagatgctgtccgtgcgcgttgctgcggccgtggtccgcgcccttcctcggcgggccggactggtgagcaccgaaggccggcatgatgcaggcggccgggtggggctgcagggtggtggtgcgccggctcgggcgctctctgcaggagggcgaggggctgtggcgratgccgccatyttgcacccgtggcttctccggctggacagagcaggcgacacaggtgcccttttgctcgtcacctgcgcagaggcagaatggtacagggcagacagttaactcgatggtgtccagagacagggcctcaagattcctgycttcggctgacagcggccctagaagggggatcttgggtgaaggtcagggcttgggcgctagctctccgaggcctgttctgaatcggtgaggttyctctctttcgattcttagggtcgcgtcccgctgaaggtcagaaaactgctgtcagctcttgttgaagctagtcagtggagtctgacattgtgtgaaggtcagcaggcccagcatttcacctctgcctggagctcagtttagaggaaaggaataaatgaaggtggtttttggaatacttacgtaggctttctcttagtgctgaatacgaaacgaccgtgaaaacgtcctgcaggtgcaaagaaccatttcatgtggccagcactgtgacaacagtgaagctggtttctaaattgtctctccggcagagtgtgtgctttgtggcacttggacgtgtttaaagaatttgtccttgagttttccacctggttttgagtaatttttagtgatggagaattcaagtaaaagagaacaaggttggaaaatggctgtaaggattaatacccttcgttatttgtttcccttgaaattaacatgatttcagtgtaaacgcattgacactgacactttttttttgttctaaaagtaatctcaatttgaaaggtgaaataaacatgttggctgttttgctgccttaacaaccgctggtagcatcttgggtttctgttaacaaaaaagcatttttaacggttttcatctagctcytatggaaggtagaggcttcagaattgacagtgaccagtcgcagtattacaacttgaaggagaaactgaaggaagttccaggtggctgcaggatttgttgagagagtaaaataagtccacatgccacaactcttggtttctaatctaactctagcatttattcagtttttgtttgcytgktttttttttttttttttttttgagatggtgtctcgctcagtcgcccaggctggaytgcaatggcgtgatctccgcccactgcaaccaccgcctcccaggatcaagtgattctcccacctcagcctcccgagtagctgggattacaggcacccgccgtcatgccctgctactttttgtagtttttcgtagagacggggtttcaccatgttggctaggctggtcttgaactcctgacgtcaggtgatccgcycgcctcggccttctgaagtgctgggattacaagcatgagccgtcgtgcccggccgcttgttgtcgttgttgttgttgttgtttttaagtaaaattggaactactttgagttttgccccttgtaggaagctgtttatcttagaattcctgcaactccattaaaatacatctaaagtcaaaataataaaaattgggtacctttaaagggaaagacacttacattttgttaacagttgctttttttttttttttttgagacggagttttgcttttgtcgcccaggctggagtgcagtggcgcgatcttggctcaccacaacctctgcctcccaggttcaagcgattctcctgcctcagcttcccgagtagctgggattacaggcatgtgccaccacgcccagctaattttgtatttctagtagagacggggtttctccatgttggtcaggctggtctccaactcccgaccttaggtaatccgcccgccttggcctcccaaagtgctgggattacaggcatgagccaccgtgccctgccaatagttgctttttaaaatactgactgccaggccgggtgcagtggctgacgtctgtaattccagcactttgggaggccaaggtgggtgcatcacctgaagtcaggagttcgagatcaacctggccaacatggcgaaaccctgtctctactaaaaataaaaaaattagccgggcatggtggtggtcgcctgtagtcccagctactcaggaggccgaggcatgagaatcgcttgaacctgggaggtgaaggttgcaatgagccaagatcgtgcccctgcactccagcttgggtgacagaatgagactccgtctcagaaggaaaaaaaaaatgtgtgtgtatatatatatttactgcccagtctgggcaatatgatgaaatcctgtctctataaaaaaaataagtacaaaaattagcctggccaggtggcgcactcctgtgatcccacctactggggaggctgaggtgggaggatcacctgagcccaggaagtcgaggctgtagtgagccgtgattgagccactgcactccgacctgggtgacaagagtgagaccctgtcccaaaaaagaaaaaaaaataagccgggtgcggtgctcacgcctatagttctagcactttgggaggccaaggcgggtggatcacttgaggtcaggagttcgagaccagcctggccagcatggtgaaaccccgtctctactaaaaatataaaaaattaacctggtggaggtggcgcacccctgtagtcccagctactcgggaggctgagaatcgcttgagactaggaggtggaggatgcagtgagccgtctcaaaaaamcaataataataaagtacagactgcattttaaaaatatgcgagtgtttactgtgtactaggagctgtataaaaggttttcacatatatcaaaagctactttcccatttgacattttaaacaaaatgctttatatgtaattagcattttcaccagtactttgatcacactaagctggcatttgtttaagcttgtaagttttataaaggctttgttaaaaatcaaatttttaagaatacttttgcactaggtctccagaaatgctttgggttcatctttcattgctgcaaggaacttccatgcctctaacactcatcttcaaaagactggtaagttattatttctcagtctacgccgcacttactagatgaagatataaattacatacatcgtataactgtggtgagttgtttttcatttgttagttttttctctagtttgtatagactctcaggttcttaaaccatawtgttaccatttagccctgtcatggttctcttgttatagtcaaatgaactactgttacatatttttcttttgatattagtatggcttctttgttctggtaatggcccttgggtagaaacagaaagaacatacactaggtaatggaatctttgtgacctctggaagacttcctttttccttttctaaaaggcattagaaaaaatgtaagttcttattgataggttttcttattckttttctttttttttgagacagaatcttgctctgtcgccaggctggagtgcagtggcaagatctcggctcactgcaacctctgtctcctgagttcaagcaattctactgcctcagtctcctgactagctgggattacaggcatgcaccaccatgcccggctaattttttgtattttagtagagacaaggtttcaccatgttggccaggatggtctcgatctcctgaccttgtgatatgcctgcctcggcctcccaaagtgctgggattaaaggcgtgagccactgcaccggtccactgataggttttattttttcaaaggcagtagctactagatatttggcaatctgtgaacttgcacattacagatgcagtagagaagtggggaggcaagcataggaagacactataagttggggaatttctttggagatgagtatttggacttttaaaataaaggttaaatatatatgtgtgtgagagtgtgtgtgtrtrtrtgtgtgtgtgtgtgtgtgtgtatgtgtacacacacccccacgttcagcatatatgtttttcttttttcttttttttttgagatggagttttgctcttgttgcccaggctggagtgcagtggcatgatctgggctcactgcagcctctgcctcacgggttcaagtgattctcctgcctcagcctcccgagtaggtgggattacaggtgcccaccaccacacccagctaatttttgtattttttgtagagacaaggtttcaccatgttagccaggctggtctcgaactcctgacctcaggtgatccacctgccttggcctcccaaagtggtgggattacagacatgaggcactgtgcgtggcctccttttttttgagactctgttgcccaagctggagtgcagttgcgccatctcagctcactgcaacctccacctcccaggttcaagtgattctcctgagtcagcttccctagtggctaggattacaggcacgcaccaccacacctggctaatttttgtatttttagtagagatagagtttcgccatgttggcctggctgatctcaaagccctgaccccaggggatccgtctaccttggcctcccaaagtgctgggatgtttttttattttgttttgttttgttttttgagacagagtttcgctctgttgcccaagctggggtgcagtagcgtagtcttggctcactggaccctccacctcctgggtttgagtgattctctcctgcctcagcctcccgagtagctggtattacaagcatgcaccaccacagctggctaatttttttttttttttyccttagtagagatgggattttgctgtgttggccaggctggtccaaactcttggcctcaagtggtccgcccgcctcccaaagtgctggtattactggcgtgagccactgcacccaacccctgtatgctaagatgaagaataccacctatactaccctgtgtgccttgaaagagaaagacacactttgttaacagttgatttttattttttattttttatttttttgagatagagtcttgctctgtctccaggctggagtgcagtggggctatctcagctcactgcaacctccttctcccaggttcaagtgattctcgtgcctcagccacccaagtagctgggattacaggcatgcaccaccatgcccggcaaacttttgtgtttttagtagagatgggggtttcaccatgttgcccaggctggtctcgaactcctggcctcaagtgatccaccccctttggcatcccaaagtgctggttttacaggcatgatctaccgtgcctggccaacagttggtttttaaaatatgtttttattgaatttagccaaaaattcaggttttaacatagttacagatttcttagaaattaaaggagaacatttattttaagggttttacttaatttgattagcttcttgtctggtttacatttgttttgtgtggacttttttttccttaatcacttggttttattttcatagcttttaaaaatagaatctcgtgttacagtgtagaatatatatatatatatataatttttgtgtgtgtgatagtctcactttgtcacctatgctggagtgcagtgacacaatcttggcttactgtgacttccacctcccaggttcaagcagttcttctgtctcagcctcctgagtagctgggactacaggcatgcccgtgcccagctaattttttttttatttttagtggagacggggtttcacaatgttggccaggctggtctcgaactccttacctcaagtgatctgcctgcctcagcctcctaaagtgctagcattaccactgtggctagcgtgagccactgtgctgggtctgtagaatatatttggattattatgatcacaaaactagttttttgttgttgagaaatgggctttgaaaagatccgaggaccagatttttattattattattattattattattattattattattattattattattattttgagatggagtttttgcccttgttacccaggcttgagtgcaatggtgtgatttcagctcaccgcaacctccgcctcctgkgttcaagygattcttctgcctcagcctccgcctcccgagtagctgggattrcaggcatgtgccaccatgcccagctaattttgtatttttagtagagacagggttctccatgttggtcaggctggtctcaaactcctgcccttaggtgatctgcctgcctcagcctccaaaagtgctgggattacagctgtgagccactgtgcctggcccagattatttttttaattgaattgaattgtcttccrtagggactgctgagatgtcctctattcttgaagagcgtattcttggagctgatacctctgttgatcttgaagaaactgggcgtgtcttaagtattggtgatggtattgcccgcgtacatgggctgaggaatgttcaagcagaagaaatggtagagttttcttcaggcttaaaggtaaattataaaataagattttggtgttttaggatctaagtcttctcagttattcatttagcgattcaaagattgtatcagatttttaaaaaactttgtcttaatttgcctcagatttttttcttgttattatcatagattgtaaagagaataaacttaagggtttgaattagccaagtttttttactctagggactgatttatacataacttgtagccactggctccaaaatataaaattsaataarctttcaccccaaatccaagaagtttaagtctgttctgtcttgctgttaagattattttatacaaaagcaaagcatttgataacttcaacaaaatttttctggtggaaattggaagtccgtgactttgtatttctagtgagtagacatattgttcaaaggmgagttttggtgtagctatcagaagctctctaatgtaagtctactttgtattgggttgagcctcatctgtcagggtatgagaaataagttgtaggagttagggaaagcagaggatgacatctggataaactagagagagtggaactgtctagtaggcatgcagatatgggaaaagatagtcttgatactcttggtaatgtctactacggaaaaagagccacttgatgtggaagaataattacagagcccaaarttatcattagctgtaagacattggccaatttagcatcttcagtgtacagtatttatctttgaaaggtgaggtcgaaacagattaattctgagttccccttttagcttttgaaatccaagtgtctagaacagtactgtccagtagtattggaaatatgtagtattctgcagtgatgagaatacatctgtgctgtttaatatggtacctactatactatcactattaatcatgtaaaatgtggctagtgtgacaggaactgaatttttaatcttttaaatttgacaaatttaaatagccacatgtggttagtggatgctgtattgaacatcagagatgtaggttaaagtttttggatgtgtaatgatattccatgatactccaagtacttctccagagttttcattattgaccagactattcctggaatagcctttttgcttcagacatgatttaaagatctaaaatatagttttaatgatgagagatgatttggtgctgttatgttatgaaaatttgtatttgattggttacagttaggtagcttttaatttcactttctactaactcraagagtacaggttttgattaatttttgaaactgtttatggagcttctcacacataaataagatgataatcaaatttgtcttaagatttccatttggccttcatcactttatttcatactgatcacccagcccaagaatcattgccaaagaaaatacagtggaaaaaagcttattaacctgtccaatttctttgcttctgtaatagttatttgaggatatgatagtgagcrtattaggcttatcaatgtgctgtcctaagattattcaaaatagcaattttaaaagtcttaatcagagagggttgtttgttagttggaaaagtactcaagaataaaccaggtgaaaaggacaatactgcttccccccccamccccygactattttcttatgtagtattggtgtatggggaggagtgcccattcagcttcattgatgttcarttgtgtcttttgtgcagggtatgtccttgaacttggaacctgacaatgttggtgttgtcgtgtttggaaatgataaactaattaaggaaggagatatagtgaagaggacaggagccattgtggacgttccagttggtgaggagctgttgggtcgtgtagttgatgcccttggtaatgctattgatggaaaggtaggtttaatgttcgttagatatagttgcagctwctaacaaacatcaaaactgattatgcttagggtttttctttttattttttaacagggtccaattggttccaagacgcgtaggcgagttggtctgaaagcccccggtatcattcctcgaatttcagtgcgggaaccaatgcagactggcattaaggctgtggatagcttggtgccaattggtcgtggtcagcgtgaactgattattggtgaccgacagactgggtaaagactcaaaagcatattaaaagttctaactaaaatttgctcaatggaaggattatattttagtcttggaatggtaaatggtaatggggacattagaatctaatacgaggattaatagtaaaatttcagctgggaagtgaagggggccagcccctccacacctgtgggtatttctcatcaggtgggacgagctagctcagtcggtagagcatgggactcttaatcccagggtcgtgggtttgagccccatgttgggcaccagatgaagggggccagcccctccacacctgtgagtatttctcgtcaggtgggttgagagactgagaaaataaataagacacagakacaaagtatagagaaagaacagtgggcccaggggaacggcgctcagcatatggaggacccatgccgccactggtctctgagttccctcagtatttattgatcactatctctactatctcggtgtgggggatgtggcaggactgtagggttaatggtggggagagggtcagcaggaaaacgtgagcaaaggtctctgtgtcataaataagtttaaggaaaggtgctgtgccttgatgtgcatgtaggccagatttatgtttgactttacacaaacatctcagtgcagtaaagagcagtattgctgccagcatatctcacctccagccatagggtggttttctcctatctcagtaaatagaatgtacgattgggttttacaccaagacattccattccccgggacaagcaggagacagatgccttcatcttatctcaactgcaaagaggctttcctctttcactaatcctcctcagcacagaccctttacgagtatcgggctgggggatggtcaggtctttcccttcccacgaggccatatctcaggctgtctcagtggggagaaaccttgcacaatacccaggctttattgggcagagggccctgcagccttccacagtgcattgtgtccctgggtactcgagactggagaatggcgatracttttacgaagtatactgcctgcaaacacatttttaccaaagcacatcctgcacagccctaaatccgttaaaccttaagtcaacacagcacatgtttctgcgagcacagggttggggctatggttacagactaacagcatctcaaggcagaagaatttttcttagtacagaacaaaatggagtttcttatgtcttcttctttmtgcatagacacagtaacagtctgatctctctttctttcccccacagggaagtccttttaagtttaggaagatttatatttactttctctttttaaaggaaaacctcaattgctattgacacaatcattaaccagaaacgtttcaatgatggatctgatgaaaagaagaagctgtactgtatttatgttgctattggtcaaaagagatccactgttgcccagttggtgaagagacttacagatgcaggtattaaaagaaatttagtcccattgctattatcttaagtcccattgctgctgattgtagaatagcttctacttaatgaaggcatattttaattacttcctaatgggctgaactttttaatacaaatcagtaggtaagacaatgtaaaacagtagtacatttaaaggttttgttggtttctttaaagtggaagctgtttgattctgattaactctttttttgttgtttgagacggagtttcactcttgttgcccaggctggagtgcgatggcacgatctcagctcactgcaacctctgcctcctgggttcaagcgattctcctgtctcagcctcccgagtagctgggattacaggtgcatgccaccacgtccggctaatttttgtatttttagtagagacggagtttcctcatattggtcaggctggtctcgaactcctgacctcaggtgatcacccgcctagggcctcccaaagtgctgggattacaggcatgagccactgcgcctggcctgattaactcttaatggtaaatatttttagcacttrggtaatttttatagtagcctccaatttaaaaccacaatattgataaaattgtaaaatatattttctcagatgccatgaagtacaccattgtggtgtcggctacggcctcggatgctgccccacttcagtacctggctccttactctggctgttccatgggagagtattttagagacaatggcaaacatgctttgatcatctatgacgacttatccaaacaggtcaaaggaaataaatttttagaatccatttatttgtactgaagtaaaagttcacatatgcaacttctatttaataggttaacttcacaaacctattctgtaccataggctgttgcttaccgtcagatgtctctgttgctccgccgaccccctggtcgtgaggcctatcctggtgatgtgttctacctacactcccggttgctrgagagagcagccaaaatgaacgatgcttttggtggtggctccttgactgctttgccagtcatagaaacacaggctggtgatgtgtctgcttacattccaacaaatgtcatttccatcactgacggacaggtattattttaatgattaaaakaaatgttaaaaaagatttggataattctaaggcattggttgagactaatggtrtattgrctgatttgctaaatgcattttactttttattrtggaaaatttcaaatacatagaaaagttaggagaatggcatagtgaaaccccatgtatctgtcacccagttattrcatagagtagcrtgtttcgttctagtttcatttttaaccactactgttctcccttctagataattttgaatcaaatagaaattatatcacttcatttgtatgtatttcagtataaatatgttgcctattatgtttttttctcatctcatgcacatctcctaattgcagcaataaaatatacaggtcaggtcgtgaaagatttggggtactgatgctttgcattgttaggttttgagtttcagctttttggcataatgacttaaatttgaagatagttgatttcttactttaagcttgctagcgtgcgtatttccttacattatagatcttcttggaaacagaattgttctacaaaggtatccgccctgcaattaacgttggtctgtctgtatctcgtgtcggatccgctgcccaaaccagggctatgaagcaggtaattttgcatcactttggcagtaagggggctatcattagattagcatcttaaggtattaatatattaactatatttgtatagtgctctgtgtcactgagttacagtacagtaatttctgtattgcaggtagcaggtaccatgaagctggaattggctcagtatcgtgaggttgctgcttttgcccagttcggttctgacctcgatgctgccactcaacaacttttgagtcgtggcgtgcgtctaactgagttgctgaagcaaggacagtattgtaagttgttcttttcttcatttggtcaggttcctattgtgtatcagggtcttcccaggcctacagagctgcatcacatatcacggcctgtactacgtgttgttatctgttatctttcatcaaaggcacttttacttaaactacatttgttttttgatttttgatttttttttttttttgagacgaagtttcattcttacggcctaggctgaagtgcaatggcgcaaccttggctcattgcaacctccacctcctggattcacgcgattctcctgcctcagcctccttagtagctcggattacaggtgtgagccaccacgcccgrctaatttttgtatttttagtagagacagggtttcaccatgttggccaggctggtctcgawctcctgacctcaggtaatccaccctgcctcagcctcccaamgtgctgggattacaggtgtgagcccccatgcccggccctgtattctgttttttaaagagagacagtgtcttgcagtgtcacccaggctggagkgcagtggtgccatcatagctcactgcaggcttgaactcctgggctcaagcagtcctgcagccttagcttcctgagtagctaagactacgggcatgcactaccatgcctggctaatttttttgtattttgtagagacagggtctcactatgttgcccaggctggtcttgaactcctggccttatgccatcttyccacctctcaaagtgctggcattataggcgtgagccaccatgcccggcctcaaactatctttctttttytttctttyttttttttttttttttttaatacagagtctccttctgtcacccaggctggagtatatttttagtagaaatggtaaaacctctaccattttggccaggctgatcttgaacccctgaccttaagtggtccacccgcctcagagtcctaaagtgctgggattacaggtgtgagttaccatgcccggcccaaactacatttcttattatcatttgagtgtaaatgataggggcttcacaaccaggaaaacttaagtatatttaatgtcytyctttcaggaattaaggcctgttagagtcccctcccccacttggctatatgaatrtgtaatttggcagatttaaaagaaagttaatacgtttttattttgtcaagtcatttcagcaaaatatttatactcaaaacagtattaacactgtcagattataaacagtgcttatggactatactgaaagattatgcctcaagccttgaaaatataagaaataactgttttctgtcaggggtgggaggaaggattattaagtggagttctaggtcattgatattgtgaagaatagataatttacagggacatgttaggaattggagaaaaagtaagttttcctgaccttggtaacatggcattcatttctttgagcaactcacttggcattcttcttgtatcttttcagctcccatggctattgaagaacaagtggctgttatctatgcgggtgtaaggggatatcttgataaactggagcccagcaagattacaaagtttgagaatgctttcttgtctcatgtcgtcagccagcaccaagccttgttgggcactatcaggtatgaatgcaattsttggcatctttttttaaagttatgtttaagatatgaagttaaaattattttcaaatctgtagttaggctagtcattaaaactttttccaggtcagaacttacgacctgcttttatttccaaatagggctgatggaaagatctcagaacaatcagatgcaaagctgaaagagattgtaacaaatttcttggctggatttgaagcttaaactcctgtggattcacatcaaataccagttcagttttgtcattgttctagtaaattagttccatttgtaaaaggkttactctcatactccttatgtacagaaatcacatgaaaaataaaggttccataatgcrtagttgttttctgtcatttgtgttattctttaaaaccaagatcaaattgagaaattggtaagcaaatgcttcttgatctattttacttgaatattggtacagtcaactgggctagataattcaaggctgagctctttgtaagttttttttttgtttttttttttgagactgattctcactctgtcactgaggctggagtgcagtggcaccctgtcggcccactgcaacctccgtctccgggttcaagcaattctcttgcctcagcctcccacgtagctgggattacaggtgcccaccaccacgcctggctagttttttagtatttttagtagagacggggtttcaccatgttggccaggccggtcacgaactcctgacctcaggtgatccacctgccttggcctacctaccacagtgctgggattacaggtgtgagccaccgcacccggctgctctttgtaagtttctagagtactttgtgtttaagagaaattcctaaactggatatatgtggcaggctgacaatactgaagagcatagctggcttctctgcccagaggatgtacctgcataaagaggtactgtaggcaggaaaataataggacagttaaaattctcagggaaatgaaaaaattgctggaacaaaagctgagaagatagaatgcataggattatgaaaacttgtcaatatctcttttgtttgttttgtgacagggtctccatctctctcacccaggctggagtacagtggtgtgatctcagctcactgcagcttctgccacctgggttcaattgattcttccacctcagcctcctgagtagctggggttacaggcacataccaccacgcccagccaatttttctactttttgtagagggagggtcttgccatgttgtccaggctgatgatgaactccttggctcaagtgatcctcctgccttggtctcccaaagtgctgggattacaggtgtgaactaccatgcccggccatcttttaatattttcacagctactttatttcctctgttactagcttttcatagcctttgctcattcttactgcattaaattttttttactgatttatttatttttttgagacagagtcttgctctgtcacctaggctggagagcagtggcgtaatctcagctcactgcacctttcacctcctgggttcaagcgattctcctgccttagcctcccaattagctgggaccacaggcccatgccaccacacccggctaacattttgtatttttagtagagacaaggtttcaccatgttggccatgctgctcttgagctcctgacctcgtggtctgcccgcctcagcttcccaaagtgctgggattacaggtgtgagccaccacgcccagcctactgatttatttatttacttttaatttttcatagcctttgctcattcttaatgtgttacctttttttttacttagttatttatttatttgagatggagtctccgtcgtccaggctggagtgcagtgacctgatcttggctcactgcaacctctgcctccaggttcaagcaattctcctgcctcagcctcccgagaagctggaactacaggcacccaccaccatgccctgctaatttttgtatttttagtagaggyggggtttcaccatattggccaggctggtctcgaactcctgaccttgtgatctgcctgccttggcctcccacagtgctgggattacaggtgtgagccaccacacctggcctttttttttttttttgagacggagtctcactgtctcccaggctggagtgcagtggtgcgatgtcggctcactgcaagctctgccccctgggtttgcgccgttctcctgcctcagcctcccgattagctggtactacaggcgcctgccatcacgcccagctaatttttttttttttgtatttttagtagagacggggtttcaccatgttcgccaggatggtctcgatctcctgacctcatgatccacttacctcggcctcccaaagtgctgggattacaggcttgagccaccgcgcccggcctcttttttttttttttttttttactgatatataaaggcttttgtctgtaagggtcatacatggtcatgttctaaaatatttttcctagggttcccccttccttgccattttattttgttgatggggatttgctgtaccgaaacttcattcttatccatctctctgtctccagtaagtcaaaatatatttacatatgtgggctccaatatctttggtaggaaaaggagagttcttaaagtactcataagtccttttcagtacttagaggaacactaaacttgatagcagttggtcatttctgatcaactcttgctttctagctacttgagaaataacttctagatctgattttccttttytgaaataaggaagttacttttagttagaaggttytgcacatttcgttttttttttttttttttttttttgttttttttttttgagagttttgctcttgttgcccaggctggagtgcaatggcacgatctcggctcaccacaaccaccgcctcctggggtcaagcaattctcctgcctcaggctcctgagtagctgggattacaggcatgcaccaccacgcctggctaattttgtatttttagtagagatggggtttctccatgttggtcaggctggtctcaaactcctgaccttaggtggtccaccggcctcccaaagtactgggattacaggggtgagccactgcgcccggcttgttggagcattttatacctagtgtcagtggtgattactactttggagaaaaatactttggctaatggattggaattaatttattactgggagtatgtattgtttgtttgttgactggatctcgtagcccactcctggcacgtaaatgctcaataaacttctcaaatgaagacaaccatgtttgtccattataaatcaaattccaaatgttaactactggtctggtctgatgagatttttttttttttttttttttttgagacggagttttgtttttgttgcccaggctggagtgcaatggcgcgatctcggctcactgcaacctccacctcctgggttcaagtgattctcctacctcagcctcctgagtagctgtgattataggtgtgcaccaccatgcctggctaatttttgtatttttagtagagacggggtttcaccatgttggccaggctggtttcgaactcctgaccttagatgatccacgtgcctcgacctcctaaagtgctgggattacaggcgtgagccactgtgcctggcccacgccaggcacagtgatatttaaaaatgtgatttttaaatatcacatttaaaaatatgtgatatttttaaagaatatgatagcccaggcgcagtggcttacgcctgtaatctcagcactttgggacgatcacttgagcccaggagtttgaaacaggctgcagtcagctatgatcacgccactgcactccagcctaggtgacagagaccctgactcttaaaaaaagttgtgctagaagacttcaagatctcccctaaaactgtatagtcctttccctggtgtttttgctgagctatagagtccagccctttctgttacagcaatgaaccatgagattcaaatactgctttttactaagtacttacagactaatgacataggagacctcataggcacctggctgtttttaaccakgcaggcctaaatacactgcccaagtggcccttctgtgtggcaacaaaatggctgtcataaaattgtgtctgtgtgcatttatcttatcactgggggtggtgaacatttgagaaggcacttgacctttgaaatgtgaagttttatggatttcagacttgtattttaaaaactatttgttaactgtaaggtcttgtcttttttgctctcctgaaagttcttagcgtctcagctctataatctatgattgcaagaatattaagataagcatatctgaagtagtacttagttcagctattaattgagcattacctatgagatgaacactaaaaaggattcaaagatgagtaagacacaaaaggactccatcaataacttacctaacctaggagtaaggaggaggagggagaacaaaagaccaattcatcatgtcttgtaaatactgtataattactacatagaaatacaaataagatggagtaactaaccactacaaagtgtcatttggattaaaagatctatgtttaatggtagaactaggaaagaatttatgggggagttggcctttggcaagagttataaggctgccggacttttgacttacttcatgggatggatgtgacaaaccaaatattggtcataaaccattttagcaatttaggacagttgctacccaaacactcactcatcatttggattattttagcccttccatgatgatccatagattgcagagcttttaataatggaagctttaaggactcagggaagaccaggtggccatctaggctctccatgagtccctgcttaacactggatttatattctttttttaaaaatttaaaaatattttgtacagctagggtctcactctgttgccctgcctggccttcagtgatcctcccaccttgacctcccaaagcactagaattacaggcatgagacatcatacctggcctgtatcctcctaactaccaattttgtttctctaattcaggtgcatagcactatttattaaattggctttcacaggtaatatgacttggaccataagtgttcattcaaattgcatatataaacaatttcagttctggctaattcggcatgaaaatatggcaaattattttcttgatattcaattagtttttatcctgtttatattaccagtttcataaaccaggcagtctcttcattagagttctgagacttcttatccagtccaaataatatgatcctaaagttactggaagcctgtattcaagagtgcttgtcagggtccattccatccttctcatgaatctccttgttgtttttttttttgttgtttattttgttttttttattatgctttaagttttagggtacatgtgcacaatgtgcaggttagttacatatgtatacatgtgccctgctggtgcgctgcacccactaactcatcatctagcattaggtatatttcccaatgctatccctcccccctccccccattcatgaatctctttgaagacacacttcaggattttgcttgcttgcaaagagcttttagaaaatgtgttggatctaagcacttaactgtggaaatgacttgagatggtcatggttaaagacacagttgacaaatttggttatttccgtgcctataataatttaatataattaccataattacatgataacataccaagacataccagaattttaggaatctaaaataattttggaatatgtataacaacacatccataaaaatgtaactcaaggagaccacctggccaacatggcgaaaccctgtctcttctaaacatacaaaaattagccgggcgtggtggcatgcgcctgtagtcctagctacttgggaggctgaggcgggagaattgcttgaatccaggaggcagagattacagtgagccaagatcatgccactgcactccagcctgggtgacagagtgagactccgtctcagaaaaaaaagaaaaatgtaactcaaggtcaaacatcattccttatttgtcagtgcttcttatgttgtttgtttatttattttttgagatggagtttcgcttttgttgcccaggctggagtgcaatggcacgatctcggctcactgcaacctccagctcccaggttcaagcagttctcctccctcagcctcccgagtagctgggattacaggcatgcgccaccacactcggctaattttgtgtttttggtagagactgagtttcctcctgtttgtcaggctggtctcaaactcccgacctcaggtgatctgcccgcctcggcctcccaaagt

SEQ ID NO: 95168 - DNA, 64029 bp, Homo sapiens
gattatctctggtctggagtgaatataaattggtgagagaatgatgaggaggagttgatgaaaggaagagcattggcctagaagccaagattctgctttcaactatttgggcttttcagcaaataacatatgcattctctgcatatgttaaaaatcaagtataaaaacatttaatgccttggaaaaatatttataaaatattatttctaaaaataagttatcagcttacatgagtgtactactttgtaagaagacttaaaaagtataggctgggtggaatggtgcacacttgtagtcccagctacttgggaggctgaggtgggaggatcacttcagcccgggtgttcaaggccagcctggtaacatggtgagatccctgtctctaaacaaataaaattaaattttaaaaaagaatgtgaccaaaatgtgtttttttctcatggttttatgcattgtaccagttttctaccacgattatttttgtaaatgcagcttgggggaagactgtggtcattaatctatattgaatacaattttataataagagtttcagaagttttttgagcaatggaataagaacatgatctgccaaggaactaatttgaaaccataaacatccatttaaaagcagtaggcctgacaaattagtcactgctttttaaaaaatagaatttattttttagcgcagttttagattcacagccaaattgaacaaagtatagagaattcccacgtacctctctgcatgctcaccttcccccactgtcaacatcccaaaatacagtggtatgttgttaaatcgatgaacctacactggcatgattatcaaccaaagtccattttacatgagggttcatgcttgctgttgtacattctgtggttttggacaaatgtataatgatgcctatcggttactataatctatcatatagaatggtttcgctgccctagaaatcttgtactctacctattcatcccttcctccccgcaacccctggcaatcacttatccttttactgtctctatagttttgccttttccagaatgttatctatttggaatcatacagtatataggcttttcaattggcttcttccacttagtgatatgcatctaaatttccttcatgttctttcatggcttgatagctcatttcttttagctctgaataatattccattgtctgagtataccacaatttatttatccattcacctactgaacgacatcttggttgtttctaagttttggcaattatgaataaagctgctataaacatccctgtgccagtttctctgtgaacataagttttcaattcatttgggtaaataccaagggttgcaattgttgggtcagagtaattgctgagtaagagtatggttagtctttactttaaaaaaacctgccaaagtgcctttcaaagtgtttgtactgttttgcatcccaccagcaatcagtgagtttctgttgctctacatcctcgccagcatttgctattttggattttcaccatcccagtaagtgtgcagtggtacttcactgttgttttaactttccattccttgatgatgtgatgttgtcttttcatatgcttggttaccatctgtatatcttcttttgtgaagtgtcagttcatgtgttttgcccatttttaagtggattttttttttagtgttgaatttaggagggtttgtctgtgtttgtatattttggataccagtcctttatcagatacgtcctttgcaactatttctctcattctgaatcactactttttatgtcatctattttataggttcgaggattatatttttaaatctctttttcttttgaacttctgagagccctgacttttatttattttagactaaattcaaagcaacaactagcttttgaatggcagagagcaaaatcgatcaaacaagtagtacttactatgctcccttcacaaacattttgaaacacaggttgccttatttgttgtgttttctagcactctgaataaaggcttatcatcttaagcaataaaactttctatttgaattcttttggatggatatgtttataaaataggttactgttttacctgcctacttacattgcaaatattgagcataactgaacctcttcattatgactttaaatcataagataatactctaaaaaacaagaataagatgctatgaaaaaagaaagaatcagagaataagaagaagctcctggaaattaaaaatgttattatctaaataaattctgctaaaaaataaggccaaggaaattgctcagaatatagaacaaaagagacaaaggaatggaacactgtgggaaaaaaagtctttaaaaatcagttcaggatatcccctatccaattaataggtattcataaaaataaaccagagaaaaaatagtgaaataatttaccaaagaaataataaagaagttttccaaaaatgagaacatgagaatttctagcttgacaatggctaggcagtgaatggaaaatgacctacaccaaagaaattgtgtaattttagaaccctagggttaaaaatgagatcgtaggctgggcgcggtggctcacgcctgtaatcccagcagtttgggaggccaaggcgggcggatcacgaggccaggagatcgagaccatcctggctaatacggtgaaaccccgtctctactaaaaatacaaaaaattagccgagcgtggtggcgggcgtctgtagtcccagctactcgggaggctgaggcaggtgaatggcgtgaacgcgggaggcggagcttgcagtgagcagagattgcgccactacactccagccccggsgacagagsgagactccgtttcaaaaaaaaaaaaaaaaaaagagatcctaaaagcttcctgggaagaaaaattacattacatgcaaaggatcaggaataggaatggtaatgttataccttttcaagctatcaagcttaaagtagaataaagacactttcaggcatacgaattctcaacatttatctcccatacacctttactcaagagaatgtgtgctattttttgttgatgttgttgctttggtaatttacgaagaaaagaggtttaattgactcatgattccacaggctgtactggaagcatggcggaaagtgtgctattaaaacaagagagggaccagaagagaaagattcagtttctaggggatccaatgcaagaaaatgtcaaagggaaatcccagaaaaagcatctattgcaggtcttagagtcagtctctagagtagaacgggaggatagaggctccaagagggaagcaagaggtgagtgagtagaaaggacacaaaatcttatgtatttgatggcatgggaagtgatatgagatgtgttagtgttttgattattaacaatacgtatgttgaaaagtaacctaataaaaatggggtggttattcatttcaaaaaaaaaaaatgtacagaaatggaaaagtaaccatggtatttttggctccacagtgaacaacttttatatggtcctaataatgtaatcagcaaatattgatccaactgtagggaaggatagtttgaaaagggtataagacagcttagttctcatctgtcttaaaggaagtgaatagttaatgcctaacacacatatcatgaaacaatgatatattatttagaaacatggaagtacatatcagaagaaacagctaaaataattaaggttgtttcctctagggcaagggtgtccaaacttttgtgttccctgggccacagtggaagaagaattcccttgggccacacataaaatacactaacactaatgatagctgatgagaaaaaaaaagcaaaaaaaaatctcatgttttaagaaaatttacaaatttgtgttgggccacattcaaagctatcctgggccacagacaaaaaagtagagaggtggttgccaggggctgggggcaggggagatgtggagttactctttaatggaaacgaagtttcaattcgggaagatgaaaattttctggagatggatggtggtgatggttgtacaacaatgtgaatgtatttaatgacactgaactgtacacttaaaaatggttaaaatgatggccaggtgcggtggctcacgcctgtaatcccagcactttgggaggccgaagcaggcggatcatctgaagtcaggagttcgagaccagcctggcgaacatggcaaaaccctgtttctactaataaagtacagaaattagccgggtgtggtagcgggcatctgtaatcccagctactcaggaggctgaggcaggagaattgcttgaacccgggaggcagagtttgcagtgatcggagatcatgccactgcattccaacctgggcaacaagagcaagattccttctcaaaaaaaaaaaaaacaaaaacaaaaacagtttaaaatgggtccggtgtggtggctcacgcctgtaatcccagcactttgaaaggacaaagtaagaagattgcttgaggccaggaatttgagaacaacttagccaacattgtgagactctcatctctacaaaaaatatagaaatcagccagattagttttatctaggtggtagtgtgcacctgtagtcccagctactgaggagactgaagcagaaggatcacctgagcctagggagggcagggctgccatgagccctgaccataccactgtactccagcctgggccacagggtgagaccctgtctcaaaaaaaaattaaaaaagaaaaaaaatggttaaaatggtaaattttatattacatatattttaccacaataaaaaagcaacttagaaaaaaatttagtattatttgattttcaaatatttatatgcatattttaatttcattataacattaatttttagaaaactctgcatgaatgcctgaaaaatgttttttggtttttggtttgtttgtttttcttttcttttcttttcttttttttttttgagacagagtcttactctgtcacccagcttggagtgcagtggcaagatcttggctcactgcaacctctgccttccaggttcaagtggttctcatgcctcagcctctcgagtagctgggattacaggtgcctgccaccactggctaatttttgtagtttttgtagagatggggttttcccatgttggccaggctggtctcaaactcctgacctcaagtgatccatccgccttggtctcccagattgctgggattacaggtatgagccaccgcacccagccattgaaaagtgtttctatgtatcatgaatataagtgtttgtgcatagattttgtgatgtaatttaggccacacaaagaccttttatggcttttgtctagttcttacctgtattctacttagataaagatagataagttattttcaaataagggaagtattactgaacatgactattttgtgaatacattttggggcaatttgagataccagtttcctaaatgtagcacattaacactgtgaataagtgcacggattcatccagtttgagcaaagaccttatcatacaggagttgtccttttatggcctctgctattctcagtggctattctaaatccttgcctgtgcagtcacccctgaatggtttgtgggaactcatctctgcatttggcaaggactgggcggggctctgagtgaactacagatatggtagcaggtaagtgcctgtgttgtcacagatgatttctggctcacagctgattatctttttctaatcagtttccttaacctggtcccaatagtagtagatgtacatttgtttcttcacgattataagcaataaaaggccgattggctcggcaggaagaagtccaagtggtaaagagcaatcctaattaaaatcattgtcccttaagtttacaattgagaaggcagctgtgagaagaaaataacaatggaaaacaactttatatgtccttagagacttcaaattgctttccagcctttaagtcatgctgcttggctttgacaggttacatttaccttccagggtttattgccgtaggagcagtgttattttttgttgtcatcctacctaaattttcctctgttccagtgcgagatgaggacagaagcacgacgaaaaaatcttctcattttgatttcgcattatttaacacaagaagggtatgttacagtacaaacatttatagagatgattcctctttctctgctctctacttttccagatgcgtacttttaaatacaatagactttcttgtttagagcaattctatatttacagaaaaatcgagcagaaagtacagagttctgtatgccccttcccttttccagtttcctctcccagtgacatctgtattgatgtggtttattactaccgttgatgagccaatacattattaactgaagtccatagtttacattagggtatactctttgtgttatattgtgctgtgagttttgacaaatgcgtaatggccatgtatttgccaatatggtaccatacaaaatcatttcgctgccctaaaaatcccctgtgcaccaccgattcctcctcctgccccaacaacccagacatacactttttttttcttttgagacagtgtctcattctcttgtcaaggctggagtgtaatcatggctcactgcgacctctaaccacatccccctgctcccagcctccccagtagctgagactgctggtgtgtaccatcatgcctggctaatttttgtattttttgtasagacagggtctcaccatgttttccatgctggtctcaaattcctgagctcaaatgatcagcccacctcagcctcccaaagttctggcattacaggtgtgagccactgcacctggcttcagacttatgcttttattgcctcatttacctagatatttttcacattagatgttgaaaacttttcaacagacctatccagtacataaagtacttttcctttcctctacacatttgaagatagcacagaaatgaggtttttctatagtctcactgctggctatgtgcacaagataactttcttaatcagtttttctttcctcaaaataaacgtattgcatttacttggacaacctaaacccaactctcttcttcctcgcaatrcccattctataactggcagggtgaggaaatttaaaaacttttgggtttggccacctacctcattaaaaacacacaagcaattacagtaagggctgctgctactgtgctggatgatataagagtaagagagctgctccacaaagtgtttgaagggcactatctactttatattcgcttttcttttcaaatttcagccaggaagaaaacatgtaggtttcagactaagagcttacaaacttttttttttttgtaacagatgggggtctcactctgttgccagggctgcatgatcatagttcactgcaacctctaactcctgggctcaagggatcctctcacctcagcctcctgagtagctgggactacaggcacatgccaccatgtccagctaatatttaaattgtttttagagacaggatcttgctgttgctcaggctggtcttgaactactagcttcaagtgatcctcctgcctcaacctcccagtcactgagattagggctttaaaacttttgagttagagcagtggttctcaattaggatgattttgttccttgggagatatttggcactgcttagaggtctttttggctgtcacactggcatctagtgggtataggccaaggatactgccaaatgccatctgacgcacaggacagcccccataacaaataattatctgactttgaatgtcaacagtgccaagatggagaaatctggagttagagcaagaaaaaccaatcaatttttgatattttcccaaaaagtctgataagcatcttttcctccattaaataagggagctactggaactaaaagtcggttttgagactccagtgaccctcgtcctggagaggtacaaaggaaaaaggtgaggagggcaggaggcagttgacaacgaactgagagttcccattgtttctcttacccatgccagcaaccactgctttcaataaacctattgccccctagaaggaaatgagtgcccccgtcccatggttagcagacaggcaggccatcagtcacttctcagcttaggctcaaactctgtatctccacatagcagtggggtggaattgagccccggagcagggcagggctgactttggtctttctgtgcctctgtttctccatctgggctataagagcattcctgaaattgacaagccagacagtctgcatgtgggtagtgggctgctctgctctattcaccaggcacttaagtaaagtaaccccaagggtagcatatgagaaagtgctaagtgttcaatctatgacagggctgtggggcttgttgtcatagggacggcttccaggatatgcgtataaacttagaagccagactctttttttttttttttttttttttttgagacggagtctcactctctcgcccagcctggagtgcaatggcgcgatctcggctcactgcaagctccgcctcctgggttcaggccattctcctgcctcagcctcccgagtagctgggactacaggcacccgccaccaagcccggctaattgttttgtatttttagtagagacggggtttcaccgtggtctcgatctcctgccctcgtgatccacccgcctcggcctcccaaagtgctgggattacaggcgtgagccaccgcgcccagcccagactattttctttcaaatgtctgctcttccctttgctaatctgtgatcttggacaagttacttattctctttatgcttcagttcccttgtctgtagaatggagtaatggggtatagctaagtatcaggtagatgccattattacgaggattaaatatgtaacatgcttagaatcatgcctgacaattacacttatacttctattattgataggatttgggttttattctcttaatacccaacttggttcagcaaaggacttaaagaaactggaatgtgggcttggcccattttacatcatcttttgatggaatctcagctctatccaaagaaccctgagttaaaatacctcaaggtgcttttctgagtgtgtgcagcacttggagcagtagttatacagaatattaataggtgttaaagagttttgtggtcaggtaagcttggcagatattgggttaaattaaactaggtccctcatttcaggacttctcagaccatctgatttactatgtgcaatgagaatatcatactaaagtcacagtattcaaggttttgcaaatcaatttggccaaagcttttccagggttttgttattgtggttgttgttttggagacagggtctcacctatcatccaggctggagtgcagttgcccaatcatggctcactgcagcctcaaattcctgggttcaagtgatcctctcacttcaacctcctgtgtagctgaaactacaggtgtatgccacsacactgtttgtttatttatttatttccttattcatttatttttggtaaagatggaatctcgctatgtagacatagctggccttgaacttgtggtctcatgcaatcctcccacctcagcctcccaattagctcaactgcaggtgcgtgccgccatggctactttttgtttcgttgttttgttttgttttttggtagagatgagatttatctgttgcccaggctggtctgggactcctgggctcaagmgatccacccaccttggcttccagagtgctgagattactggcatgaaccmccatgcctggcctaaggaactcttttttttttctcagaccatctttagagacgagttttccacagataactttgagaatgctgtcttcctagataagttgactcttataaaacttaaactcaccatgccaggtcccagcactgtgaacatagtaacagaatctcagtaaatgttatttgcatagccattgaggaacttactagaatgtagatgggtagaataattagaaacgaagacaatgccattttcacaaattatccctgattttttattacaatgtattttttgttccagaaattgtatcagaaagaagaactgtaaaaacaaaaagataaaaataaaagtcagatgtagttgttaaggccaagtagtttgctgcttacaaagcatgcatttttcctttctgccacgagatggctctttgtatcgtgaatcaatgaaagttctactagaactgatcattttccgaracctgctgggaaagggacaaatgagtggactgtcaaaacgaaaatgaactataggtayttttaaggacatatgagtgtcaataaaagagatctgccttaacgaagttctacaaattcagcagaggatagattactgtggattaaaataaacaatcagggaaagctttgtagagagggtgacgtgagctggacttaaaagatgtatagaatatgaatagaccgatgtgatgtaaggccattcctggcagaggcacagaggaagaaggggcacagcctaagtggaacaattaagtaaacaagaagaccagagtttgaatgtgtgagtgagaattggtgacagcagacaatggagggtcatggatgctggttcttctattaatagtcctccatatccatcttctcgggcttgggtaattttagtagcctctgcgtctctctcttgtgtcttgttattayggcccagtattgcacactactcctaaagtcccgtcctgtcgctctgttggttaagaatctctagcggctcctcctgccaaccacatcgaattcaaacctcattcaagctcagctcacttgagaccagacgttcgggaccagcctgggcagcacagcaagaccgcatctctacaaaaaataaaataaaataaatagctgggcgtggtggtgcacgcctgtagtccaagctacttgaaaggctgaggtgggaggattgtttgagcccaggagttccaggctgcagtgagccaagattgtgccactccagcttaggtgacagaacaaggccctgtctctaaaaagaaaaaaaaaaaggttaaaaaaaagtttgtaaaaacagaggaaatgttagtcattttctctgaggggcagaattttcttttgatttaccagtattttctagttttttcttaagtgaatatgtattactccatactaaagttattaataaaaaactgatttagtttttctctctgtaaaatgaggattaagacatagtatagaagcatggtgagacatgaaaaagtatagaaggtgattggctagagtcaactgactgtggtttgcagcttctttaaaattagcttaggagagatacatacatttcaaggtcattgaaaataatcatggcatcttcttttaagaaagttcaggctaggcatagtggctcacacctgtaatcccaacactttggaggccaagaagggaatcaattgcttgaggccaggagtttgaaagcagcctgggcawcataaggagaccttgtctgaaagaaagaaagaaagagagagaagaggagggctactaaaaaagaaagttttctctttctactttcctggatctagattcaaatgaaacagaaagaactctaacctgcagcagaaatctgaatctggggtccttggatgagctcctgaaattgtatgctaatttgcacatgtgcacacttttcaggagaaaattgttggttttaaaagaagttaagaactaaaatttaagacctggagagtctttcttctttcagaggattttgagacacagcccttgcttcyagtgctaaggccrcttatattggacagttttacaactgaacaagttaaaaatgacagtaaggaacaaagatcaaggtactacttttatacagaaacactctgaagtgcaatgtgtgactgattaaaaaattaccagaaacaaataatacattccaagtggatgttatcttatatgaaagttctttgatgatcttgattggtagatctttggaatttccttcagtgctcgagacttgttaatktgaattacttcaatgatggcaaatttgggttgaatttgggttttatcattttgccaaatgttacctaaaatgaatacctgtgaataaagaggtaaccaagtttgggcagatacccattttaggctgcaaatgagtaaagacaaatcacaagatgtttcttggttgatttacttatttgacttttaagcacttccaaaaacatccttaacaacggtgacatcaccagaataagtatgtaactttcaaaggcaactgctttgaaagataatagttaaatatacttaacaaatatggggctctttataggcaaacctcctatgcacatactagttttcatctaatgtgctatatataggcttactttttgtattgcatccctttagacttgtaatgcctgttagccattattcttttcacctcagttaatttcttctttttattctgtgaaactgccaggtatatcgatacagcaaatgctttggagcaagaaactaaactggggttacgacggtttgaagtttgtgacaacattgatcttgaaactattttgatggaatatgagagttattattttgtaaaatttcagaaataccccaaaattgtcaaaaagtcatcagacacaggtacatgcctattttctagagataaggctttgtctcatctgtaagattagtgtttctttctcatcttattcccagatagatggagaccctcaccctgcaccaaaggagtaggccaggaggattgtgtagccattctcatatccagcacagacaactgaaatatgattacctggacactgatatccctttaggcactttggcatttgtttgagaaaatgtgttttcaggcaatgaaagcaaaaccccagtgtatcataggtacttttcagatgattagcattactttaatttccttagagatgaaaagaactgttggaagaggataaatgacagaagactttttttgtttttaggagacctattatctgtcttgaaaataactacaaaaatgagtattggggaagctaatagctcatgtatagataatgaaaagcttttgaaagccatcaatccagataatgatcaatataatataaaaacccagtataggttagcagtcaacaaggctggctggaggaaagatctaaagtgggggccctgtgctttgtagtaacattgactgagaagtctgtaagtgggggaagtaattataaaccaagggagatcattgtcctgtttacaagccacttgttaagccacagactttaacatttcatgtagggacygggaaaccaagaggaacatcaatttaaaatagccagggccagatctcagagctagaaaaggtcaaagaggtattttatctgagctcccttccaatgcagcattcagagcttgacttccttggcaggtggttagatgtgggccttgaagagacagcccagactcctaaacacagggtgatcagcactgttagtgacatgatctcacttccagatggctagttcccatctagcatgatacccaaattytcctatgatattggacacrttatttttattttaactagcagagtatgacttcagtgttccctgccagattcgtgcaatcatcctggtgtcccatgtaatgcagcaaaatggtgtcaagttcatgaaagcgtaatgaaatggtagctgtaaagctagcctatattggagttgccaccaggtccacagtctctgacatgtttaatatctgagccctttgcaatcttcctctgtgaggagatgctggagaagctcaggcctctttctcttcgctggtaatttcagttctctctagatgagaatagcttaaagtctctagattccaattggttaaaactcaaattttaagaacaatgcaaaaaggggaaacatacctgaaaaaaatcactttgtcactcttaaaattattttctttccctcccaatgtctgttttgtcacagcagaaaataatttaccgcaaagaagtagagggaagaccagaaggtaaagtgaatggtaattcttcttaatcgactcggctcgaggagcttgtggaatccctttccagaagctttaccatcacagctctgtgactgtctcccagcaatactgaytgcagtcatgtgacctggcccagcccaggacttctctcattacagctgccccagatttgggccaatgtccgtctactctcctggttttactgtaaataagtatatcctgtgatgctctgtctttccaggccatgtggtatgaaaagtcttaacctcaaaggttaaaagacccaggttcaactcctggctctgctatttacaagcatggagcaagttttggacacatagtgagttcctggcacacagtgagcacccaagatataatattttccctcttttcatcatttagttaatttcaagcactcccagatcagatgtcctgacctgtctgaagatcaacaatgagccaggaggtgtgagctcasgcttctggcttcgccagtcctgacctgtggggacccattcttctcttgcttttccctcctgttcacagctcatcttgcattcctttctccagcttctcaagtccaaatctcatttggggcttgtagcctctgatgggagcccctctgtctctggacctttttgggtgcacatattctctcacaaggccccctactcttgccagtgtccttcgcattcctctcgccccactcccatagacccctccactgtcagagctgttcagaaatacccaggggaacaagggtgctgctgccggctgccagtgagggccagctctggggcatcgcaacctgtgggctgttgctattacagtagggcctaaacctcatggaaagacacagccatccaagcagtcaacaaagtgtttaaagtcttaaaatgctcttggaaaaagaaaagttagattgtaatcacatgcaacttattaggccctcaagaggtatggattctgttatgcctccgctacatttcccacccctgcgactccagttcccttgttccagcctcagaaggaagggcctaggacactttacagggctggtgggcacagcttgcaaaaatggctgtggagcccacgcacgctccacgatcctacttgttataatacttggcctcgggctacctttgctttgtgctattctgcaggaagagttttatcgctttgacaaaagtgttattcttttatttatagtttccacaaagytagtcagactctgggtaataaatgataactgcttgtgcatagaaatcatgaggagcgtttgcagccagcttcggaaggcttttggattctatttttctggaaccttctcagcattcttccytggcaaatgctctgtgagtgaatggtgtcagagtgctttgttccccttaggsaaggagcaccgtggcacatttgacagtgtgggggctcctcagctcctctctgagtagatgtttgtatgtggcaagtgtaaaagttgaatagcaaatggttagaatcaggaggaataactaggaaagtaatgaatggtgtttctgcggacaatttatactcaaatatagttactaaaatgagacatgtcatgagactggctattagcaaatcaaagtgtcttttcctaatcttggaaaagatttataatccccacttaaagatttgctgatgaaccaagggaggaaaggttatctaatgtgatggatgacagaaatgggatcccaaaagatcttggcaattccagagatgggttcaaagtaacaagacgaaatttaataaaataaggtttaagctctaacaagagttacaacaaatagctcctccattacaaaatcagagacctggaaatctcagtttacctgggccaacagtgtgacatgagtgctactgtggtcccagccccatcaatagaaatacagtgtccaaaaaataggaggtcacactattctggaaggtgaccagtatgaggaacaatctgggaaccaggtaactttagaaatgactagagcaactgcagatgttgagcttgaacagatggctggtggaggggcactccttagaacattgcaggaacaggcttcagttcaccctctaaagggcgattgggccttttctgccaaattccacagggtgcacctaggactaatggttaaagtcaaagcagagtgaatttggttccatgttcagaagaattttaccatcctcagaaccaatttaaaataaattgcattgctttgtacattagtgctcttgtattttggtcttgttaaagcagatcttggggatcagttgcatccaatgggaaatcaaagtgggaatatagaatccctgtttcctgccagctccacaaggatggtgaggcaagtttaaatacagacacacacacacacaaacacataaacacacacacacttccacacacacatatataacttctcttgagtcaacactattaatataagtttgcatttgtaaaatgcttggttttcatttcatagatattttatttttgtgccagcaaaagggtagagaaagacattcttattcctagtttaaagatagaaaaaaaaaaccccaagaactgttagtgtccacttctcatgacgctctccccagtgagaccaacactcacagatgtgtcaccatgtggacattggtggtgttatcgacatgtgtggtcttgctggccaaatagytgtgcatttatattagacatgaacatttattatccccataaagaaaggaagttgaaatagcagctctctgagatcactctgaacatggggagacttgcttctaacgaaccttctgcaaatgcatctcacatatggggacaaaagtgctaagagaactaagcaacaatgtgggagttcatgttctgcccccacaagctagtcctgtctctctctggatggcatcttctacagaaaaatatggatattccaatactgaattttatatctaattatgaggatgtagtgaaaaaagtgatttgatctttctatggatatataacatatatacagtcataccacatatataactatgtatacagtaaatgtatatactcttgtaaccacagttacagccaccggcaagctacctttgccccttctcagtcaaattctccccatctccatcagagttagctactcttctgacttccagccccatcagtttgttttgtctgaagtaaacaattgttgatgaaaatttgtttggcaaatatgattggtctgggacaacattgatgaagggaagtttgttttccttctgcaatccccttttgatgtttattactcataacatgctgagaggtattttaagtaggcagggtatatccaggacactggattaaaaccatggggccaatccctggatttcctwctgtttcttagtttgaatgggaggactcctttctctctcacacctttctcctggtctaatgctccttttaaggaaggtggaaggaacaatggaagaatgcttgtaaagtaatgtattcttaagaactaaagctatttgcagaagggccgaagctatgtggtgtgaaagggaaatgaagagggtgagttggggggctcgaggaggcaatcttagaagaacccagtgagtagcctggagggtgttagggccaggatggacctggtgggtggatcacataggtggaagggccctatagttgccacctgcatatctttcaatagctttcttaaatgtgctattcttaagaatagttgtttaactacctcaaattaagtggctagaataatttcttccaaggtctttgttccctcccttaggatgatgaacgacagttgtcaaaatcttcccaagatcaatcagcagaggccccggtccaaaaccacagcggggaagacaggggacaccaaatcgctcaataaggagcatcctaatcaggtcaggatggyttggcttgactttgtgaacagcacacttggctgaaaaatagccctatgaaaaaggtcacatttatttattttttgaggacctacgcttttaaaattgctrtgtgatctaattgaattttaggttttcttccagtacactggactaaaaccatggacatatccctagatttcctaatgtttcttaacttgagtgggaggacttttttctcctccaagtttttcccctggtctgggtgctgggtgattggccagggtggggccagggcccagtcagagcgggaaggcctggttgccttgatcctcccatctgaggtaactattacctgaggtaactgagctaaccaagatggcaggtcttcccatcccagagcacattgctaggttcctaagtgtaggccaggcatagcctacactacatttcaggtatggctgggtctcaaggtctcctgttgggctcctccaaatcgcacatggtcagccctcaccccagaccttcatgctggacttcctgggggccaagaagggcagcaaggagagaatccagcaggtgagwgaagtcaatggctcctgactcaggaggctcatgtccagaaccttcttagttaggacwaaacatcccaggtttcaaaggaaagaggaccaatggaaactgagaaaaggaattaaaaaaattaatgtcaaataayggaaaggtataatcacaatatccgattggtcaaaaggattctctccccctcaaggaggtcctayggttctggccgctgcagcctgactcatgtggaagagaggtgaaggtggggcaggatgagtcccatgggaggctagttgactctgccatatctccaaactcagccactcctggccaaaaacacccctgatcacaggagaaaagacgagccagcgaatggggatgggttgaggcacaactgtttgaagcacattggaaaagctgcttggggcccatggggcctggcatcttctcagtcttccagggacaactctttccacatagtgcaggcagacagctacttcatcttcctgggtctgcacaaatgtggctaagctacatgtgcatgtcgcgttcacagaattgctatccagcatcggactttgcttgatggagtaggcaggtacatccagcaactctccatggctgctcacagccgrtgtgtccttgtctctctttcttcaggaggtagttgataacactcgcctggaaartgccaacttcggcctacatatatcaagaatccgtaaagacagtggagaggaaaatgcccacccacgaagagtaagtgaaactcatgaacctaacactgaaagtggtaatttctttttccttttaaacatgaaaacaaaaaacattatttttgtcaaacaggaaagttaagatgtgatttttgaaggttggctgtgaggtaaatggagaagagcgycagaaaatgggttcttctttggaatctcctttctgaatgaatgggctggcatgaactgccccatctctaaggaactcagtttccacatttgtaaattgaggggcttggaagagattgtctctagtgttcccatcagcttaaaaattctgtaataacaatgacaaacattggcatgatcatcctgcatcgttctcatcatttttttttttttttttaagagacagggtcttgctctgtcacccaggctggagtataatggtgcaatcatggctcactgcagcctcaaactcctgggctcaaagaatcctcttgcctcagcttcccaagtagctaggactacaggcatgcaccacaacatccagctaatttttttcatttttctagagatggggtctcactatgttgcccaggctggtttcaaacttctagcctcaagcaatcctcctgtctgggcttcccaaagcgctaggacatctgcgttatttagtgagttggaaacgcatactcattctgctctgtcctgtcagtggcatttgattagtggtgtcacctttctccttggagggatggctcctggtctaaatgtaatttcatgtggaccatgaaacatcagttgatacagggttgattttgtccttgatagatatttttacctttttcataatgaatctcatgtctagatttctaaataataatgtcttaagcagaaaagacccagattgggtggatgtagtcaaaaggtagattaaaacatgtaatttggaaatgaattgcaccatattgctcttggtcatactctccaaggttgtagttctttaagcttcttctttcttcagccaagtgctcaaacctctggagtgctgacttagttctggccagctcttagaaaaactgaactctgtgtgtgtgaatttggaggggtgactggagcatmtccctgaaaatcaagagcagtgacctcactggcctgaactgactccctttaagggcctcacttacatggtaattgctgaagatgatgccatgggaatcaacacctcccttggaaaaatgtctccttgttcaccttcactgcttctattgtgttttcagtcacctttgcctagcttttttgtggcataagtttctcttgtgaatgcctcacattgaaatgaatggatgtttttgattgggtcacaaggaagggaccatttaacccagcacttaacctttgaaatagtctgactataaatcctcttaccagcagaaatgtcctcaaaggcacaatgtagatggctttctccctagcatttcatatgtccataggttgtatgagggtatatggcctggggccaatctcagaaaaccccaggtctgtcatttctatgttagtacctgtgtttgtctgttttgcattgctataaaggaatacctgaggctgagtagtttataaagaaaagagatttatttgactcatagttctatatggcactgggatctgctcagyttctggtgaggcctcaggaagcttttactcatggcggaaggcaaggggacctggcatgtcacatggcaagagagggaacaagaagggagggagatgacctgctcttataaacaaccaggtccctcgtgaactaatagagtgagaactcactcattacagtggtgagagcaccaagcctttcatgagagttcctccccaatgacccaaacacctcccaccaggcccacctccaacactggggatcacatttcaatatgagatttggagggggcacacatccttactacatcagaatccaagctttaggacaccctccctgcaaatttagtaggtatgttgttcttgagggcataggcttcagagtcagcctgtctagattcaaaacctggctcagatgctcccccactatgtaactttgggcaagttggttaagttgttttataatttctccaagcctcatttctctcatctgtaaagtggaaataatcatagcgtcccctttaagtctcatgatgaaaggagagccttggtgcagtgctagcacatagtaaacactccataaatgttaactattattattattatttttttttggtgcatccttgctttttccttcctacctctaggggggacagggtgatattggaaggatcatgggttgggagagagattaagtgggtttaaatcctggccttaagccatttattagctgtgtggccctgggcaaattacttaacctctctggacttactcccacatctatgaagccaggatgtcactcctgactaacagaagtgttataagaattagaagtaggctgggtatgctggttcgcacctgtaatcccagccctttgggaggctaaggtgggagtataactcgagctcaggagttrggagaccagcctgggcaacataaagagaccccacttctgcaaaaaaaatttttttaattagccaaaagtagtggcgcacatatgtagtcccagctctttgggaggctgaagtgggaggatcccttgagcccagaagtttaaggctgcggtgagctatgattacgccactgcataacagagtgagatcctgcctgtctcttaaaggaaaaaaaaaaaaggattagaaataatcctcacaggatatggagaaaagggaactcatacattgttggtggaaattaaattaattacacttatacccaataaatttatacaaattatatacaaaaataacaaaaaagaaatagttctcacaaagaacctttcacacttattttgtacccagcactctattgagtggtgaacgtgtatcacaatccatagacaggaactctcattaccattgtgccaatgagttctttctgcatgtgtaatattttaagaggataagaccatacaggggaagtcaacatataagggaggaagcagatggtctgtgtcaggaactgagaaatactcatgaatttttattcaaatccacttcattctggaaaatgtacttacaattttttaaggtgctccaacttgaggaaatcatcacgtttaatactagtgctggttctttttaaagcttaacttgaagtttgccctatataccagggtctataaatgtgtcttggtttaatgaaactgagttattaagaagagtcttctcttatgttctcatggcataaataaccattcctccctttcagggccaaatcattgacttccaagggctgctcacagatgccatcaagggagcaaccagtgaacttgccttgaacaccttcgaccataatccagacccctcagtaagtggcgaagatgtgacattcatctttcaaattgccaacatccagatgaactctggaaatataattttgagtacagtgaaaccttgagatcaagttaaaggccatagccacctgccatcgtttgtttcaccaagacctgtgcatgcccggggtttcttcctaaattatgaagcaatattgtaatgtgagcctttccgctcctctcatcaggaacgactgctgaaacctctgagtgcatttattggcatgaacagtgagatgcgagaattggcagccgtggtgagccgggtaagatctgatattcaattcacaaatttatggaggcaggctggggcttctggagctttgtgggctgcttcttttattaataacaataaatatgatcatttatttataaagtgcccccacttgcgcaggcactcatattgtttagaggcacaataatgcatgataaataaattatagagtcataaaattacaatatacaaaccccaccatctcatgatagaggccaagaaaaccaagagagaaaaagacttaggaatgaagggacaggtgaaaggttttatagcagagccaagagtcaaggaaagaaagcctcttaaagaagaaaagagtatgtctgcatctggtttaaaaagtcagagcctagaaatagagacgtcgggagtctgatgatatcatcattgaaaatctccatgaaaaacacaattagcaggaaagactaccatccagactacggacttttccagcttgcactgtggaaccagaaggcagtgaagaacaggctttggaattagctgacctgcctttgatttctagatccttctcttgctagctgtgtgactttgggcaagttcctgggaaataaaatagattcctgagttatagggtatttttctaatttctattgcttcatatttaattgaagactgaaacctaggcaggctcagaggggggtttaaaatgatccccaaaattcacagctcctctgagaagctaagggctcctgagctgtctctgttcagctcagcagttgtttcctgtatgcctcttgtgtgtcaggtgtgtgctgtgggctggagacacaaatgtgaacgagtcagagcatagtccttgccctcaagagtttctcatcccagggacaaagtgcactttaagagcatgaaggagggaggggtggggaaagtgttaggaaagaagacaggaaatcgctaagggaaaaagtggaagagggaggctaggagctgttctgggcataggcacttccatgagaaattgcagtttgtgcacatgtcctgtgggccacctaagaagcagggagtggtggggaacgggtggagagaggcagggttcctgaggaagggtgctgtgagcagtacccagggctgagaacacacctatagaagaggggaccttagaaaggcgcccgtcggaggatgggatcatcccatgtgcttgtggatggcttgttctatgacagtgagatgaatgaatagcaaagaaaaggagatggggagaccatctataaggtttttaccagtgagaggggatgagggactgagccaggctgcagtaaccccaaattaatagtctcattaccatttttgcaaaagggtaacatgactatgaggatagaactatagagtggaaatggcctgagatgattccatctggaatcctttctatagtagcataggaggtagaaaccctgctcctgcttgaatgcttacagtgacggagagctcaccacctcatgaggtagtcctgttgagttctgactgttaactttggattgatacaaggagaaactgtcagttgggaaattaaacattaccttgtggaactcaactctagaagaggtcaagaaatactgctgttatcyatggatgcttttaatacctaggtaaatgaatcttccttgtgtgccgagatttcactaagaaaggacggtaataagaatgtgagtggctggtgggcctgcatgtagatccaggctctatagacagaataaggaagactgagtcctttctctacccttcaatccaagaatggattgtaaatatcatgcatgaccaaagtacttttataaatactttctctagaccagatgcagtggctcacacctacaatcctagcactttgggagactgagatgggtagatcacttgaggccaggggtttgagaccagcctggccaacatggcaaaaacctatctctactgaaaatacaaaacattagccaggagttggagaccagcctgggcaacataatgagaccccatttctagagagcattagctggtatatgtgggtttcccaagatcgactgtgggacttgagtatgcacagattttggtatgggggagagtgtcggkgggggaacagggagaggttctggaaccaatctcttccatatgcccagagaccatttctagagaccccattagctrggcatggtggcatgtgctggtagtcctagctacctgggaggctgaggcatgagaatcacttgaacctgggaggcggaggttgctgcactgtagcctgggtgacagagtgagactccatctcagaaaaaacaaacaaacaaacaaacaagaactttctctaataaaagtgaaagttggctgggtgcagtggctcacacctgtaatctcagcactttgggaggccgaggcagaaggatcacttgtgtccaggagtttgagactgggcaacatagtgagactccgtgtctacaaaaaatgaaaaaaaatagctgggcatggtgtgtgcctccttgggaggctgaggtgggaggattgcttgagcccgggaggttgaggctgcagtgagtggtgatcatgccactgccctccagcctgggctacagagcgagacccagtttgaagaaaaattaaaaataaataaaaatttaaaaaatttaaaaaaaattttaaaaaaataaaaatgaacctcctatggtggagggaactggatgggtggggagcaggagtagcacaaacatctcaccagcatttaaaaaatgtatttatatttttggtccatgtgcatatattacttattaaaaattatataaatataataattagtttcagattttttctgtagtcactcagaatgactttggaaagaaggcttttcaggcttttttgaggaaacactctagatattcagtttgcctgaaacaactcctactgagaaaggccccttagtgactgctctgaggcgtctggtgaaattgaagtttggaaactgtaaattagttatcagtaaaagctaccttaattgattatcctagatggttgctacagggctcttctataagaggagaaaaactgcactttcgctcggttgtcagcttccttgaattctgtagaagcaattgctcctgctggaagtagggaatgatcgctagcgaaaaaagagaaattggtttcagaggagcattatctcctttatgcaacaaattaagaaagtgtttgtgagatcaaggagcaagagcaaggccaggcactggctaggaactatgtttcacagtaaaacctaatgtaagttgaaggcatattctgtagcttctttaattatggttataaatcagcatggtttgctattgactgaaaacaggtagagtctgttgttaggagatttttttttctctctgaaaaataccacaatgtgttatcaatgtcttcttcagggaaaatcattgaatattttcatggcatacctttggtgaactaacccaaaattacaatgtatatatgtgtttatatatatatatatatatatatatatatatatatatatatatataatatgaacagtttttatcaccagcactttatatcctattgtaagtcaagtattctgctgctcccaagtttattacagctgtagaggaaaacatcagttttaaaaaaatgatcaaatgtgcattgcaggacatttatctccataatccaaacataaagtggaatgacattattggacttgatgcagccaagcagttagtcaaagaagctgttgtgtatcctataagggtaaggacgggaagcctcttgggggttatttctgttcactatccattggacaagctgtatgtcacacaactatcaggaagggaagggcaggatgattttctgtccacacgttaactctttgcttgtgtcacagcactttctcaaccctggagcaccaaagcctggtccattctagatcatttaaaatcatattacatattagttcaagacaggtgtctgagctaagtgaaactttaaaatctaagaccatagtatacatgatttgtcagattgattcaaattagcctgctcccttaaaaatattcttattgttgtagaaatacctctggtaggggagaatctctcactttgtttccacagatccttcctttacacccctgcccccctgacctaccctccccaggatcgtctggggctttgcttctggctggttgtgaagactagacagccccttccagggcagtgaccagcaaagccagcctgttgtgctcattacttattactgacaaatctctgtgcagtttacaaactgggtagaaaaatagaaaaacaatactctccatgtttgatttacaaatgggttaatgaggagataagtgataacttagcttttgttgtataacagaccaccccacaacttagtgccttaagacaacaatttatttgtttgtaattccgtgggtaggcagttggagctgggctcagctgggctggctcatctcttttccaygtggtattcttggctgagctcaatcacaggtctgagccatcagccagagtagctggaaaagatggagagactgaaaaggctgggacaagcagtacggccaaggtgtctctccatgtggcctccatcctctagcaggaaagtccagtcctgctcacatggtggcagtgggttcccagaaagaggcaagaaagggaaagttctaattcacaagcatctttcatgcctcttatatttttttgctagtcttatattttcaagtcttttacatttgctaatgtcccactggccaaagtcacagggccaggcccagattcaaatgttggagaaataggctccatttcttgatgaaaggagctacaaataatttgtgaccattttctgtaatctcctgctgttaggattatgaatttattttattgaataacctatttagtcttaaaccactgagcccatgtggcccctgatttttggatgctttcctctaaggagacaaaaatcaatacatttggattctcttttccccctctttctttctgtgttcacacttaagggtaagaaatacactagtgttcagaattaatagaaatttactcaccttttcctctaaatggaactataaaacttttaaaaaggatagaacatctcactgaaattccctggatttgttgtccccatggcattacaagctccatatgtgtggagatttgacatcaggattagcatgaaactaatagctagttgtaattttactaatattccttgccacaccctctcccccattctctaccaacccttgccacccacattcccsagattgtttgaatttgaactaataggagagacttcctgaaggctacgcatgtcctgttcagcgttggtgtctcttaatgcgtttgcccctgaatattcccaacttccaaaacaagtttcaccgtagctctgtactttattcgaataaacctttactaattggttctagtatgtattttaaagttcatacctgctttacaacattcaaaagattgccaaatgctctccgtatagaagtctggggaaaacgatgttatgcatgtaagaaataactgtttaacggagaggaagaaatacctacatatacctttccttccaaaaaaattggtcctttaaaaagctgcaaaaattgtcaggcattctaatcaagcgtgaaaataaaattgggatgaataagatctgtttatttcggtcagaagcagacaaccttaagcaaaaaagggagccctgaatcttagagctgtgctgctttgacttcagctttcccagcttgtctgtgctgagagtatgcaggctgatgtgttggtaccaaacctcatccttgttccttgtttccttagtatccacagctatttacaggaattctttctccctggaaaggactactgctgtacggycctccaggtaaacacagcttcctattttgatgtcagtgttaagtgtgtgtgcagaggatgagttgccccttctgtcctcacttcaggactggggcacacgagagctgagcagtcacttccttccttgtgtgtgagactgacttctgtctataagcagggggwtggagttgaaatgcctrctcatcttttatgtgtttctctttaggtacaggaaagactttactggccaaagctgtggccactgaatgtaaaacaaccttctttaacatttctgcatccaccattgtcagcaaatggagaggggattcagaaaaactcgttcgggtaggaattcttaattttgtttttaaaaataagttctagtgtaatacagtggtacaaaatgatgtcagagcttctttgcttttaggtgattttatgtgagatctcaagatccactcctggatcttgattaccagcagcttgggaaatggattgtctattacgtgtggatgttaattgtgcccccatcagcaaaacatgatctcccttcctttgggaatttgatcaacagctctttttttattcatgcaatttaggcatgaaagctgggggaaaaaaatctctgacgtggcatattttttcttcattcaagaagtatttattatttaacatgtacactatatttggttaacatttattgagaggctactactgtatgttagtccctatgctagatactctaagaaagaatcaagaaactttaaacttcattattctttcagatgttctgagcacctttgcttccatagtgcccatagcctgtaagattttttgctttctttttttttttttttttagacgaagtctcgctcttgtccccaaggctggagtgcaatggtgcgatcttggctcactgcaacctctgcctcccgggttcaagcaattctcctgcctcagcctcccgaatagctgggattacaggtgcctgccaccacgcccagctaattttttttgtatttttagtaaaaaaaagggtttcatcatgttggccaggatggtctcgaactcctgatctcaggtgatctgcctgcctcagccttccaacgtgctaggattacaggccaccacgccaagcgattttttgctttctttcagaggttgtttccatctttacaatatcacatttatagttgatgttatattttatattataaaatggtactgaatcttccaatgacattaagagcacttccatttatggtttaggtcscagtgtaagacaggtccttctttgaaatcctgttaaactatcacgctctgtagaatggcagatatgtaatcaatataagtgaatataaaatattacgtattttctgaaaagtgattaacaaattatgcttaaattacattcccttagatgactgtttcaaaatatgatggcctatttggaagtcataatagartatgtttaaaggattgattttcctaaaataacctattatctattaccttgatatcattttcaagttgttgtaaatatgtaagcttatgtaaattcttgttacccattcaagatggtaatttgtggaaatctacattgatatcttctatttctttgttcttcatcttgcatctaactcagtgccagttccgaagatggggcttgaatttagctgcacctacagttatggttccatgtgattttagttagctggaggttcagttacggttggcccttgaacaacagttggcccttcaactgcacgggtctacttatatggggaatttttttcaacaaaatacagtattcacaggatgcaaaacccgagtatatgtgggtttcccaggatcgactgtgggactccccagtagctgagactatagatgcacaccaccaagcccagctaatttttgtattttttgtagaaaccaggtttcaccatgttgccccggctcctcttgaactcttgggctcaagcaatcctcccgcctcgggctcccaaaatgctgggattacaggcatragccaccatgcctagcttctccctgcctttctaaatacaagtagaaacatactatgttcccttttgtacctggcttttcccccaacttaatatgcacagattttggtacggggaagagtgtcagggggaacagggagaggttctggaaccaatctcttccatatgcctagagacgactgtagctgaaattcatctcactagaattcttatcaccctgaagtcttttttttttaaatatcatttctatatgctgaatagcaacaaaactcttaaaagataccacccagaattagtttaggttcatctcctgtcatgaaaagtggtgtttggaaccacgagcacaagacactgctaggtacacgaaggaaggtgacatactcttgagacaggacttacctagacagaagaggaaactcaggaagtttataatattcctaacaaagattgaagttacatggattttctggtttaatgttgaatagccagaaaagtcaattaacaagaattatccatcctgtgtgagcattgtatttacttaaagttttcctctggttcagtattattttgttaggattctaagagtgaagaaaagtcccagtggagtgggagcaaaaaaaataaattaaaaaaaaaaaaaagagtgaggaaacaattcctctcccaatttcttcttttttttttttttttttttttttttttttttttttttacagagtcttgctctgtcacccaggctggagtgcagtggtgcattctcggctaactgcaacctctgtcaagtgattctcctgcctcagcttcctgagtagctgggactacaggtgccccccaccatgcctggctttttgtwtttttagtagagacagggtttcaccatattggccaggctggtctcaaactcctgaccttgtgatctgcctaccttggcctcccaaagggctgggattacaggcatgagccaccgtgcccagcctcttcctttcttttactatatatttttaaagtaactagccttttaaaaaaaagtataagaggatacacagactcctgagccctctctgcagaggcaactactattaacagttgctggagcagccctgcagaacatttatctattatctacgttagcatcaacaactgtttcttttgggtgttctgtttctgttttgttttgaggcagggtcttgctctgtcacccaggcacccaggccaaagtgcagtggcactatcacagctgactgcagcctcgacctcctgggctcaagtaatcttcccacctcagcctccccagtagctgagactataggtgcacaccaccaagcccagctaatttttgtgtagaaatcaggtttcaccatgttgcccaggctcctcttgaacttttggcctcaagcaatcctcccrccttgggctcycaaaatgctgggattacaggcataagccaccatgcctagcatctccctgcctttctaaatacaagtaggaacatactatgtgttcccttttgtacctggcttttcccccaacttaatatatataacttggatattgttccacactattatagataaagcatgttctttcatatgtctatatggtagttcattgcataaatgtgccaaaacgtatttaaccagtctttgcttgatgggcctttagattgtttctagtctcttgctattatgaacaaagctagagtgggcagtcttatatgtacacatttttgcccatatagtatgggacaatttgtacgaagtagaatcgccaagtcagagggaacagacatcaccgattgccagattacttgccaacagggttgtactcgcttacagtcccatcaatggttcatgagtgtgtttgcttctccacaccctggccaacacaccaatatattttttaaaataaacatttgtcaatctaataccaaaaagtaatagtgtatttcagtgattaaacatgcatttcaatatttcagtgctcgaatatgtatttctttgattctgaatgaacttgagcaacttttgaaaggtttagaaaatatttatatccttttgtgatgtgcatttttattttggatattttaaaaaataattcaagaagaaacagataacctctgctaacctcgaaggaactcgtctcatttcctttcagaaattacatcattttctctttattttctgagcttttgggaagatcctcaactggacaatcttggtcatgctgtcaggctccttactgtgaagctttcaaagaaagcaaacccttcaggaccttcccctaaagcagagaagctttttctaccatttgtttctctttctattccaattaaagagttatttatagggaaccattgggttgtgttcctccctcccctactaatgtctgtgcctcttaggagctgatcgctactgaatagttgagtggtctctttagcaaatgcatacatctgttgatgcttacatctttcaatgcaccgccccccagttgtatgatttaacttcctccaggttcctctgaaaattttagactaatgcttccagaaacacttacccatgattctgtatattccctatgagtggaaagagcaatgcagaggacagtatgaatgcctagactccaggcgtggttctccttccaactgggtgtttggtctagcagaggctcttggtctctctttgcctttagtgagcaccttaaaaacatgtacgggttttatattctaatatttcattcctcattgggtagattgccactgtcgtaatcacccttaatatcaggtatatttgggcttctttgtgtatgtgtgtgacaaggacggaaagttatttgccctgaattaggtggtctccattgtatctgaaaggcattgtgatgaatgccccagcattgccattgttctctcagttcattaaactcagccagttgttcctataaaacaggattctgtaaaagggagatgctggtgcatgcgcttgaatgtacccacgagcagtggggaaggtgaggtatttcctgttcagtgacagggagacctgtaagggatgagctgctgctgctcgtgaaaaccacaacctgactttttcagaaccctttccctctaattctgtgatggtttgctagtgctaagtgacatggagaataaatcccccatgcctattaaagaatctctgttcttttttaaatctccactgttttttcccatcaaccagtgaaggattgtatatgatgctcaagagatcagtttcagggttaaaaaaataaaggtttaggttgttatattctattaatcaccaccacatctccctttagagctctttattttgtttttatatgtctgttcttttgccggttgctttcctgttcttgttcagtctataatattttattttattctcaaatagaacatcgtattcaattgagaattgccttccgtacctaagcctaccaagcagccttgttgaggtagtgtgggaaggctacggagtaatttggagaacacaaaggggctaaatttgtcagccttgttacccatgatgggaacccaatccttcccctgaaatcctttcttctgagaataacctcccattgttcccaaagattaagggaagaattatcaaatgattatacatattccaaggctcttgtgtccatatggaacatattattggcagggtgtttcaggggttaactggccaactgcaagcttgggaacctaaatttatctgaagctctcatatttatgattagtaaccttggagtaaccacctactctctgcctctaattttatcaagtgataaatggaaataatcggaccatccaaccccatggggtgaaggtagggagaaatgattgtaatgattataaagtttttgtgaaataacagagtgcagcataaatgcttattattacagtcattctaagtttttactctgggagcatctgaggactttaagtctrtaagcttgaacacttgcttgcttttcccccacccaggtgttatttgagcttgcccgctaccacgccccatccacgatcttcctggacgagctggagtcggtgatgagtcagagaggcacagcttctgggtaacagacagggttggggtttttgttgttgttgttttttgtcatggcttctcccctcttgtgtgtttgatggtcggaagcctatagacatttactagcagaatgagcccattaataagcccacaaattttctgcagacacatggaaaggtctttaaattagatcctgttaactgaatagctgatttaagtagtttttataaccggaggaaatgccattctcccttcccccgttccccacagagtggttttcaggcctgaagatcctctagccccaggatcccaggctgccatatcggttctgctggctgaaaatagccgctgtgatggcctcctctggagccagaggggctgcccctggggaatgagtcttgcccactcagccactgtgcagggccacgtctgtacttcactcctgagaggcagtcctcgacggtgtgtgaagcctgggaaaacaccacttctctgtggcatcaggttatggctcagcagggctgactttaaatatgtyacatatattatctctaaagattgtcactgaatatcctcagcargcaggaacacttctcagactgtaataagccttctgtttgtgcttccaaaagccagagtagtgttgtgctttttgttcgttcgtttttaagatcagctttctgtcttgatcagaggtattttccactgaagctttttactaaatctggcacccctggcttgaaaaaacagatctctgagaaatctcaacacagctgcatttattaatgacctttaatggactatcatcaaggcagaagtaatagtaataaaacacaattaattagcttgttggaagtataactataatataatttatgaaattttactcattggaaaccattttcccagcagggaaaagcaaccataaagatgtacccaagtaatatatgggattcatgtaattgattgaaacaggacattttcctcagcttaactggagctggtgcttgtcagccctaggctggagcactctgctttctataccaggcctgatagaagcaggcaactgcacaggcacctagatgggaatgcaccagcccaccctcatagtcactctacaaagaccaggtctccctatgcacttgttgttacrtgtgctttgtcgagctctgtccccagtttcccacaaccttcatcgagctaatgtgaagactcttcatctgctatccttgtgtgtgctccaggttctgccccgaatttccatttccctgtctgggatcaaagactccaaaattaagagtcttcaaagggtcaggaaatagggatgggtgctctgaagacttcgataatattatgttaaaggaattatagttatgggcaaatgataattaaacatatagcaaatatatgggcaaatgctaattatatattatgcttataatatataataaataaattatatatatatatatatacacatatatatakagagagagacggtcttctctcttaggcaaaggtagttgagtattaaggggcatagatcctaaaaaaacatatacctagccaggcagggggcttgtgcctgaggtcccagctactcaggaggctgagggtgtgaaagtactttcctgtgtgctatgtaagtgaaagggattatcctcaattatgtcatttttaaagaggtaaataatgctgcaggtagacacagttgggctgcatttaatctaccagtgggactgtggaccctttagttattttctccagctcactgcctgcctttggttttctttcaaataccrtcattatattcatttacttgctttctatcatactgtatgtgaaaataacagcaaattgctcattttctctaactctagtatgaacggctccattggccatcrgaacagaaactgttctacagtcacagggacattgctgtgaatgctgctcttgtcatgagggcgaaggctctgacacttaggagaatcacgtcttgtctctctgtaggggagaacatgaaggaagcctgcggatgaagacagagttactggtgcagatggatgggctggcacgctcagaagatctcgtatttgtcttagcagcttctaacctgccgtggtaagagaccaagagagtaaattttgaatacattttcaggagtcactaagtgcaaataaaaattttatattgaccacttcaggcaaagctgtgttgtttggctgcagccctggaagattaatgtggaggctttactgttcaggtccccaatccttgctgtctgtaccaygaaagatctgccttaacagaggaaacacaggccagggtgaccattaacaatatttaaaatggacatttcaagattaaagccaaattacatagtttgtttaaattaagtaggactttggcatagaactacaaaatgcttaaaatctccaggactcaaataatattccagaaataatatgtttgaattttatagtattaaaattaaacttttttaagttaggaggaaaatcttctctttaatgctgcacagtaaatagaaaggtaaataatctctaatggaaaatgtaatctactctcagagtcttatttaaacagtgtcccagagtggtttaagaacaattctagatgtggaattgggaaataagagatgttgattagggaaaaacaatatctacttggagaatatattttaaaaataagtataagccctttatagttctgagaatgttttcacayacattatttctttcaagcttcaggcaaagcaggagacagataaagggaatgctgttcttcccattctcagaggggaccaaggtcaagagaggtcaatccaccaacatcaacaactcttgtagcctagctgggacttgtgacctcatgcccctcacacccatctcttgctctacattcaaagatgaaaagagaaactcttctgtagtgcatgctaattatctgggaccccccccaaaccagaagtcattgaaaaaaaccataatgttcatttgtaatctgttattttaaatatactcataatttaaacctggctccacctccccttgaatctagaatactttctctacttgctcaggtgatcagcattttacaatttgaagatataggatctatatataataatatcaaagtggagtccaaacagagaaccgtcattgaaatgtgattgtggaaacttttagggaaggaatcttctttccttcaaaggtttaaaacaaggttgatcataaccactgggggtgaatattagagtcagctagggaggcagaaaaactgtaagtcttcaggcatgaatgtgggaaggtctgtgccctggggagacctacatattttctggaagaatagaggaccttctacccccagtgaatacctaagaatttgttgagaaacttattgtgctgtttcgattttcctaagcccaaataaaatggttcacagaggtcaaaaaaccaaaaacaaagcaaaaaacgcataaaaattgaataagcttataagggcttttccaaaaatttgcttctcaatgtgtcagctggcaaatacatatgtgcttttgagcttatgttccttatatcattgattgcatcattacaacgtgccttagaaccaatatgttctaactcatatatcctgttttattatgaaaaattcccaaaaacactaaggaaaggaaaaaagcagaatgaacccaccatctccccgttttaataactaacaccatcttgctcaatttatttcatctattccagcaccaccccctgccacttctttgctgcaatatcttaaatcatattcaactattatgttatttctcaaatgtacatgttgaagaaaaataaggactttttttacattactacaaagtcattatcaccctaacataattaacagtgattcctgtttatattcagatttcccaatttgtttcaaaactctctttaccattgacttactgaactggtatccaaacaaggtttgcactttgtaattggtcattcccttaagtctcttaatctagaacagacggcctcttttttttctttttttttttgagatggatccttgctctgtcatccaggctggagtgcaatggcacgatctcggctcactgcaacctctgcctcccgggttcaagccactctactgcctcagcctcccaggtagctgggactacaggcgcctgccaccacgcccggctaatttttttgtatttttaatagagatggggtttcaccatgctggccagactagtcttgaactcctgacctcaagtgatccgcctgcctcagcctcttttttttttcttttcctccacttgtcattgacttattgcctgccagagggattgtcttgcaggatgtccacactttctggattaggctcattgtgtcctcatggtagtagggttgttcttactcctgtaattagactaaaggttagatagattatattcaggatcaatagaattttttggcaaacacacttcataggcgatgctgtgcacatcacgttgcattatatctagaggtatgtgatgtcttgttgctccatttttggtgatgctaagattgatcaccgggttcaggtgtgtcaccctggttccttgcctgtacagctcccatcaatggtgtgagcatccattgatgacctctgcctgaatcagttatttcaccaggggtacaagtctatcatttcctctgatcaacagctggaattattcttgataacagaactttccctcttccagtaaggttatttggtaaccctgaaatatagttcatactagaaaagcaggatttttttctctttgatttttagttgtgagttgatgccacagtgaccttcagtggcaaccaatgagtcagccatcagcttctttctctttcactacaagctcatgacttgtttggtacaaccccattagtttcattttttccccctaaaattttattgagatataactcacataccacccaattcacccatttagagtatacgattcaatggttttgagtgtatttagggttgtgcaactaccaccacaatcaattttagaacatttttctttaccccaaaaagaaaccctgtactcattagcaaccatcccatttcccctatgcctacatcagcattaggcaatcactgatctattttacattcttgtagatttgcctgttcttatacctatgagtagaattattgggtcatacggccactctacgtttgattagttgaggaacagcccaactgttttacaaagatgttgcaccatttcacatgaagcaaattcacacttcacaagcaaaggatgagggttccgatttctccacaacctcgctaacgcttgttattatatgtctcttttattgtagccatccgagtgggtaagaaatggttttgatttgcatttctctgagacaaacgatattgtgcatcttttcatgtccttatgggccaattgcgtatcttcttgggagaaatgtcttttcaaatcctttgtccactttaaaatttttctttttattattgagttataagacttttaaaatatattccagatacaagccctctattggatatatgatttgtaaataatttctcccattctgtagcccttccttccttcctccctccctccttccttccctccttccctcctccctttccttcccttccctctttccttccttccctcttctttctttcccgccttcttccctccttccctccatcactttatccctccctcttcctctctatccatcactttctttctctcttccttcctttctgaacttttttattccttttttttctctaccttgctaaacttcccatgtgtgtctcatttcccaagtcttggacctttcagaagaccctgtacctggttattcaacagcggcactgtctaatagaaatataatagaaatatattgtgaggcacatgcatactttcaggttttctattagccacatttttaaaaagtaaaaataaattggtgaaattaatgttaataacatgttttatttaacacagtattttcaaaacattattttaatatcagtataaaaattagtgtgatattgtagtttcttttttcatamtaaattggaaaaatccagcatatattttacacttacatcacacctcagtttggaataactgggtttcaatacccaaaagccacatgtggctggtgctaccatatgagagagtacagatccagagactcatttgtcttccctcatgctgctgtggcagaaatggacagttgcctcccaacatttatttcaccctcggaatttaagaatagaacttcaagttgggggttctgtttcttagtcttcccctactgttaggtgtggtcaaggccaagtttccttcttatatgtgcaggatgactcagctccattttgtacattttgctcctagaatcagccacttattcatgaagcccttgtgcctttagtgggaaatgatgttaatattcagagattacagtctcacaattaggccttttgattagacagagctaggaaatacgtatctttaaaaagaggcaaataatgagtccatgctagtatttcccattcagatttaggattaatatatttgattttatattggtatcttttctctaatagtgaaaatctcagttcttagcattaatgtaattaatactcactttatcccaatatgtacaaatactgcatatgtgtgtatatcacagagcttctcagtaataacaccaatactatcttgacagtgacattctgatgtggaaaatggtactgacctggcctaactaagatgaaagagctaatgtgggatttctcaacctcagagctactgacattttcaggccagataattctttgtggtgggactgtcctgtgcattgatgatgtttagcagcatctctggcccactatccactagatgccagtagcacctcctccccagcagttgtgacaaccaaaatatgtctttagacattgccatatgtttccttggaggcaaaatcacccccagttgaggaccactggactaatctaaggatttgataaacatcacatagagataagctgacacatattccacagctaaactcacaatgtttattaaaaaaataaaataaaataactgaacttggttttcttacacatagtttattacataattttttctgtatcttgattttatcttaacaaaataccctgccaatcttttcaaataagtatataaagttcttccttgctccctttatagctgcgcagggctccattttgtgtgtataataatttatcccaccagccacctaatgataggcatttgggttaatcctattaacccaaattaaaaagaatgctgccgtgagcagcagtgtggagaccacactttgtgtatttgctagtgtatctttggggtaggttccttgaagtagattttgctgggtcaaagggctaatgtgcatgaaagtatggtagagcctgccaagtttccccccgcagaggttgtaccactttgtattcccactagtgtcctgctttcattacttaacatgacagcaagaacatttccaatgtcattaaatcatccttgaaaattggattttgtaatggctgcccaaaattctcacacataaatataccatcatttagttaataattccttccctgttgaacatatatgatgatcccaaactttctctgttagaaataacactgaaatgaatttccttgcataaaaatctttgactaaagttctggttgtttccttaggacagatttccggaagtcagtttactgtagcagagggtttagatgtttcttaagtcccttgtgacacattgctgatgtccttctatgagaaaatagtgtattttttagcaagaatgtgggaacagatctttctcttgacttcagggtcttagatgagggartagacttatctgattcaagcagtctgtccttctaggggaaataactaaatcataccaagtgatstaaagacccagtcttaaaatcccaaaagaaattccttacagttagtggcagttctcatctattgcatcgtccggggcactaggctattctttactgctggttgacttaccaccattttctctagacacatagattccgtctcaaaggggcaatcattttctcccttcccagcagtgacaggtgtgcagcctttgtttattcagcccttctcctccaaagagcaccttccctagtctatagcatcacagagaggaccagaagaaagaacagctcttgtgtgtcaattgatgtataaacaagcaagaagaggaataacaaatgctgcaccttcaatattactgcttaaaataatagccatgtaagaaatttagtaaacacagttagaatttgatgtgccttgattgttgagtattcacaaactcaagcctaagggtcaggaaacaaaatactgaacaggcccattaaggcaaatgtcatctttaaatacctatttaactctctgggagtttgtacaaataaggtgtgaagactaaatatatgaagcatgctgaaattcatgttttccttgctgtttgtaaaagggctagaaatcccagcaactctcttaaaaatcagacacctggtataccaagctctggatttaaaaatccctaacatttagaagaaaacttaagatccaagagatggaataaaatggttctgattcacttgcaggggaaatcagcaaggaaaagagctgtcagtcagcagtggctcacttgtgtcatcgcctggtgacttcaacttcttttttcagccaaatttgaaacccgccggggcaactgctaacagggatgtctttctgttatctatgttaacctacttcttcctacatgaaccctctcctgctggtgtaacattgctatagcaatgcatgcatgtgattggagggataagcagatgtaacccttgttctttccatagtaaccacatgcatttytgggctccaggaagaagctgtcctccctgcctgcaatcaaggtcttgattgtgccttcactagatcaacatttttccaaaagcagtctgccacaggtcagcaagcattgtgcaaaaaatgagatctagtggcctggtatgttcaggagataccaagttaargacagttcaactggtttcccccagcagggttgctcaatgtctttaaaatacgactgtgggccaggtgcagtggctcatgcctgtaatcccagcactttgggaggcggaggtaggcagatcacttgaggtcaggtgttcaaracctgcctggcccacatgatgaaactctatctctactaaaaatacaaaaattacccaggcgttgtggcacgtgcttgtagtcccagctactcaggaggctgaggcaggaaaatgacttgaacctgggaggtggaggttgcagtgagttgagattgcaccactgcactccagcctggatgacagagcaagactctgtttaaaaaaaaaaaaaaaaaaaaaaaaaaaagcctgcctctggactcttgtactcacacttacctgagtctagaatctggaatgcagtggcacccccaccaccgtctccctccccttcagatatctgcagggctctgtaggtcaccttcaggggtctgctctgatgccacccactcagcatcctattcataattgcagccccggccccagctccctatgctgcattcttgctttgtgtttcttcctgtgctgttaccagaagtgatactaatttggaattaatggcgattaagctttacagccccttgatttcctgggacccttccttggctcatggagagtccccagcaatgtcctcatggtcttcatttttgcaaaatttgtgaaatggtagttttattgctggaaccacttttgcaaaaattatataacagttagaagattatggcagtgaaagagatctgatctaaccaacctccatcttgcctttaatcattcctgggctcaagccaagctaactttgggagacatttcgtttatagtttaaatgataataaccctttttgaaaactatgtggccttcctaaagctaatgcaagaccaccaggttagaaggatgagaggagcctgaagtcgttaacttccccagttactcctggagataacatcactattgtagaatctaagtaagattggcctttagagatgtcttttaaagtttttgcatttctgatgacccacgactccacgtgaacccaccaactagtcccatggccgcccccagaagaggactactttccatactcccattcaattgcccaccaaactatccttgaaaaagcctagcctccgaaatttgggggagattgatttgagtaatgactccatttcccatgtggcgtggccaggcttgtgtttattcaactctttttttattgcaaataaataaataaataaataaaagatactatttgcaggctgggaatggtggcttatgcttgtaatcccagtgttttgtaagactgaggcaggaggactgcttgaggccagcatggacaacatagcaagacctcgtctctacaaaaaaattgttaaaaaatcagccaggcgtggtggtgtgtgcctatagtcccagccactcaagaggctgaggcaggagaattgcttgagcccaggagtttgaggctaaagtgagctatgatcacaccactgcaccccagcctgggcaacagagctgcaacaccctgtctcttaaaaaaaaatgctattgtgctttgtgactctctatgaaaaataagataaagcagtactttccacacttatctgaccccactcctttcctcaaggagtatctcacaagtctagtgttccatttgaaaaccttttggaagacattagtttgtattacctcaccctgatctgatgaatgcatttttcattgcaattgccttcagtcctgcctgtaggctttttttttatttggagacagagtctcgctctgttccccaggctggagtgctggagtgcagtggcacgatctcggctcaccacaacctctgcctcccgggttcaagcaattctcttcctcaacctcccaagtagctgggattacagacacccaccaccatgcccagctaattttttgtatttttagtagaggtggggtttcaccatcttggccaggctggtcttgaactcctcacctcatgatccacctgcctcggcctcccaaactgttgggattacaggcgtgagccactgtgcccagcctgttattcatctttaatagtatttttgtgcctactagtggtcaaaccattttgcttggaattacttacatacaacacttcactatcccacacaataatatcaagcccatgatcttccatgtgtgttttacgggtaaaacccatatgacgaggaaagaagtatactgtgcaggatttggtaggtccagtggggaaggcacatgatgactagcaggaggttactaagcagtaaccttgctcttgcttcgttcacaccttactgtttgatctcatcagacaaaaacaactttcaacctggttattctggcattaccttttcttcttcacagggtgtaggttgacatgcgaatcatacatttcaaaccacatttaaaacattataaaattattataaccattttatagaaaataggagaattagaaaaaatacttctgatttcaccactgtgactcaagtattaccatctttgtatctacctttctggtgaaaatggtttagttatttatcatcttttgcttccatatccttctctggtaatgttttttgttcccaagagaaaaacagtttttactcttttggttattttaaagtaatagttgtttattataaaaatcataatttatatgctttattattatttgaaagtgagtagtcttcacaatagcaaagacatggaatcaacctaaacgcccatcagtgatagactggataaagaaaatgtggtacatatataccatggaataccatgcagccataaaaagaacgagatgatgtcttttgtgggaacatggatgaagctgaaggccatcatccatagcaaactaacacaggaacagaaaaccaaatacctcatgttctcacttataagtgagagctaaacaatgaactcatggacataaggaggggaacaacagaccctgaggcctgcttgagggtggagggtgggaggagggagaggagcagagaaaaataactattgggtactgggctttgtgcctgactgatgaaataatctgtacaacaaacccccatgacaaaagtttacccctgaacctaaaataaaagtttaaaaaagtgaatagtcccctgtaactataccatggamaatgatgtaagtctctccaaactcttttacatctgtgtgtgtgtgtgtgtgtgtgtgtgtgtgtagagcacatacacagagcaacaaaaatgcgttgtcctgtagatacaagtgatatttgttctatggcctgttttttttccttcatttaatctattgtggacaactttgaaaatctgcctaatcccacataaaactccattgtatgtgtgtaccataatttatttgacttttctttttcttgagcgtttttaatctggtgccagcctgttgaacaccttttcccactaccatgactcagtgccctgctgggctccacggacactctaaggtcggggggcagttcttcgttcagtgtttagctggaatagggcaggtattattaaaaggttttttattctggtagaccgcctctcctcagtcctttggctagcgagagcaggcttgtcatggggtgtttgaatctgtgcatgttagcagttctgaattgcaggcttctcctgcattctattgggatagatgggaagtaaagagaaaacccagggaactcactgccacaccattcctcaagtcccaaggtccctagctagccagtcctcatctttccaccattcaatgtctctccatgtttatttcttgtattatatccagggatttttagttgtaagagggtgaactagagaagaatgggctactccatcttggccaaaggaaaagtcttgttcatatttttgttcataaacataatttattttacactctctatcaggggagtctatttctgttgttagtttttttctgccaggtctcatttataatggtttattatgtgttttgtaattttatattaattaataaatttattcattcatttttgagaggggggtctcactctgttacccaggctggagtgcagcgatgcaatctcagcccactgcaacctccgcctcccaggttcaagcgatcctcccacctcagggaccacagacgtgtgccaccacacccggctagtgttttgtaattttagattgttagcttacattaatgaagttgtctctatctgtgggattcttgcatgggtccctccagagaatatttgttttactgtgtcagtctttaaatcacttttagctaatttccctgttcagaattttttggaccatgccaataagaggagatctgtggtcctaacttatcagtgaacactttctcccaccccaaagtgcaaggcagacaaatttccctggtgccttccattgctagtggggagatttcctaatcaaccctttcatagtaggcatgcacccttcagcaatactgagtctttatgtggtgggccttgacgccacctcccatcttgaatgggtccaggaccttctatgccattctacatgttgcctttaaaactcaaaccttttgtaaccaagagacaaacacccctaatcagccatagcttcaactgcccagctttcattttcagcttcctctttatttttggcccttgagaattctggccctgtctccttgagggctcaattgtgcattcgaaaggtatttcctataattaattgagctttttaagggactgtataacaagagaagctagtttatctttttgctggaaacagagccagccttcccatttttttcctctcaattttggtaatatattttctggcaagagtaattgaggaatatatcttctttgttgatactgtagcaattagaagttattttcattcttcattataaagaaatgatgctctcaacccaaacatcagtaggacataaactgaactgatagctgcagactctcctacagtatcctcaggcctcatgcttctgaactcactgctcagaatgagaagtggggtctctgtggaggccacatctgtcagctgattttcaaaagtactgcccagmcacatgggttcaatgaatcatcccctaaactcattgtttccattattttcactaaagattaaaatataacatcttatttccattgcccaagttgatgcggcttttctctattgattagaactaatgatgattataaaatgctaaaattttcaacaaagcagattcaccttcataaataattcctggatgttaaggaagcaggccatttaacatgaagtaagtagccctgcacctaaaggtcagtcatgtgttcaagtagtatttcttttaaaaaaaaaatctattttgagattaggttataagactggctaatttttgtatttttggtagagctggggtttcaccatgttgccaaggctagtctcaaactcctggactcaagtgatccacctgcctcggcctcccaaagtgctggcaagtgctgggattacaggcgtaagccaccatgcccagctgaactagtatttcttctttttttttttgagacagagtctcactctgtcccccaggctacagtacagtggcatgatcttggctcactgcaaccttcgcctcccaagttcaagcaattctcctgcctcagcctcctgagtagctgggattacagttgcccaccaccatgcccagctcatttttgtattattagtagagacagggtttcaccatgttagctaggctggtctcaaactcctgacctcaggtgatctgcccacctcagcctcccaaagtgctgggattacaggcaggagccacckcgcccagcccgaaatagtatttcttgagcacctgttgggtatttattctgcatgatggagggagggggaatccacatcatatggtccataatctttggcctctggaaactggcaatctgattgaacaatcagtgggttagaaaataaatgactatgaggcggagatgcagccagcaccgtgtgattggtacagacaataataagaataaaaatatacaagggaaagaggcaatttctgatgacatatagttttaaaagcctttatgaggtagagagcacttgatctgggtctataaacatgactcgacttttgatagacaaagtgaaagttccacataaggaaaatggcctgagtagaaactcagaactaggatggcaaaaagtggattctgagaatggcaagcagaccagtttggcccaagtgggaattgtaggtgggggacagctgatgctgggctcactgtggaagacaaagtacccttcaatgcttaatcattggctccctattatcaaccacagaatgttaataaatattaatttccagagttgtcctgaccactcacttcatggtgttacatagacatactgcaaagacttcacttttaaaactgaaggttggtttctcttatgctgataatttcaacttaatacattttaactagtgaaggaataaactagaattatgttgcttccacattctgtaaaatttggaatgatctctgtcccaggaaccctggtttaacagtggagacaggacgagggacttaggaaggtacctgagggttggcacaggggctcagctgatcgggcacaaggccttgaagcaagatgtaaaccgtggaagtggccagtgggtgctgcaccttttatccagcagtgggcctgggtccagtggaccaaactctgaggtctgtgagtctttgctgcatttcacacttgctgtacaccagcagctcacacttgctggtagttttgccctttgaggtgacagaagtaccagaaaaacaaaagaaaggagacattaaaacagagtaactaggttcaaaactcaaagtgcagggactaaggggagtgctttctggttgccacaggttaaatttttttatataaatatattggcataaagaatgattcctgggtacattccacttgtccttcgtttcctcccttgtatatgattattgatgtcatgaaaagtgcattcatcaggcctggctgtcagagagttgcacttattttgtgcccacaagcagttttgaggtaaatctcttgctttagggcattagctaatcaatacagacatctgtagtgagggattgttttccacatcatctacaagactccattttcctagggcattctggagggttctggacttcctttagacaggaagtcactctggatgggacagggacagcaggaagaaggagtccctgtgaaagaatctttcttctttagcagcctgtcttttagaagcaagtagctgatccaaagtaaaggccttggaagaaaatatagcaactgctcattaccctgtgctctgccatttctaggggcttattttctcttcccttggggttttcagtctgatatcagcttattttttctttgaaatttacaggatcaatgatcccacatgccaaggcccaaccctccatattactgcctttaattacatataaggaagagggcatcttgtttctgtatattggaggcatagcaatgactatacacatggcaggcagtaaatactgctgaacggcactgaattcctaaaatataaatgtaatgatttagcttccctgttaaaagatctcccggccgagtgcagtggatcacgcctgtaatcccagcactttgggaggctgaggcaagcagatcacttgaggtcrggagtttgagaccagcctggccaacatggcgaaatcccgtttctaccaaaaatacaaaaaatagcccagcatggtggcacacgcctgtaatcccagctactcaggaggccaaggtgggagaattgcttgaacctgggaggtagaggttgcagtgagccaagatcgcaccactgcactctaggctgggtgacagagtgagtgagactccgtctcaaaaaaaaaaatcccttctctcctttttttcttttctcccccatcacttcacctttttctcctataattcagtcacaactgttaactgtctagatggactcttgatacattgagacattccaggcattctatgagtttcatctccttggagagaaggctggtaagagccttcttaccagctccaggctcacctgcttgtcctgcacctagtctatagaggaaaccctggggttccccatcgtcctcctggagggtccttcactctatgcgtcacagcctctgtttcttgaatcccttatagtcctttggtgtggtttactctcctcctttggagagaatcctccaatgctttcctgataaagagtacatgggaggtaatttttttttaggcctcacatgttgaaaatgtctttattctatcccccaacttaattgatgtcttcatcaagagatagatttctatgctagaaattatttctcatctgaattctgaaggcagtgttctattttcttttaatgtcttacattgctgttgagaagtcttattgatccattgtacataacctgttttttctctctggaagcttttatgatcctttctttgttctccaggttttgaaatttcaccacgatgtgacttgggagtccactagcagttaactgaggcataggtttagggactcgctgagttaaatcttcatgcctgcctcacagggttgttgtgagaattaaatgaattaatgtctgtaaaatgcttgagacattgcctgccacttagttaagtactagttaagcatttgcttttattaatatttcacatacagaaaattatttcctagaattctggaaagttttcttgaatgatttctttgatatcctcccttctgttttctctgtcctttttttttttttttttgatctcctattgtctgttggctctcctgtaataatgttctcatttaaaaaaccatttctttctcatttcgaatttgtgtgtgtgtgtgtgtatttatgtgcatgtttgtgtgtctttttttttctttaattgagacagggcctggctctgtcacccaggctggagtgcagtggcatgaccacagctccctgcagcctcaacctcttgggttcaagcgatcctcccatgtcccaactagctgggactacaggcatatgcctggctaatttttttgtagagatggggtctcactgtgttgcccaggctggattcgaactcctgggctcaagtgatcctcctaccttggcctcctaatgcactgaattacaggcataggccaccatgcctggccttgtgtgtctttcttgtcctactctgtgagagatttctccagctttatcttctaaattttccattgtgtttttaatttcttctatcatattttgtattctcgttactgcattttgttgtttttctctattctttttaaatggcatcctctttgctgtagtctgaatgtgttcctcaaaattcatgtgttagaaacttaatccccaatgcaacagtgtcrgatggtagagccctatgggaagtgtttaggtcaccagggctccactgtcatgaacagattaatgccattataaaaaggcatgatggaggcagtttggtctctcttgtttgccttccmcttgccatcatgtgaagacacattgtttccccctcttgaggatgtgccatcttggaagcagaggccagcctctcaccagacaccaaacctgctggtgccttgatcttggtctcccaccctccaaaatgacaattatgaaatttctgttcttgataaattacccagtctcaggtattttgttaatagcagttcaaaatggactaagacactcttcttgtttcatggcaatattttcttacatctctctgagaatactaatttttgaagtttcatttccctgaagaattctgttttctccaagattctttttattttccaccattaatttgtgttgggctctgtcttcaagttagaggagttccacagatgtaggtcttcttggctgcctaatgtttatgagaggggtacattaacaaaacccacaggaagctctgtgcatgtggcaaaggcttgccaactgtgggctccatgtattgagatttgactgggttactgtgttggggaactcccaatatcaatgtccttagggtctttctctttggctggtcagattgccaagtgacgattcttgcaatctcctgcctggagggcaagagtttggctgctaatagtctagggatagtcggtatctcattgcttcagtacagtacactattttcaactgagcctggtgtttcccagcctggagaccctccattttaccctctaccaaggtatgggagaggcagttcccctgctactggagggggtggaaatctgtgatctaacttttttttatgcaaattggcaatcaaaccccctattttcaacccagcctcaccctcacctctaaaggtagaagaagatactgccaagtctcttggggattctgtgactcagattatttcttgactttctttactgctgatttagaaagcagcttctcagttctactaagtttcttttactcattattatgcttcccagctttcaaatctttgcttcaatcagttctccaattctctttgcttttgtgggtttatgccattcaaaaactctttcagtggtgtttagtaggaggaagcagaggtgattgtgtttatccccaaatttaagtgcagtcttagttaatttaaagttcatcaacaatgaagtgtaatatggtttggctggtccccacccaaaatttcatcttcaattataatcctcataatccccacctgtcaaggacgggaccaggtggagataactgaatcataggggtggtttcccccatgctgttctcatgagatctcactgcaccttgatggttttataagtgctcactctgtcctgccaccctgtaaagaagatgcctgcctctctcttttgctttccatcatgattgtcagtttcttgaggccatgtggaactgtgagtcaattaaacccctttcctttataaattacccagtctcaagtatttcttcatagcagtgtgagaatggactaatacagtgtttttatttcaaccttagtaacacagacagccttctgttggaacatccttgggtatgaaggataacatatttttgtggcttatatgcaggagtgatattcaaaatattgaacaactggtgtggtgtgggtgctgaccagtcaaggggaacagcatcattcttgctgcctgctggctgtatattattgctgagtatgaacaaggaagaaaccatctgaagcaaagatgagcacatcctcaattggagtgctaggcaaagttctgctgtgaagcgtgtttttttcttcttttccttgaccctgtgccttgaatataaatgtgccttgagagggggaatgattgtgcaagggaagaggtggctgagtctctgatgtgcgatgaatgtcaacagggtgagactgataaaagaacaaagcaaatgcaaaaaagaaataggtcattgttactgtcggtaaggcacccctggactatggattctcagctcagggttagacaaacaataggagaggaaaagacacactccttaaagaaatctggttgctgtgatttaggattcagatatgttccctggaagtatgttttcagtttaaaaagaaatattgtaacatagattcagaatgagaataagaaaaaatgggaagacagtttagatattctcagtgtttttatgagtgagaaatacctggtgatgaygttttcattgttactcttytttaaaaaatatttaaaattttattttttaaaaaatttatttctgtcactcaggctggagtgcaatagtatgatctcggctcactacaacctcggcttcctgggctcaggtgactctcctacctcagcctctcaagtagctgagactacaggcgtgcatcaccacacccggctaatttttatattgtgcagagacggggtctcactatgttgcccagcatagtcagcgaatcttctacctcagcttccccaagggctgggattacaggcgtgagccaccgcactcagctcattgttactctttatcaatggttaggctaacatacaggaatttcctaatttctatcctagaaaatcaaataaacagttcacagactcacactcaagatgatctattgataataggaatggtaatttagagtaaccaaatagcctcagctgatgagggaaagctctgctttacataatagtgctatgtaatttcataataactccaaataatgtatttggaatgaaaaatccaggccaggcgtggtggttcacacctgtaatcctagcactttgggaggctgaggcgggtggactgcttgagctcagtagttcaagaccagcatggttaacatggtgaaactgcatccaaaaaatattagccgggctcgcacctgtagtcccagctactggggggctgaggcagaaggatcgcttgagtccaggaggtgtaggttgcagtgagctgtgacggcaccactgcactccagcctgggcaacagaggaagaccctggctcaaaaaaaaaaaaaaaaaaaaaatccaactctgtgtgtgtatgtgtgtgtttaatcagcatttgcaacctctagtgaaataattgattcagacaaagatcattaatagatgctaaaaccattagttgaaagggcataaggaattgggtattcctatggtgtcaaagtattgtacacagaatacttactacttgctgagagaagatgtttttctttacaacggagagttccatggccaccagaaaatcaaacaccacaccgacagtgagatacacagatgtgtggatcctgatgaatatgaaaacacatcatcatctatgcaatacgcttgccaaaaaatatttaccctaaatctcattaagcttttagaacttccctcttagagacagggaatagaggaaccagtttcatgtatcacaaggaaatcatcagacaaattcagaatgtgggacattctccagctggccctgtttcttcaaaaagggtctagggcaagcaggctggcctagattaaaaagaggtttaagagacagaaccatacatgatgcatatgtgttcactggattttgtcagaaaatgatggaaggtattttggggatggttggagtattttattttttaacttttatttaagctcaggggtacatgtgcaggtttgttgtataggtgaacttgtgtcatgggggtttgctgtacagattatttcatcacccaggtattaagcctagtacccattagttgtttttcctgatcctctcctcctcccaccctccaccctgactggagaaatctgaatatggactgagcattagacacatcacagaatcagttttgccaggtgtcataatgatattgtggctatgtaagcaaatgcccttctttggaaatgcatgctaaaatatttagggatgaggtgtcatgatataaattactttgaaataatttagcaagaataggtagatagagagatatgaagcagatatagaagaatactgatgttgaatcaagatggtatgtatatagatgttcaattgttttattctacttttatattagcttgaaagccattgcactccagcctggcgacagagcaagactccgtctcaaaaaaaaaaaaagtgtactagtccattttcatgctgctggtgaagacatatccaagactgggaagaaaaaaaaattaactggacttacagtttcacatggatggggagcctcagaatcatggcggggggcaaaagacacttcttatatggtggcagcaagagaaaatgaggaagacgcaagaagcggaaacccctgataaaaccatcagaccttgtgagacttattcactaccatgagaacagcatgcgtggtggaaactgctcacgattcaaattatctcctactgggtccctcccacaacacgtgggaattatgcgattacaattcaagatgagatttgggtggggacacagagccaaaccatatcaagaagtttaaggaaatggcctatggatgcaaaatcacataaacttggcctgacagttttgggaggagtaaaagtgagtgtctgaaagggcggttatttgcactgggcacccaggaagggccactggtgctaagttcaccaatgtaatgaagtgaggggtcattcactccagaaggactgagaattttggaagaattaatgtacttagagtgcccaacttattgtcagcaataatttactcactggcaagatcggactgaataattcatgttacaactgcaatcagaatactcatgattgctggttgttagttggtttttgtaccccaaattaagtcgcataaaattacttccttttcattagttctgagaatgtgctcttttccttttcttccattcatccttccttccttctctttcttctccttcctttctgctttcctctcttcccttccttccctccctcagttctctttctcaccaattctttctccaaataatattaattgtcccatccactcaaggcatagatgtagagtgacagttaaaatgcagaattgcttcctgcaatgctaaattgttcttaaagtacagttgttgttcaggaagtgtgtttgcagccctgtccagctccatttctggtgtgatttcagggagctggactgtgccatgttacgccgcctggagaagaggattctggtcgatctccccagccgggaggccaggcaggccatgatctaccactggctgcctcctgtgagcaagagcagggccttggagctgcacacagagctggagtacagtgtgctgagccaggtcagctgccctggagaggggcacatgtaggtcaagggcccaccatatggccatcttgtagaccaggtcttaccatgagctgatagaagcttgagacacttagaataagatccaagctgcccccgtaatgcaatgggcatcttcacgaagaataagctccttttcacttaaaaatattcagagaaggagaaacaatgtgaggcagtggaaacagcatagggtttagactcagagaacctatggtcaaatcctggccctgctgcttgttagctgtgtgacctcggagaagtcacttactctttgagcctgtttcttcatctgtaaaatgggtagcagatgagccacaaagaatgactgtgatgattacataacagaaaaactccaggtacatgtctattatgcccattatcactggtgtccattcccagggtgttgcagaaatgttgcctgcttttggtgaacatttgaacacaatgttctctgaggttcctaaatggcaggtatgatcttatttacaagaataaacgtgcctaccaaatttgaccatccttggatttgagcacaggggccctgataggctaacttgggtgttctgatccttcactggcatcttacagcatatttcgatggtgttagaaagccattctagcccagctgcttaggttatcccaacatgctagcagggtctcttcctcaagcactgtttatctgggaatctttttaggatgttcatgggtgacagatacagaatctacacagggcttctgatactgggtcctgcctataacaacgtaatggccaggagcattctgcccactgaccaatggctggttttttggctgtttcaggagackgagggctactcaggctcagatattaagctcgtctgcagggaagcagccatgcggcccgtgaggaagatctttgatgcacttgaaaatcaccagtcaggtatgggttggatcaccatgaaggtgttccaggaatttgtgtaaaaatccctctcaccagcagatggagcctggcgcctgttcttggtgccgctttacacttggcaatgcgttttttggtcaaatcatccctcactcaactcattcctccgtgggtgttctgatttggatcgactttgcttgcagatgataaactccttagggctcaggcttttatttctctggcacactctgatgttgggctggatccatttgaggcactatataaatattaaataatacctggtaacgatacatttaggtcacatttttttgtctgggccttaggggctaactcagttgcacgttaaagaatttttccccagccctctttagtcttgccttttgctgcattaacaattaagaatgctgcattatgcattattttgaaagaaggtctattagcgtttcaagagcattgatcaccaagaggtcgattgttgtgctgttactgttgtgttcttatcctagaaagcagcgacttacccaggatccagttggatatagtaaccactgccgactttctggatgtgctaactcacaccaagccctccgcaaagaatctggctcagagatactcagactggcaaagagagttcgagtctgtctgaaaccacatttaccctgacctggccacaaaggcaaccacaaagacctcctagtttattaatgtccgtgggagaacaaaatgattggaatggaaaagagaaaattatttttgaagactggattaacttgagccactgtattgttttggatagctgagatatatttattaacttaccattatcgatgtcagcaaaatattgagagtttcagttacatacatatatgtgctattgggtcatacaatggagatttttctgacaattagactccataaaattttaatgaacaattttctgtaatgttactcatttgtaaactttttaagaaaaagatgtacttagaaaagttgtgttggccacacacaggatgaccctgagttggggcagccaagtagaagctaagcttgacaggcactgcccagctgacagtcccagggtgaaggaggacggaagcagggaaggcaatgcagtctgtttctcattccggacaatattctgaatctcatcagctccccctaattctgactccatccagctttgtcagcagcaaacccctcccaaactaagccccactcagaaatgtcactgagcattctgatgctagagctaatagccagggtgactagcacaccatcaccatcagctgccagtctgattgttttgggttctggcccccaataacatcttttcactcttcacacctcacatccggtgtgctctgcccttctctttccattgccgcagcttctcatcagatccaaagcttaggatggggcacctaagcttcgagaacattcatcccaagtcttccctgctcttaggctcttccccctctccttaaggggttataaacaactagacgcatctctctcagaaacccacaatccgaggcatctactttcaacccttgataaattttgaaggcttctactaagtaatgccacttcttttcccccactagaacttacctatgggaaatcaccttcttttctcttccttgccttgtcttcatcatccctgcagacagactcttcaagaggaaaaacctccagaaagagacactttggatagctaagtatcccaaaggattttacccttttaaacaaaaccaaagcatttttttcggtatcgattattttgagattattctcaaatgcctctttaaacatcatttcatggaaaatgtcaaattgaaaatataccttatttaacaaattgaaaataaaaaagatttcatctcagtacatgcttaaacttcttcataagcatcaggcactacaccatgcagcaccagtgatatagagagtccccagtccctgggccatggacccgtagtacccgtccgtggcttgttagaactggtttgcacagcagctaagaggcaggtgagcattactgcctgagctccacctcctgtcagatcagcgaaagcattagattctcataggagcgtgaactccattgtgaactgtgcatgcgagggatctaggttatgcgctcttatgagaatctaagtaatgcctgatgatctgagatgaacagtttcatcccaaaagcatccatcccccgccccctatccaggcccactccgtggaaaaactgtcttccatgaaaccggtccctggtgccaaaaagcctggggaccactgacatagatgactctactttgaatggcccaagactgatgtaaggcctaagttccgatgtctactttatggtttggcgggggttcttcttgtcagaactgacatcagctgacatttcttgtagctgctagtccatttgcttgtggccactaccatcatttctaattttataaaatctcaactgctgttgtgaatttgctgcagtgggaaagttggtgctgtatgtatacccaaaagtgactgggtaaaggggcaggggaaatgctcctctggatagcaggcttcatgacaatacatttaggtcctttctgcttactgcccgttcctgaattcattcagaataagtgcagtcctgccatccctcacagcaaatacacttaaccttcttccacttccaaaaccccatatgcagcctgtgtgcctgctgcatctccacatcctccattccctttaaatatcgcctagtccatgtttttaacacttccacctctattcaatcacatactcagtcctcctcttttttcctaagaaaatttgtcttcaaatacttcggcatgtggatgtttttctgtcacgcctttactttggtggcttcttcttgatgctttatatatttattcccactttggatgaaatgaagtgtagctctttcatctctctgccctttccttaccacatatacgtatctgtctccatcatcccaaaagttctattatgattttaggttaactcaataatcaatatttttaatagaactgtacattgttaactgcagagccagctagtgaattagaattacatttgctttcttgttttgtctttcctagaattaacaactgccttgtttttctatttgcttaattttctaagtatctttttttttttttaacacattctcggacctgtcagatacccatcaatattcttttccaaatggccaaacataccagataaactttccactcccttcccacccgctctggtcctggtgttctaagggaaaggggagcagaagaccatggcagaataagcaatttgtacctaatcaatttccagccctgcatctcaccctggcccaccaccatgcccactgtttccatggccttaatttccatggttccatttttccagagaataatggaaaatttccattctcctgccttgactaggggttggcatctgactgctcagggtggggaagtttcctgaggctccaacttctaaccaattcctcactttcaatcctgtcttgtacctcacttcctccctacctgctgtctgcaagccttaagtctttgaagttgttctacaggatgaattttggctgtattttctttgcactgattttggctatcaacattccaaccagtttccacctttcagattattgtaccttttcatccactgatgcctcctctaccttctcttgtgggctgaccctgtgggtttacattttattccttttactcttattttggtgtggctttgagaaaaagagaccaacacatatgactaacctactatgttgagtctctatgattatttttttaaagtagattagaagtatatatctaagtttacataggagattggcctgatagctgttggaggaaagtttaatgtattttcttccaaagcagaggtcacagcccaaagacctacagaaacatggaatgtagtggcaaattaggagtaagatggatgttaggcaaagcagaggtggagacggtggtgagctagagagggccagggactctctgacacagtaa

SEQ ID NO: 95169 - DNA, 100056 bp, Homo sapiens
  misc_feature (1)...(100056): n = A,T,C or G
gtgatggttattcaaatctacacgtgataaaatttcaaagaaccatgtacacatacacctatacatgactgcatgtagaaaccagtgaaatccaaacaaggttagtaatttaattactgtcaacttcctgattttgacaatgtactatggttatgtaagatattgagtaacctggatgagtaactttaccatttttgcaacttctgtgtgtcttaaactacctcaaaataaagcttaatacttttttaaaaaagaaaaaaaaagacataaatggaatattaggaaactaaaactgcaacatatataatagaaagaaatactgtccaaatcatataaagcccctataaatcaataagaaagtgataaatgacccaatcaataaatggacaaagcccaggcacagtggcttaggcctgtaatgtcagcgttttgggaggctgaggctagaggatcacttaaggccaagagttcaagaccagcctgggacccatagtgagaccctgtctctataataaaagaaaatgagccgggcgtggtggtgtgcacctgcagtcctagctactttgggaggctgaggtgggaggattgcttaaatccaggagttgaaggttgtagtgagccattattgcaccactgcactccagaccaggtgacagagcaagaccctgtttctttttttttttcagatggagttttgctcttgttgcccaggctggagtgcaatggcacgatcttggctcaccgcaacttccgcctcccgggnnnnnnnnnnnnnnnnnnnncttccgcctcccgggttcaagcaattctcctgcctcagcctcccaagtagctaggattacaggcatgtgccaccacacgtggctaattttgtaatttttttagtagagacggggtttctccatgttggtcaggctgttctggaactcctgacctcaggtgatccgcccgcctcggcctccgaaagtgttgggattacaggcgtgagccactgtgcctggccaagaccctgtttcttttaaaaaaaaaaaaaagatgtggcagacactaggaatttttattttttattatttatttatttatttatttattttgagacagagtctcactctgttgcccaggctggagtgcagtggtgcaatcttggcaagctccgcctcccggattctcgccattatcctgccacagcctcccgagtagctgggaccacaggcgcctgctgccacgcccggctaatttttttgtatttttagtagagacggggtttcaccgtgttagccaggatggtctcaatctcctgactttgtgatctgcccacctcggcctcccaaagtgctgggattacaggcgtgagccactgcgcctggccagactaggaatttttaaataagcataacaaacatactgaaatctgtggattctaaattctaagagttaaaagcacatagttgtggtttttatttttatttattttgagatagcatcttgctctgttgcccaggttggaatgcagtggcgtgatcacggctcactgctgcttcaacctcctgggctcaagcaatactcctgcctcagcctcctaaacagctgggaccagagatgcgtgccaccacaatcagctacttttttatttttcacagagacaaggtctatgttgcctaggctggtgttgaacttctgggctcaagccatcctcccacctcagcctcccaaagtgctaggattacaggtgtgagccaccatgccggccagttgtcattttaaagtgctaatatttgcaacatgatggagattacatctcctgtaactatttatgactaaaagtttaaatgtcagtttaattcttatttattttagttttagagacaggggtcttgctgtgttgcccaggctggtttcaaatacctggtctcaagcaattctccttcctcagcctctggagtagctgggagtataagggtgtgccactgtgcctggctaaatgtctattttaaatgtgtgtaaagtggcacataactgttcaacatcattttagaggttatctgagcacgaagaaaatcattaatcccaaaggctctgcactgtgctggctgcctcatcctcaccatctcctgaaaatggcctctcagtggctgaagctctccaatgcgaatgttctagacacaaatgatgtggtgacactcacatcagcatcaaacagctccatctggttgtccaccctgcttcctgcttaaccatttcctgctgacttctgagtgagtgacacataaactaactacaaagttgaactgggctgctcctgagacttgtggttgtggtgctgctgtgctgtgctacattaagaatgttgggctgggcgcaagggctcatgcctgtcatcccagcactttgggaggccgaggtagaaggatagcttgagcccaggagtttgagcccagcctgggcaatatcgtgagacctcatctatatatatatatatataaatatacgtaattggcagttcatattaaaacaaagtttttgagagtctggaattctggagttagtcagacctgggttcaaatcctagctatattatcacgtatgaagtcttcttgccaataacttttagccttaggctaataacgatcccccgccggacttttttttttttttttgagacggaatttcattcttgttgcccaggttggagtgcaatggtgtgatctcggctcactgaaacctctgcctcctgggttcaaatgattctcctgcctcagcctcccaagtagcgggaacccaagtagcgggaattacaggcgcctgctgccacgtctggctaatttttgtatttttagtagagatggggtttccctatattgaccaggctgctctcaaactcctgacctcaggtgatctgcctgcctcaccctcccaaagtgctgggattacaggcgtgaacctccaagcagggcctaataaagccttttgacctaacttccagtgtagagtacaggggtcaggaaaacaagttcattgacactgtgaataaacaattaggcaaatgtagaatgtgggacattctacaagaaaactggcctgtacttcaaagtcaatgtcgtggggaaaagaagtggaggagctttactaagagtctaaagcaacataataaacgcaatgcatgtgattaattagatactgcacaaaaaaataaatccaaaaaactatgagacatttttgaaacaattggaaaaacaggaatatggactggatattaggttatattagagaattattgttagttttcctagggataaatgtggtattgtggtgatattaacagagtgtcctaatttttaggagctgaaacgtttaggggtgatgggttatgatatctatcactcactttcaaatgatccataaaaaagcataagcctcatacacccacagagggggtgtctgccacatttgccatgaagcaaatatggcaaaatggaaacagctgttgaatcctagctggtgggtgaacactaggaatccttccattattctgtatgttgaaaacattcatagtaaaaagctaggctaaaaacgttctgctgtgcagttgtgctgtgcgaccttgggcagtttccttgcctcccaggccttcatttcatcacctatgaaaagggttaaaaataccaaccccggtggggcggtggctcacgcctgtaatctgagcattttgggaggccaaggcgggtggatggcttgagcccaagggttcaagaccagcccgggnnnnnnnnnnnnnnnnnnnnnnnnnnnnnnnnnnnnnnnnnnnnccccgagccgcggtttctccaccctaatggtgaacagccttttggaagtcgcgctaaccttggcctgagacctgcaaacttgcccaggctggggcgtgtgaaccggcgagcgcgcagcggaaacggggcggggcacctgaggctgggaatgcagaggagccttccggggggcggggcggggcctcccgtgcataccaatggtggggtagattcaaatgtcaattcgcgcgctcaagtggcttccgccaggaatcccgacccttatggaagcggaaggaagatcgcttgataccaacctgggctagctagcgagacctcgtctgtttacttaaataaaaccaaaaaaacgagcaccgagggaaaaaggagtgaatcccggggctagcagcagcctgcggcgggcgctctcccgggagtggctgcaccgcccgacctccccggaggcggaaccgcccgcattgccgcgtggccctgggcgccgccacctcctccgcagcggggcaaagttgccggacctgggggcaggagggccacgccgagatgactcaggtttagcgcgggaggggaggatggcgacttcacccggcctttaacaacacgtacgcatctttcggcgtcttctacaatggctatgttaattacgtggccaggaactaaactatcaatgaagccacctctgactacttcagttacagtgagtttaacaggagcaaaaaagcacgtggcgccctagggcaaccgaaacgagggttttagacgctgattatgggaaattgaaatctgagttgagtatgagatgacaccaataaattataattttgttagataatagctttatcagccataaagtaatcaataaaaataccagtttcctggagatggatgctttagtgtgtttggggtgaaaatggcgatgaatggcgagttgctttaaacaaatcatggtacaccaaagttttagttgtggctttgtgtaaggaatgtgatgggcacttattcctgcaacacgagaatactatgatttacaagtccgtagtacttttaagaaatgagagaaacagacctaggtggggagggtacctgtcccaccccaccctctttaaagtatcttatctagaaaaggctttgtgaaaaaaaaagtcccgggtctctctcaataacagccctgagcgcagctgttgaagctttctcaggttaatgatttctttcttggatcttaaagtttctttctcttcctttatttttggcattttgcccgttgcagggcctggcaaatcagaaagccacatagaaaattaaatgaaagctattgctaagttccagtctctacaccagtggagttttcaaactcctcttcagcatatttgacgcccaatgagtagtacattaattcctagtcctaaaatcattctgtgaactttctcccaggaatttttgctcagtttgcaattaaaacaactttttttcttctctttttaatggcagaggcggggtctcactatgttgcccaggatggtctccagctcctggcctcaaacaatcctcctgccttggcctcccaaagtgctgggattacaggcgtgagccaccgcgcccagccacagtttgcaattcttaaggcaagggtgacaataggggtcaggggtctgacaggagacaggatttctgtggaaaactgcaccaagggccttctcgccatgtcccgtagtttgaaggtttacaaaggactgcacattttacatgagtcatctcaacgaacgctctcctcaccgcattaacagtccacgcggttacgagtcccattttactcacggggacaccgaatctgtaagaagcctggtcgcttgtcccagcaaaacgagccacggggctcagcggccctaacttttaggctgtagggtcctcgccgaccaccccgccaaaatgtcaggcctcggggcccttgcacccccaccgcagggacacggatcgaaagggtcgcagcaacgcctcccccgcacccaggagcgttttccaggcctttgcaccaacctcgttggctaagccccctgcccggcggcggcccggctgggaggaggtgctttcgggaggcggggccgcggcccggggatcctctcgcgcccgcgggctccaatcgctgctcctcacgcaatcctaaacggttcccgggcgaaccggggcccgcgcgcgccaaggccgccgagaccctcaggggctgcggccctggtcccgcgggacctgtgggggcctgggcggcggcgcccccgacccagccagcggacgggccggggggggaaccgggaggtcccggggggcgtccacgggggtgtccccgggggtctccggaaggcgccggcggaggctcccgcgctgcgcttgaaaatcgcgcgcggccccgcggccagcctgggtaggggcaaggcgcagccaatgggaagggtcggaggcatggcacagccaatgggaagggccggggcaccaaagccaatgggaagggccgggagcgcgcggcgcgggagatttaaaggctgctggagtgagggrtcgccsgtgcaccctgtcccagccgtcctgtcytggctgctcgctctgcttcgctgcgcckccactatgctctccctccgtgtcccgctcgcgcccatcacggacccgcagcagctgcagctctcgccgctgaaggggctcagcttggtcgayaaggagaacacggtgagcccgcggggaggscgctgcgggcaggggagggaggcagggaaagcgaagccgctcctcactcacacgcgtctccccgcagccgccggccctgagcgggacccgcgtcctggccagcaagaccgcgaggaggatcttccaggagcccacggagccggtgagtggcgggcgtggggcagaggggccagggacggccttgggcgtcttggcgccaaagccgcattgtttcctcagctgttcacactcccgccccggctcctttcccgcctaggcggcccctccccagggctgcctcccgcgcccctcggcccatttcccggttcgggcgtgcgctcctctgctgcgacccacggagtgcgacrggacagccacgttttcacatcgggccccgtgaaattgccgccaatggaaaggacttggtccagaaaaacgttagtttcatatggttcgcccggtacttaaatgttttattttctcccccaacagaaaactaaagcagctgcccccggcgtggaggatgagccgctgctgagagaaaacccccgccgctttgtcatcttccccatcgagtaccatgatatctggcagatgtataagaaggcagaggcttccttttggaccgccgaggaggtaatcggaggaccccagaagacccctgcaggggtgaccgtcacgcctcagacataaatgcacttggaggttcccgttggcaaggggggctaactgtggggcatagtaagtggtgccagcatacttaaagtttgagtgctcagtgtgagtcctgtaggctttactctcttccttttatgctaamattgtgacttccgaacctcaggtggacctctcsaaggacattcagcactgggaatccctgaaacccgaggagagatattttatatcccatgttctggctttctttgcagcaagcgatggcatagtaaatgaaaacttggtgagtttccaaaacatctttcattcatttgacgttgacgatctgaggtcgaactagttcgctttcctcgtcttgtacgtttttccatgctgagtgcatctgtgtgtgtaagctgggttttatattacatggcatttcctgttttgtaacactttgcagttctttcttatggtattttcccgactctagagaagctgagacaatattaagtggtagcaatgtgatgactctttgtggccaccacatctgccccctcttttttttttttttttgagacagagtctcactctggcccaggctggagtgcagtggcgtgatcttggctcactgcaacctccgcctcctgggttcaagcgattccccaacctcagcctcatgagtacctgggattacagacgtgcgccaccatgcctagctaatatctgtatttttagtagagacagggttttaccatgttggccaggctggtctcgaactgctgacctcaggtgatccacccaccttggcctcccaaagtgttgggattacaggcgtgagccaccacgcccggctctgctccctcctttttgtggctttgctgttttaataataatttggttgtatctcttattgcgaatggatctttcttgacataaattaattaggaaatcgagcgctcacaaatcctattttatatgtatctatttcctgatatgtaagttgagcatatgacataaaatatcaaagaaytgtgacaaattggatgaaatatatatagaaataaaccttataatggtacaaagagtgcgatgctgccagtatccgttgacagttgctgctgttggttttttctcaagcttaactttgatgtgttttgccactaggtggagcgatttagccaagaagttcagattacagaagcccgctgtttctatggcttccaaattgccatggaaaacatacattctgaaatgtatagtcttcttattgacacttacataaaagatcccaaagaaaggtgagtattcaagtggtatgccaagatttttaggactcactaattgttgatttattacacatttttagttcacctagggataaaaatgactccagaatgactaagacagtcataggcattcccagcacccgtggtcatgtctgctcttagcaaggggcctaaatgcactttattattcacttagagttgtgaaggtactccttttaaagttggatgtctaccaatgtaaaaccttcttttgaaaaaattcctagatgttgggtaagacaaactaaaacctatgtctgaccatctttgctcatttggtaaagttgttgagaagctagaatgtggggctgcagtgggatggacggggaggacttgcctcctaagaagcctgcagtatagtataggcaaataagacttagtaggagttacataaggcagaggcagcagtgaaccctgagactgatttaggcatgcaggagtttggctgaataaaggtagcttaaggtctgttttgttttggagattggaggtggggggattagaaatgggctgctggagtagtctagatacaaaggtcagctttagggtggcgcgcggtggttctcgcctgtaatcccagcactttgggaggctgaagcgggcggacaatgaggtcaggagatcgagaccatcctggctaacacggtgaaaccccgtctctactaaaaataaaaaaagtggtggcgggcgcctgtagtcccagctgcttgggaggctgagacaggagaatggcgtgaacccgggaggcggagcttgcgctccagcctgggtgacagagcaagactccgtctcaaaaagcaaaacmaarcaaaaaaaacaaaggtcagctttggggaccagaaccttgtatggagtggaagtggtgaagctgcaacctaaagtagccgttgtagactttgaagtacatgaagaggaaaagtggtaacttgaaaggactgaggaaacattgggagtaaagagatttgaacatgtttataggtggaaattgagaaaagaaggcaaagattaggggtacgatcgggggcaaatgcccagaaggggaacaggaaggtctgctggggaagcctcaaaaacaagggagaggcagacccaggtctcagagagagggacagtgagatggaaagaatgaacgacagctgggcatggtagtctgagctagtagtcccagctacttggcaggctgaggcagaaggatggcttgagccctggagtttggttttaccgtgagctgtgatcatctcgctgcactctagcctgggcaacagagtgagaccctcatctctttaaaaaaaaaaaaaaaaaaaaaaaaaaagggtctggtgcccttggcttcagaacacaaagtcatctgggtaggaacagtctgggaaatgagtagcctctcaaggtgggcaccagaataaagggaggcagaggagggtggtaagggagatccagttaactgtagtacccatggatttgctttcctgacctgggatcgacagtgtagcacagagtcctagtaggaagcaatcttagtttattggtttaattattttatgatatagatgtggcaactgaggccaaataatgcacctaatcatagtctgataatagcacagcagttaggattttatggttcttcaaatttaaattctatgattcttcaaattgaacaatgatctggacttgaaataattttaaaggcaacaaatgtccctgctgtactggactatgttttactgtctgtagaccctgaagctcaatatgaactacagaatacccaaacttgtattaatgtaaatcaagtgttgaggtttttaaaagaacactggagggaaaaactgaccagtaaaaataaaacatttcggtgtgagttcttcctttaggaagaggattggcaaatacttgaatttggcctttgtcccagagctcttatctagcagttggtaatcggaggtcttttactgtaatgcttcaattgctgataccgtatgtgcctactagggaatttctcttcaatgccattgaaacgatgccttgtgtcaagaagaaggcagactgggccttgcgctggattggggacaaagaggctacctatggtaaggagacccttgcccctacttaaacctgagcttcattttccaagtaatgttactggatttttggcccttgaataccaactcactagaatcatgttggtgttaactcctaaayaggtgaacgtgttgtagcctttgctgcagtggaaggcattttcttttccggttcttttgcgtcgatattctggctcaagaaacgaggactgatgcctggcctcacattttctaatgaacttattagcagagatgaggtgagtctaagtcaaataatagggtgacctaaaccccaaacacaactcgggcatgctcttgtgttcactgacggggacctgagatgctagatggcatatatccacatttaatgtgtgagttcaaccatacacatacttgacaaaagaaggaaatactttcatttactgaaactgttttacttgcattctcaatatattgtaatacatttgtacatatgtattcccctataggctttgaatgcataaaactacaagttctttgttttttgaggtgacggaatcttgctctgtcgttccaggctggagtgcaatggcgtgatcttggctcactgcaacctctgcctcctaggttcaagtgattctcccgcctcagcctcccaagtagctgggattgtaggtgcctgccaccatgcccagctaattttcgtctttttatacagacggggtttcaccatgtttgccagactggggttgaactcctgacctcaggtgatcaggtgatccacccgcctcggcctcccagagtgctgggattataggcatgagccaccatgcccagccaaaactacaagttattgatgggattgggattttaagggatgttttattatttttgcctggtattaatatgttatccctttttccgtaaaaatgttcatagtagagccaggagcggtggctcatgcctgtaatcccagcactttggtaggccgaggcgggtggatcatgaggtcaggagattgagaccatcctggctaacacggtgaaaccccatctctactaaaattacaacaaaattagccgggtatggtggacgtgcctattgtcccagctacttgagaggctgacgtaggagaatcgcctgaaacctggaaagtggaaggtttgcagtggagtccgagatcacaacacactgcactccagcctgggtgacagtccccccgaaaaagaatgttcatagtagccattatgtttctcctgtttgatctagaaattgcccctctacttcaatattaataagcatttcaatgaaatgagtatacattttggtctagtgtatgtctttgattaagtcacatttgaaaagccaggagcatgaactccatcttacttggagcccagtgggcaaatcaaatatggttaccttgtaggagggccttccttactggattgggagataagctgtgaagcttgatgtttaatgcagtaacttgcaaacttgatttacttgaaattgcatacaaatttcctgagcatctaaaaactagccttattactgagctttgcctttcctgctgggagtagtggcaaaattagcactcatggctgtagaaagatcactgagtgaagctctgactcctcctttgccaacacacagcagagcaagaaatacaccttgcctgtcttcatctaggtggcaactttgagggtcttgaatgggactgagcttgccttggtrgtgacatcagcagagaagtcagtagttraagtcatcttccctttgagagttcaagtgctctcagtatggctgagcatgttggataaggagaatgcagaaaaggacaaagtaatttcatattccatgttaatgacagaagtcttctggctttagtgatcttgaacttttttttctagggtttacactgtgattttgcttgcctgatgttcaaacacctggtacacaaaccatcggaggagagagtaagagaaataattatcaatgctgttcggatagaacaggtaaagtgggtgatgaaatgggtcactcaagcttgctagaaaatgcctgtgctttagttgtattcagaagctgtattttggttcctaggagttcctcactgaggccttgcctgtgaagctcattgggatgaattgcactctaatgaagcaatacattgagtttgtggcagacagacttatgctggaactgggttttagcaaggtaaagtattgtttacatagccttttgcttgttttgaagctggtgctctgtatttatatcttgatgtgaaccttttcaggttttcagagtagagaacccatttgactttatggagaatatttcactggaaggaaagactaacttctttgagaagagagtaggcgagtatcagaggatgggagtgatgtcaagtccaacakagaattcttttaccttggatgctgacttctaaatgaactgaagatgtgcccttacttggctgattttttttttccatctcataagaaaaatcagctgaagtgttaccaactagccacaccatgaattgtccgtaatgttcattaacagcatctttaaaactgtgtagctacctcacaaccagtcctgtctgtttatagtgctggtagtatcaccttttgccagaaggcctggctggctgtgacttaccatagcagtgacaatggcagtcttggctttaaagtgaggggtgaccctttagtgagcttagcacagcgggattaaacagtcctttaaccagcacagccagttaaaagatgcagcctcactgcttcaacgcagattttaatgtttacttaaatataaacctggcactttacaaacaaataaacattgtttgtactcacaaggcgataatagcttgatttatttggtttctacaccaaatacattctcctgaccactaatgggagccaattcacaattcactaagtgactaaagtaagttaaacttgtgtagactaagcatgtaatttttaagttttattttaatgaattaaaatatttgttaaccaactttaaagtcagtcctgtgtatacctagatattagtcagttggtgccagatagaagacaggttgtgtttttatcctgtggcttgtgtagtgtcctgggattctctgccccctctgagtagagtgttgtgggataaaggaatctctcagggcaaggagcttcttaagttaaatcactagaaatttaggggtgatctgggccttcatatgtgtgagaagccgtttcattttatttctcactgtattttcctcaacgtctggttgatgagaaaaaattcttgaagagttttcatatgtgggagctaaggtagtattgtaaaatttcaagtcatccttaaacaaaatgatccacctaagatcttgcccctgttaagtggtgaaatcaactagaggtggttcctacaagttgttcattctagttttgtttggtgtaagtaggttgtgtgagttaattcatttatatttactatgtctgttaaatcagaaattttttattatctatgttcttctagattttacctgtagttcatacttcagtcacccagtgtcttattctggcattgtctaaatctgagcattgtctagggggatcttaaactttagtaggaaaccatgagctgttaatacagtttccattcaaatattaatttcagaatgaaacataatttttttttttttttttgagatggagtctcgctctgttgcccaggctggagtgcagtggcgcgattttggctcactgtaacctccatctcctgggttcaagcaattctcctgtctcagcctccctagtagctgggactgcaggtatgtgctaccacacctggctaatttttgtatttttagtagagatggagtttcaccatattggtcaggctggtcttgaactcctgacctcaggtgatccacccacctcggcctcccaaagtgctgggattgcaggcgtgataaacaaatattcttaatagggctactttgaattaatctgcctttatgtttgggagaagaaagctgagacattgcatgaaagatgatgagagataaatgttgatcttttggccccatttgttaattgtattcagtatttgaacgtcgtcctgtttrttgttagttttcttcatcatttattgtatagacaatttttaaatctctgtaatatgatacattttcctatcttttaagttattgttacctaaagttaatccagattatatggtccttatatgtgtacaacattaaaatgaaaggctttgtcttgcattgtgaggtacaggcggaagttggaatcaggttttaggattctgtctctcattagctgaataatgtgaggattaacttctgccagctcagaccatttcctaatcagttgaaagggaaacaagtatttcagtctcaaaattgaataatgcacaagtcttaagtgattaaaataaaactgttcttatgtcagtttcttgattggtaaaatttgcattttaattcaggaagagaaatattttttggccaggcatggctgtaatcccagcactttgggagaccaaggtaggcagatcacctgagctcaggagttcgagatcagcctggccaacatggtgacaccccatctctactaaaaatacaaaaattagcctggcatggtggcacacgcctgtaatcccagctactcgtgaggctgaggcaggagaatcacttgaacccgggaggcagaggttgcagtgagctgagattgcaccgctgcactccagcctgggcagcagagtgagactgtctgaaaaaaaaaggtgttttttgtaaaggctaacgaattcatttgctttccactggttctgggcaagagacttgccttgtgcctattggcacaaggtgtataggagacaggtacacccgaaaggtggtgcccaaaaatactaactgccatactgcacgtggggtttgtgaagccggggctgagttaacttctcaaccgtgggggagccactcctggggctcttttcccgtttgcaaaacaggtggggctagaggtcttcccagctggagttttgctctgctgtcccacatctgacctgtgtggactccagcacaggtttggattggtccctgtgtctataaaggccctttcctgactcggaatcccacccactttgataaagccttttagaattcatgacacccatccccaaacgaaccaatcattccttgtacctcacgccactgccattcagttcattgaacaaacagcagctctcttgtcaggtgacgttttctacctgcattttaattcaggaagatggggcgctragccagaggggaggcccctccctctggagcttgggtttactcctagagaggaaaactgatagatgagtagatctgaattgttgggcagtggtgggggcagcagagaattctaaggtggatgggagtgattgggagaggtctcatggggggagatgatgtttccttagtggaggggactgggactagtgtctgaggttgtgctgcttccgactcctgtgttctcatgaagatttcttcccgtgctgctctgtaagagaaagttgtctttgagggcacagatttytatctgtctttatatttataagcataaggcctccaaggatcaggtatttaagtgactggtacatggggaaataaactaattggaactgaagtattttggggtggatggtatcttgggtaaaagtgtgatctgtgtcccagaggaacctagtagagagctttgcctttacacctaaaagtgttcagttaaggtcatttgatttgtaatgtcaggttggcgctgggcctattgcacaagttcggggcagccaggcgtcaagaagatgaccaactactaggacagcctccctgtgggtggcctgcagtctgttctgctccccccggccccatgccagctgccatgctctatagaacatgtctcccatgctgcccgaggagggcctgcagagagttgagtggtcaggctgctgagtcaattgccctgggtactcattagatacatcctccccggcctcacccccagacctactgaatcagtctgggggtaaaccagggaccctgtaatcttaatgggagatctcagacacttgagatcgggtgggatagactcctgacataaagttcaaaccagtggacgtcagtcctgggtgtgaattataatcacctgggggcttttaaaagctactaaagtctggatctcacttggggaaaaggcagcccygctgagcttcagcatgttccagatgtgttttctggtgtgttctagacatgctgtgtaagagttacacttcattgtgtgtgcacattcggggccctgcccagctgcagtggccaggcctggctgctaaaagcagacctaccaaaacctcccttcacctggtactgctgtggcctctgacctgaggactttgtcatgcaaaggaggaaccagatgggtgttctgtcacctggccagggagctaactggctgtattttgaggatcagtggcyctgccagtgtcggtctggagatcctgataatggtttaactcctcttagcaagacaggcacaggcccagcccctcatccgtgagtggctgcagttggactgcgtggcctggcctcttccagcagtccctgagtrtagaggggctaccctcctggtgtctgtctggacacagaagggaacacatcagtggtgtctccctgccattccctggagggaatatgacatcaggattttttttttttttttttttaatgatgagaatagctgaacccattgctgcttaaggttcagtagtcatgttcaccttagccttggctctagagactggagtggctccagcaaggtggtggactaaggaaccgaactcctcttgcttcaaacacctgcccatgataaatagcacagcaaaaagttaaataggtgggccgggcatggtggctcgcgcctgtaatcccagcactttgggaggctgaggtgggcggatcacctgaggtcaggagtttgagaccagcctggccaacatggtgagaccccatctctactaaaaatacaaaatttagccgggtgtggtggcccatgtctgtaatcccattactccggaggctgaggcaggagaatcacttgaacctgggaggcagaggttgtagtgagctgagattgcactccagcctgggcgacaagagtgaaactccatctcaaaaaaaaaaaaaaaaaaaaaagttaaatagatgatcacctcctgggaaaggagaatgacctcttttgggaacaaagaaagtgaccatggaggccccggaacttgtagcagctctccgagtggttgttagtcccttagagaaattaaatgggcaggggctgacgtgcaattggatttggagggagaggttaatctaaaccaggggaggagttgggaccaaaaccgtggcataaagctaggggccccagtgacacgggaactagacaaaaatcccattggcacagtggggaagataagggttttaatccttctggattcttaaaaaccttcacataaatttgtggtctaggaactactcaaagataaattaatccccagtattgatccctagcctggttgcacaggattcccacaggtggggttcacacttcttaattagaaactcagacaacacaacagataaaaggaaaaaacacggtatggtgaagaaatagattttcggaatcaggtagaatgggatacagcataactactagagttcaggctcttagagctatttcaacacagcttagtaagattagacatagctgaagagtggacttgtgagttggaagggatgtatctaagggaattattctaaagaagatgaaagaaagcatggagagagtggacaggcagtgtttgaggaggtaaagactggtgactttccagaatggactcatccttgagatcaggaagtccccaaggaatcacacatgagaagcaaacattcattcctagtctcatttgaatgaagctgcagaacatgaacaaaaagaacaatcattaaacgaatgtttcaacgtaagccaaaagattatgaaatcatatcttcaatgctgagggaatcattggacaaaattattattcagaaagaagatacattttcatgccaaggttttaccattcacatccccaagccaaaataattcctagcgaattgagccaaaagaggatggtgatgagcagagaaattggttggtccacagtgaatcaatagaatcaaaaggaagctgggcatcatggtgcatgcctgtgatcccagctactcacgaggctgaggtgggaggatcacttgagtccagcctgagcaacagtgagaccgaactcaaacaacaaatggaactagaataatggacgctgcagagggataaagaataccaaggtctttatactattaggccttggaggtatatggtttaaagtttaaggatgaccactggaggcatagcaccagaagatttaacttcaacttccaaagtaggggccctggtgggggaggggaggggcatgcgtgcgggtgtgggatgtgttgcagaggagttaaagcttgacgggcttagaaggtggaaagggtcgagatgcagcagagaacaagtcaatggaaagcacaaaataggatggtagaamtaaaagcacagtagatgtaaataaacttaagagttaaaactcttaaggctcaaattctagctataaaygattgccaaactaaacacttaagagtgtaaacaattactataggaaaaagactttaaagcaaaaagcccattagagatagaagttattggcctaaagaatgattgttcctctgggaaaacacgatggtgataactgcaccaagcaacatggtctctgcagtgtttgggtgtgacttcatccctgcctccccagggactgatgagtcctgggctcaggctcagagtgatgaagcgggttattgtcttggtgctgccatattctcttagtcatgtgttttttttttattcattgtcctctggccctacacacagtccctaggtttgcttttatgccaattgcagagaatctccatggctctactggcaattgcttgagagctcacattcctaccggatgtgagaagatgttccatcttcctgtgtccgggcagcaccaccaaagtgcggggctggggcaagcctggatggggtagggtgtggtcaaatgactgctcacaagtgaatggtttggattatgcaacgtggccacactggaatctcaataaagggcagaggggttgaggcccagatgataccaggtgaaaagacaagacaggtttgcagcatgtgctgcgatggagatgctggggcctcctagtctggggcaggctgagccttcctgggtgtgggtgggcctccactgtgcagggtgctgtccttccaagctttggcaagatggaatctgtgttgggtgtgggtgtggccttgaaaaggcacgctgtcatctagaggccactgcttgaccccctgttgccctttatcagaggtgcgggtggctagtgcctgcaatgtcaacactgggaggccaaggggggaatccctggcttgaggccaggatttcaagaccagcctaggcaatataaggagaccctatctctatagaaaaatttttaaaaattagccatgtgtggtggcatgcatctgtagtcccggctactcaagaggctgaggcagaaggatcactggaacccaggaggttgaggctgcagtgagccatgcttgcaccactgcactctagcctgggcaacagagcaagacccactcttaaaaacaaataccctggccatagcccctgggagtctagtctccatgcaaccaggaccccatgagccacactttaaggcttttactttgggggtgaggggtgggtagaagggaggccaaaggttggggctgttgaacccatgagggtagacctgtccaagagtgaggccctgactgaggaaaggagagctgatctacagagaggctgaagcctcatcatattcattttctgagtccagtgaattctgaagtccacatcccagatgtttcacagaagtaaatcaatacattcctgataggataaggttgattttcctgccacrtgcagtcagttccaccccaacagaattcacttgatctgcacagccaccgtggggcagagatgattgcccccattttacagatatggccgggaggctcagggaggccatgtgcctcacagaggactggtctgcacaaagaccagtgggtgaccagaacttgcacctgtctacattcgtcccctcactgcatgtgcccctcttgatgggagagcaggcacctgccagccccatgctggtccgcccaaggaatggctcctaaaaccaccagctggccagtgagtcatatggaagggtttggtcatgcctacactcgtcctgcccttcctccctggtcattacactgtggtagtgggggagggtgacctctgctttgccccttgtcacctggggcaaagggtgggatcctgtccatataggaccaggggctctcttactgtctgcacttcactagtgggggccactttcagtttgcttctacctgggacgctctgggtactatgctagaaaggtagcttatggccacaaagtctagggacaggtactcacatgcccaaatggagcctcacgcttaggaatggggtgagtgggaagcagtagcttcccttggaggtggaaaacggggagatttcagtttccagaaagccctggggcagcagctgcctgggtgaggtcttccctgagcctctgagtcttccctctcctctacttcaggggggtctagcctctcctccagaaggggtgccaggacgagatgggaaggaatttgctttggaaggctgggaacaggtcctgcagctgctctggccttcctctggactgatgtgggtcccaatgttactgaagggcacttccaggtcctgttagtgcaggggccgctgcagcaaagggctgactttaggctccctctttgttttgttttgtttttgagatggagtcttgctgcgacccccaggctggagtgcagtgacgtgatctcggctcactgcaacctctgcctcccaggttcaagtgattttcatgcctcagcctcctgagcagctggaattacaggctcctgccatcatgcccggctaatttttttttttttttttgagatggagtttctcccttgttgcccaggttggagtgcaatggcgcaatctcagctcaccacaatctctgcctcccgggttcaagtgattctcctgcctcagcctcctgagtagctgggattacgggcacatgccaccatgccctgttaattttgtatttttagtagagacggggtttctgcatgttggtcaggctggtctcgaactcctgacctcaggtgatccgcctgccttggcctcccaaagtgctgggattacaaccattagccactgtgcctggccaatttttgtattttttagtagagactgggtttcaccatgttggttgggctggtctcgaactcctgacctcaagtgatctgcccatattggcctccccgtgttgggattacaggtgtgagccactgcacccggcctttcacctcccttttgaaaaactgactgctcttggagccagttctcactgcttatgaaacggttggggacatcacatcactgctctcagcctcagtttccacatcgtgaactaggatttgtaatccaggcccaacaggcttgtgagaatttagatgagtgaagtgctttcataagcaactttttcacgtgccattcagtttgcccatctaaagggtatggctcttggccaggcgtggtggctcacgcctgtaatcccaacactttgggaggccaaggtgggcggatcatttgaggtcaggagtttgagaccagcctggccaacatggtgaaaccccatctctactaagaatacaaaaattagccggacgtggtgatgggtgcctgtaatcccagctacttgggagactgaggcaggagaattgcttgagcccgggaggtggcggttgtagtgagtagaggttgcgccattgcactccagcctgggtgacagagtgagactgactcaaaaaaaataaagggtgtggttcagtggtctagtatatccacaggtatgggcagtcatctccacagttgaacatcttgcccaccccaaaaagaaagctcgtgtcccttagtcactccctgtctcccgtctgccgcctcagccctgggtagccactgagccactttctctggtttgatctggcacttctaaagtagaagttattattggcaaaggcactggctcatatttctaagagatcatttagaatgccaggggcagcagaggatgggtcttccttgcagagagaagtttgatttacatttcagaaggatctttcctggcattttaggccacttggcattaaaaagagacttgtggggcattgtctggaaggggacttttgccactgtgagctggtgacaagctgactagaagtgggggtgtcaaaggctggaatcaccacattgctgggggcggatgaggggacagttagtggatttggggtctgttctttctcatctctcttggtgacccttcccctccatcaggaaatgaggtgctgagccatctctatggtcccagccttcggttttgctctgtttggggcgtttcagagagctggactgtcccaggccccttgggaattggaagcaagtcctagaactttctggaacacagagagtggtctgttgggccttcctttgcttcctcagttcccaccctcctcctccactcctttctaggactttccttcctccacccctggatcctccaatgttaacggagcaggggtcaggaaatagcccgtgggtgggatctggttcaccgcctggttttatacataccaggagctaggaatatgttttaaaaatcaaaagaatggctgggcgtggtgtctcatgcctgtaatcccagcactttgggaggctgaggcgggtggatcaagaggtcaggagatcgagaccatcctggctaacacagagaaagcccctctctactaaaaatacagaaattagctgggcgtggtggcgggcacctgtagtcccagctacttgggaggctgaggcaggaaagtggcgtgaatccgggaggcggaggttgcagtgagccgagattgcaccactgcactccagcctgggcgacagagcaagactctgtctctaaaaaagaaaagaaaaaaaaatcaaaagaacatttcgtgttgcatgaagattctatgaaattcaaatttcagggcccataaatagcttcgttggggcgcagccacacttgtttgtttacgtatggtctgtggctgccttcaccatggataagagactggaatagctgctgtggtctgtattttctatctttacagaaaatgcttgatgagctctgagtaaggcctgaccatgttcctgagagctccgtagtggacctgatgggaaagtagtggatggcattggtggtggctgagccagcagggtgcctgctcagagagccggttattaatggagtgctaaccagtcactctagatgagaaatacacagatcacatttaaacacagggaaagctgtttacaggaaaatgataaaatagcagaacgtaaagttatgggtatactgtgcttacgttgtcataaaaatgtgtacatatggatagagaggaaggtgtcccacgtggagaaatgaaaaggtgccttagggggcaggttgggagtaagagcagtttttctttctattctatttttctgtttaaattttcctataatgttcttataataagtgttgatgagcactcgcagccaccaggggaagcagctacccaggcagaaggctattctgggtctcaggtgggctttagggagagggaccctgagctctggaccagggttaggaggaggtgccccgggcatgtggaggctggcagccctcgctcctgtgaactggcggctggggctgcatctcgcccacgtcgctgtcatgtgcggggcccacgttgtgagttgtgtgtctgctcactattgtgctgtagcctctggaagttgcttaggagcttgggatttcgtggagaggtgggagttagttgcttctgtccaaagaggtcggccaatgggggccattctgagttcagaaaccgctggcttggagcccgatggacccagccaggcccagctctgctgttgaccagttatgtgctctgggactcaggttaagtctgtgggtggcaaaactggcacctcccatcccatcttccctccatcccctccccccacccccatgtctcactctgagccttagggagttggtgccacctagctacgctcactgacacgcatctcatgctgtgctaggatgttgtccccatgttagtgtgccctctccagggagactgccagccctcgtgggtgtgcatcttctgcttctgcatccttggtcactgccagcagaggtctgggcacatggtggtggacagtggctattaactgtggttgtgctggaatggaggaggcctggtgtctggtcttggagtcaagaatgcatgtgcttaaggattccaagatcacacggaggagggtatgattagctctgggaagcggggaggcaggaaggagggcaagagacctcgacctgttcttgggaaggaaagagcaggtgagggtggggtactgttccaagcacgggaaacagagccccaggaggtggccatggccctggggctggggctggggctgggaggcggttgctccagcatgcagtcactgagccctcctgtatgcactgctgcaggtgctgggagaccgtgaagtgcaaagcagatggagtccaggccctcggggagacagcacgccagtgagggagatggagaccaatcacccacccagtgtgcggtaagtcagacggtgacaagctctgaagacaaggaaagcagggaggaaggggcgggctatgccccytgctctttcatgtggggagccagagggagccagaggatgtggggatcgaccacgtggttaggggaggaaagcatgtttcaggcggagggtgggcaagcgcaaaggccctgtggcaggcgcgtctgtgagtggtcagagcagagtgaggggtgggagatggggctgggtcagtggagtgggtgtgtacatgcaggtctgcagacccaggtaaagagtctggatttcatttctaaggggatgagaagctcgggaaggtctgaccagccttacgtcttgaaagggaatcccctgcttctgcgtgtcaggtgttactcggggtgcgccagtggaagcgggaggcagttgcagctttcaggtgagaaatgatggcaactcgcacggtgggggaagaggggccactgtggaggtggcttgcggggcctgtcatctgctgtttcctagctcagtgtacagggcccccacgcacccctgccaggtcggaaatccaggtactgccagcctctgccgttctacgtgtggccaggcgggggagccttcgccctcccatgtccctcaccccatgccccagacagcacggtcctgcgatccccctcccattccagtgctcagtatagccgtatccctgcagggctcaggcccccaccatggccagatcccccaccccaccttcaccctccgccagtccattgcacacatagcatctggaatggtctcgggcagcacctcagacgatgtggctgtgttgcatgagcccctcccctcaccgcagctctcggccctgcctgagcccaggtgcccgcgggctccccgctcacctctgccttgaaccttcctgagtctgagcttcttttttgttttgttttgtttggttttgagacagagtcttgctctgtcacccaggctgcagtgcagtggcgcgatctcgactcactacaagctctgcctcctgggttcatgccgttctccggcctcagcctcccrtgtagctgggactacaggcgcccaccacctcgcctggctaattttttgtatttttagtagagacagagtttcaccgtgttagccaggatggtcttgatctcctgacctcgtgatctgcctgccttggcctcccaaagggccgggattacaggcgtgagccaccatgcctggcctgagcctgagcttcttaaacaccacatcctctagcctcctgccttcacacaggctgttcccttagcctggactttgtccccacccacccgctcctgatctttcaggtctcaacttacaggtcactttccctgggaacctcctcagacccagtgaggccagattaggggcctcctcagagccctcatggccccaagtgtttaccacttcgctttttcatactatccaaagtgcacagaatcgtacacttttctgatgccttgttccagctgagtgccctgagggcagggatggggtccgtgtcctccggtgtgctcagccagcacctggccaggcactctcagtgttgttgaatgaatgagcgagtgagtgacccgcaggggaagctgctgtgtctgacacggtaacgtgcaggttgcactgggggggcctggttgagatcatgactggagtccctggcccccagagtgggagtcatcagtggggctcgctacctctgcacaatttttttttttctttgagacggagtcttgctctgtcgccaggtggtacagtggtacgatcttggctcactgcaacctccgcctcctgggttcaagcaattctcctgcctcagcctctcgagtagctgggactacaggtgtgcaccaccgtgtccagctaatttttgtatttgtagtagagacggggtttcaccatgttggccaggatggtctcgatcccttgatcttgtgatccgcccgccttggcctcccaaagtgctgggattacaggcgtgagccaccacacccggcccctctgcccactttcttccccttcctcctctcccgtctccaccaaggctgtctctggagtggctgtggatctgacagaatgcatgtccgctctgccatcactattcacgcacagcgcctgttggggactctcctgtaacccaagggggtagcggaaggatggagcttcaggccttgagggccaggaaatgaatgtggaagactgaatcctcaggggaccccarctctgggccgggtctggggctctgttttgaggacggggagtgggaggaggtggcagcaggagccggcgtctgaggcatctcctcacactcttccaaggtcagagacgaggtctcagatacgcttgctaatgcacgatttatttctttttcaatttcctttggaacctgtgctgtgcagatgttcacatgatgtggtggggaagtgagttttataaaactcttggcagagtaccattcggcatccctgtggttctagagatttctggggcctyggggctgtagcaccagctgcagacagctgcctgccttcttacagtgctcagcttttgggtccagcagctttctcagtcccaaacacrtgtgacctcacgattctggcccttccatgatccgcaacaaactgttctggtgtgtaggtggaattcctatttttaatagccaagttgttgagaaattgtagggcttctacttcctttygaacggaagggctccggagatatttatatctttgcttctatagaatctaggaggttgtctttacccagggagggtcagcatgtggagagggtcacctgggagaggccccggtgtcagcctgcacttgccgtcagtaaatggtacgacattgagcaccaaggagctcagccagcccctcgagggaagtcctagctgcccactgggggaagggcggggaggcatgaaaacaatgaccccactggctggtgggggtgaccgtgttatgcaaagtgtacaccatgtagcatgagcaccgggccgggagcccccaaggctgctggggaatcagggagacaccaaagaggaggtggcctttcccttgaagggtaagggatctgtaggagtctgtgggagagtggaagctgcgggagggraaggagggagggaaggaggcctggagagaggagggaggctcttgcattccaggcaggtatgggagctcctggcagagtttgcagtacccagtggctcagtgtggttggagttggctgtgggccaggtgggtgggtagacaggggccaggtctggaggggtttttagtgctgtgctgaggggtctgaagtccatcccgaaagttgtaactggggagtggcacggtggtgagttagagccacgtcattcaaactttctcaaattcccatacatagagacctagtgtgcacactcgcagcccaggcttgtgagctgcagtcgcccttgccatgtgcagctcgttctggcgtgttctgttctgcttctattctggctcatttgttctatgaacaatgctgtttgcaatcctctacattggcttcctctctccctgaatatttttgatctgcagttagaacaacactggattggcaagagggagactgaggcgggaacccaggcagaggctgctgtgagtccagctaggatgagacgtgggtgccagacagtgggcctggggcagaccccagggactccgcagtgaagaccccacctcagtggtcctgggccccaggcctcaagagacttggggcagctccctaagcagcaagaggggtcctgtcatcgtgaggcgtgttgaggatccagaagctgtggtttcataactccgtcactgtgtggtgtctgaaagccatttcattaaatgtcacatggaatcaaaatagaaattacatctctgggacaaagcccattgagccaggagccagggattctgaattggaaccagaatagcctccgaagctgggactgtggatccaaggctgcccccaccccctgggtctcgctcacatctgcactccccagagggggcaggtggtcctggagcctagcctacctgccgagagtcagaggtggctgcaggggaaccatggcagccctccttctcacactcatcctgggcaccctgcaccagcagaagggtttacatgtacaatcacccatccctagccccttctgggagggaagcatatcttacggatggcgaccttgaggctcagggaggttaaggtgccagcctgagatcacacagccagtgagaggcagagacagggcttaaactccaracgatggctccagagccccctctcttttccatgccctgggctgcctctttccccagtgcaccttgctttttggaaccagatgaccaatgtggaaagacaygaactgattcaatcagagtgtatggagaagggacttagagaccctggtatttttaaagctccctggtaattctcatgtgcagctagggtggggcgcctctgctctgcggaatagggaaggggtgtaagtggccctgtgtctcccctctgtccccacctgccacctgctggtccatccattcagccgttgcacggacaggttgccttctgggggctgctagcccccttgcactgggcaacgctgtgtcccctctgtccctccccccagcgcatgctcctckctctgcccctgctgcaggtgggccatgcttggagggcgcaggagagctgagatggggtggggatggatcaggccttgagrgggtgcctggtaagccccgggaagggtagggaggaggaggagggagaggagagggcagtgcaagggcagcgacccccagccttgcccccgttttgagcacggggaaagtgtacacaggtagtgaggaaatgcctgcgtttgggtgcgtgttcatttctaatccattttcactttttgtgtattctttctatctactttttaaaggtttgtttcttttctaacttcctgttttagatgtatactttagtttctttatttatttttwtttatttttttgagatggagtctctgttgacaggctggagcgcagtggcgtgatcttggctcactgcaacctctgcctcccgggttcaagcgattctcctgcctcagcctcctgagtaactgggattacaggcgcgcactaccacgcccagctaatttttgcatttttagtagacatrgggtttcaccttgttggccaggatggwcttgatctctcgaccgcgtgatctgcccacctcggcctcccaaagtgctgggattacacgtgtgagccactgggcccggcttagtttctttatttaaagataagggtttttttttgttttgttttgtttttgagacagaatctcactctgttgcccaggcaggagtgcagtggcacagttgtagctcactgcaacctcaacctcctgggctcaagtgatcctcccacctcatctgagtatcagggactacaggcatgcactaccacacccagctaatttttgtattttttttgtagagacagggtttcgccctgttgcccaggcaacaagcaaatctgcccacctcagccttccaaaatgctgggattacaggcgtgagccaccacgcccggctagagataagtttctcaaactcctgggcttaagccatccacccaccttggccttccaaaatgttgagactacaggtgtgagcctttgcattcgccttgaattcctttttcaatagtatgtttcctactaaaaacacttatgaaaagtgtgtattttctcttaccccttctccttttttgccatctaattttagattatatttcttagtgtttgtctttaaaatgtacttatacctctatgctatctttttcttatttttgccccctcccccataagaaagataaagaaatcagagacttagaccaggtgtggtggttcccgcytgtaatcccagcactttgggaggctgaggcgggtggatcactcgaggtcaggagtttgagaccagcctggccaacatggtgaaaccctgtctctagtaaaaatacaaarttagccaggcgtagtggcaggcgcctgtaatcccagctactccagaggctgaggcaggagaattgcttgaacctgggaagtggaggttgccrtgagccaggatcatgccactgcactccagcctgggcaacagagtgagaccctgactcaaaaaaaaaaaaaaaaaaaaaaaaaaaaaagaaatcagatactaacaactctctccttctttcttttcttcccaatttttgtttaatgtatcatttctaaattcatggtttatatttatatatgtccttaatcctcactcacattgccctacaggtagattcattgctcactgtcagttctcttgctgaagttttcctatttttctcttgatttgctgaaattccttctccagtagtttaatcaaaagggactaaatgaaaaaaaaatattcagttrttgcaagttcaaaaaggtttytagtctttgtgtttgattgacagctttccagmatataaaattcttaggccacactttctttccttgagaacttcacagatgtcacttctgtctctagagttaaatgccactgtgggaaagtctgagtctaacttctattttgttaccctttatgaattgatgttttcacttgactgtccaaagtcttttttatttagctgtttccccctttcttttatattttwagtctagttactttcatagaaattaccttgttattgacagatttttgtcattttccccaagacatggtgtgccctttcagttygtagatttatcttcttttacttcaagaaaattttcttgaatgatatctttaaatatttatgttcccctatttgagttttctattctgggatatatgatgggtcctttgtagatcttccaaatctgtaattttctctgtaatctctttacaccgttcattttcatttccttttgctcactttcctcagtcttgttctcagtgtcttgattgtgtcttgagcaatatttgatgctcctctgcgcacctttccatttcatcatgactttgaagatrcgatgtttttccttctttctccagctctgtcagctccagtttcatgttccccctgagctctcatatctgttttgtgtgcttgctttctggagaggattgctgtattcattttttttttttttttcgagatggagtcttactctgttgctcaggctrgagtgcagtggtgggatctcagcttgctgcaacctctgcctcctgggatcaagcgattctcctacctcagcctcccaggtagctgggattacaggcttgcgccaccatgcccggctaattttggtatttttagtagagatggtgttttgccgtgttggctaggctggtctcgaactcctggcctcaggtgatctgcccgcytcagcctcccaaagtgctgggattgcaggtgtgagtcactgcgcccagccctgctttattaatttttgttgttgtttaattttcagcgaaaagtttgctggcaattttcatctgttctatgacaacatttttactagtgagttttcacttgccacttgtttttcctgttccttttctcgtttttattttttaattcttgcagtgtcttcctgtagatgctgcgctgtttgcttttttatttctcatctttgggcaaggtaagtttttcttcaaccatctatttgccagaggtttgtgtgggagaagaagcgaggactacacccagtgccatgtgcagttgtagggctgctcatgtgcagtctggtgattcctctttttgcctgcaagtgtggcttgtctgtgtgattgtctgtgtctgatctgctgcttctgcttcttggttccaagcttacctgtatctcacatgccactgtcatgagatcacaggccccactcctgctcatgcagataagggacgttggttggtgggcagtgtgatcccttctcactgcttcttcccaaacatctgtgtggtatttcctgcctgggcaaccctctgactcgtttctagtttgggtttcatctctcatctgtttccattggaaatggagtgtagctgggcgcagtggctcatgcctgtaatcccagcacttttggaggacgaggcgggtggattgcttgagcccaggagttcgagagcagtctggccaasaaggtgaaaccccatctctactaaaaacacaaaattagccgggcgtggtggtgcaagcctgtaatcccagcactttgggaggtcgaggcgggtggatcacgaggtcaggagatcgagaccatcctggctaacacggtgaaaccccatctctactaaaaatacaaaaaattagtcaggcacggtggcaggtgcttataatcccagctactggggaggctgaggcaggagaatcgcttgaatctgggaggtggaagttgcagtgagccgagatcacgccactgcactccaacctggcgacagagcgagactctgcctcaaaaaaaaaaaaaaaaagatggcgtttgcatcctgtttctctttctccttgttactrtgggatgatttttttttttcgactttattggtgtataattgacatacaataaactgcgcctattgaatgtgttattagtaagttctgacatatgtatacacccatgcagctgtcacaaccatcagccactagacatcctgtcaccctccacagcttcctcatgctgtttcttacctccactcccattttcagacaaactgactgctttccgtcgccagagtttacattttctagaatttcatgtaaatagaatcctacagtgtgttgtgtttttttttttttttttttgatgtggtttctctcacttagcatagtttttttttcttttgagaaagagttttgctcttgttgcctaggctagagtgcaatggcgcgatctcggctcactgcaacctccacctcctgggttcaagcgattctcctgcctcagcctcccaagtagctgggattacaggtgcctgctaccacgcccgactaattttttgtatttttagtagagatggggtttcaccatgttggccaggctggtctcaaacccctgacctcaggtgatccacccgccttggcctaccattgctggaattacaggcatgcgccaccacgcctggcctagcatagttattttgaagtccatcagttgtatataacartggttcattccttcttattgctgtgttgcatttcattgtatggctatgccatatttattcatccattcacctggtgatggacattggggctgtttccagcttttggctatgatgaatcaagttgctgccagtctscatgtagattttttttttttttttttgtagacagagtcttgctctgtygcccagactggagtgcagtggtgcgatcttggctcactacagcctctgcctccttggttcaagcgattctcctgcttcagcctcccaagtagctgggactacaggtgcccaccaacagcccagctaattttttttgtatttgtagtagagatggggtttcactatgttggccaggctggtcttgaactcctgacctcgtgatctgcttgcctyggcctccgaaagtgctgggatcacaggcgtgagccaccacacctggccacattgctgttgaggaggtgcataggagcagaatgactgggtcatatagtaggtttcactttttaagaagtgacccaactgctcttcaaagtgaccataccgctttacatgcctctgagcacataagagcaacacaagagtcccagttgcttcatacccttgccaacacttggcatggccaatcttttacattttagccctccgagtgggtgtctagtgtatatccttgtggttttcatgtacatttcaccaataacaactggcatgagcctttttaaatgtacttattttttatatgtacaccatctttggtgaattgttcaaatcctttgcccatttattttttattttttattttattttttttttgaggcagtgtcttgctctgtcactcaggttggagtactgtggccccatctcggctcactgcaagctccgcctcccaggttcatgcyattctcctgcctcagcctcccgagtagctgggactacaggcgcccgccaccacgcccagctaattttttgtatttttagtagagacaagctttcaccatgttagccaggatggtctcgatctcctgacctcgtgatccgcctgcctcggcctcctaaagtgctgggattgcaggtgtgagccaccaygcccggcccctttgcccatttaaaaatatcgagttgtgttatatattaggtttaacagctctttattctagttacacgtcttttatcagatatatgacttgtaaatattttctgtagtctgtgcccttctttttcattttattcagtgtcttttgaaaaagtaaaagacttaattttggtgaagtccaatttactgttgcttttttttcttttatagtttatgttttctgtgtactatttttttttttttttaattttttattttttgagtctcgctgtatcacccaggccrgagtgcagtggtgtgatcttggctcattgcagctttggcctcctgggctcaagcagttctcccacctcagcctcccaagtagctgggattacaggckcccgcaagcatgtgtggttaatttttgcatttttagtagataygcagtttcaccatgttggccaggctggtctcgaactcttcacctcaggtgatttgcctgcctcggcctcccaaagtgctgggattataggcaagagccaccacacctggcccctgtgtactattcttaagaaatctttccctgtggtgaaaagggaactcttggacatggttggtgggggtgtcgattggtacagccattatggaaagcagtatggaggtttctaaataaataaaaaatagaactaccatatgactgaccaaaggaaattatatcaccaccttgtaaagatagctgcactcctgtgttaattgcagcattattcacattagccacgatatggaaacaacctaggtgttgatgaatgaagggatcaaagggccgggtgtggtggctcatgcctgtaatcccagcactttgggaggccaaagtaggtgaatcacttgaggtcaggagtttgagaccagcctagccaacattgtgaaatcctgtctctaccaaaaatacaaaaatcagctgagtgtgtgctggcgcgcacctgtagtcccagctactcgggaggctgaggaaggagaatcacttgaatctaggaggcggaggttgcagtgagccaagatcatgccactgcactccagcctgggtgacagagtgaggccctgtctccaaaaaaagatcttttttgactctgcgatacaaagatgttttcttctaggtacttcatagtttttacatttaggtctctgctgccttgttagttaatttttgtgtatggtatgaggttggagattggggtttatttttctgttctctttgagccggtttctsggaggagagagaggacccaccagctcctctgctgtgtcaagctattatacaaggccccatataggcygaggtttctgtttttttcttctctaggaaaaaaagaggaaaagccatcagcaataccaagggaaacagtaagctaagattggcatagttctcagcaagcctcacagcgattctctgctccctccctcaccccttgcctacctttaatccaaaaatgattttaccagaatgtccaacaaataagacaagacccaaaagcactgagaactttttcttgctgccaagtataaaacacagaccagtatagtggcttaaaaaagcaaattcccaggaaaatttatagagatggaaaataggacagtagaatagcagggactggggaggggagaagggagaggtgctgttgaacaggtagagtttctgtttgggctgatggaaaagttctggaaaagaaattgttgatggttgcacaagattgtgaatattcataataccattgaatggcacagttaaaaatgattaaaatggtacattgggttacctatgttttaccacaattaaagagtatttttaaaaaagcatattccctctggggttagttagctgtagtcaacacctaagttccccagtgatgaactgaagtatggaccatcagcataaatgtgaattaaaattaaatattgccaggcaggctgggcgtggtggctcacgcctgtaatcccagcactttgggaggcctaggcgggcagatcgcttgaggtcaggggttctagaccagcctggccaacatagcgagacctcgcctctactaaaataaatacaaaaattagctgggtgtggtggcacacacctgtagtcccagctacttgggaggctgaggcaggagaattgcttgaacctggtgggtggttgggtggggggtgggtgcacagaggttgcagtgagtcaagatggcatcattgcactccagcctgggtgacagagcgagactccatctcaaaaaaaaaaaaaaaaaattatcaggcagtatgaggttgcatggtcaatatcctaacagtcacaaagcaagcaagtgatcttgagggggaaagggaggaggtgggaagaaaggaggaggaccaagttccgctgagtggctaataaatattattttggttaagtccctgtctccacagagtaagtcctgattctttttttttttttttttttttgagactgtgtttcactcttgttgcccaggctggagtgcagtggcgcgatctcggctcactgcaacctctgcctcccgggttcaagtgattctcctgcctcagccttcccaagtagctgggattacaggcatgcgccaccatgcctggctaattttgtatttttagtagagacgtggtttctccatgttggccaggctggtcttgaactcccgacctcaggtgatccgcctgcctcggcctcccaaagtgctgggattacaggcatgagccactgtgcccgggctgtaagttcctgattcttaagcctaacatagttaaattgctctgtaaaaaaaaaaacagtggctttatattcaagaccatgttgcttccaactgaattggccactgacactgggatactgagcagtgaacagaccacaaggaagacatcactctcggatcctgtttgaaaccaacagctacagcaaaacactagtcttgattcagggcctaatggggtttctttaattagcaagtttacattcatggagtcttgtgaaaatggttagataaattgcagagaaataaataagtattttgtacatctgagtattattgttaatttccacctggctacatgaggctccctcctctgggttttctctctatgcccttttgctgtggacagaaggtaccytgctcattcatccatccagccggtgagccagggggcagcccggagggaggagtggaggggatgtgggcctggaattagactgagcttggtgtgtccccagctcaggccgcactgccaggccctggtttcgttactatgaaatgaggggtggggtgggtatctggtctcccactccccattactgaggggttcccgggctctcctccaccctctgattcctccccctcttctgttccagtccagaatgcctcctttctgcctaaacgcctctgatcttcatttgatcatcagcagctgcagacccatgagccactgggcctgacctgggagacactggccctccacttccagtgctctccagctggatttcctccagaacagtggcaaagagttcgcccagagctgcgtcccctccctgggaagcagcgctgagtcagggttacctggctccactgtgcccctagcgaggtgaaagttcgcacaatgacatgggctctctgttgaggataaggaggctacagcccaaggagcttgtgcaccgcaggcagagccactcaggtcatcttccagagcgggatgtctgactccagagcccgccagcccacactgctctcctgaggactgggtttctctggcctgagtctgcctgagtctacaggaagaaccctgctggcaccccagtaagcccctctagaccttggagctctaactgctctcagagctcacttttcagttagcctgtaaggcaggggtgtccaatcttttggcttcccttggccacattggaaggagaattggcttgtgtcacacataaaatacactaacactaacgatagctgatgagctaaaaacaattaaaaatcacaaactcataatgttttaagaaagtttataaatttgtgttgggccacattcaaagccgttctgggctacgggttggacaagcttgctataatggatcagagatatgtacagtcttaaagaagaaacagctcccaggcctgtaagacctatcagggcactcactgaatgctgtgagcaggggaaggggcagtcctgggcagtggggtcctctctgggggtccagctgtgtctccagtcgtctggggagctgggaacagcacaccagggttcttgcctcctgggaaagttctcacagaaagagagaacagaggtgcaaaagctaggccatgttcattattctttcattccctacttattgagctttgacaatgtgtgagggactgcttgattgattgactgattgattgggacagggtctctgtcacctaggctggagtgcagtggtgcaacctcagctccctgtaacttccgcctcctgggctcaagccatcctcctacctcagcctcctgagtagctgggattacaggcccacgccaccacacccggctactttttgtattttttggtagagacagggtttcgctatgctgccaggctggtcttgaacaaccaggctcgagtgatccttctgcctccccttgggctcccaaagtgatgggattataggcttcagccacagtgcccagccagaggaacgtttcagatgctggaatcaatggtagtgtgttggaggaagggagtttctgagctcagcccatttctttttttttttttttttttttttgagatggagtctcgctctgtcgcccaggccggactgcggactgcagtggcgcaatctcggctcactgcaagctccgcttcccaggttcacgccattctcctgcctcggcctcccgagtagctgggactacaggcgcccrccaccrcgcccggctaattttttgtatttttagtagagacggggtttcaccatgttggccagactggtcttgaactcctgacctcaggtgatctgcctgcctctgcttctcaaagtgctgggattacaggagtcagccactgcaactggccctaatagacatttttttaaactaaattattacactacagaaaaatgcacacatcataagagcacagctcgatgccttttctcaaagtgtatgcacttgtgaagtcagcctccagatggagaaagagaacatcattagcacccaggaaacccctcttggctcctcccagtcctgaccacactaaggcgcctccatctccacttccatccccagagatggccgctgctcggtgtggtactttatgcagacaggatcaaggatggtacactttttggtgcccttttttggcttgactcaacattatgcttgtgagactgtgttgcaggtagctgtaatcttttttgttgctgtagagagtattccattgtttgactatactacagtttgttcattctacccctgattggcatttgtgcatttcatttttaaaattatgaataactctattakaggcaactaatggctcagttttgctccttgctctgcaaaccaaccctgcccataggaactgaacttgtaaaggggcaggtgacgtattttagtgagaaccttccatggcgtaacctagtagaatgcctaatgttggaacctcgggcatcayagctggcctatttattttaaataaatgagttcatgaataaatgaaggaataaaggaatgaatgagaggaggggtaagtgactaaatgaatgcatttctgggaagagcattattgggtactcacctgtgtcaaacacctctggtcatcttcataaatgctgccatatgtaatccttgccacaaccctttgagatgggatggctaccttgattttacggatgaaaaaaataacaaggctcagagaatccaggtcatttaactcttctgagctctccattttcccatgtacgaaatgggtgtcagtagagctccgcagattgttgagtgggtgagggggtgatacaaagcggtcagcagttctggcacaggaaagcgctcgcgaacttcctgcgcatcattattctggcttgtgctcatgtagcctgtaagtggcctggccaggatttgaacctacagccttccatcatccccctgcacaactsctgccaccccatgctgcctgcctctgggagattaggtgagcaaaggggtcttggccatgtctttccatctgaggcactcagtacagagggtgaggggtccctgagccacctctgctgcctgccctaactccgggctgtgatgaagcagctctgttggatgaagcagccctggctccgatgctcttcctcccctcaccttccttacccaaaggatgaggttggaatacaattgcagtgtctgtgctcactaatttcattttctgtgtctggagtaataggggccctcaaacttattatgcttatttgaatttcaataataagcagccaagcgggagactggcatgggggccggggccgtgctctgaggaaggcctggctgccccagctggggaacagctgggtgcttccgaggagtggccttctctsccgggagctcggggttggtcagctggtcagctatgaccaggcagaagctgacactgacctgacccaacctgggcaggcctaggagagctcgtccccagaccttcaccttgsagaaccaagtagtagtgaraacagtgccrcggggctggcccagatcatcggtcctttggacgtcttcttccataaatgagtcatttatatcacactctcytgtcaagaggtggaagtcagtttccaatggggaccaaattggccctaatttttgttcacctctggtactgagaggtaaggtgggggtgggtgacattttcaaaggggctgtatccctaaatgagataagaccactccctygtgggtggagacacccttagcccaaaggcttgagtagttgaagagctgtaaacagtggctaccaggtgccccaggtacccagacgatgagcaaagccccagagggatccgaggaggtgacaccagcattttcccctgactggttctcgccctcagcctgggaatgtcgctgagtctttggttcttccagagacctgtcttttggctgccrgcctttgcatagtgtccactcctgtatctaattctcaggagactgaggtctggcctaggcgggtctctcctccgactcagttccatgcactgaatttgacccctgggcccagatcagacacagggtctttccacgaggccctcacagaaggtggagctctgagcggtgtttttcaaacaggattttaatggtgcagcaagaaaagaaagactccaggatgactgaggtttaggcgtcactgggttgaaacggttaaagaggcttccttcctgcagggctgctcagagcctttattggccgctgtattgtgtgttcacacacacagagatggagactggagcttttccccaacactcagatctttgtttcccagaagcctctccagggagaagagcccagcgtttcagaaacgctggcttgaaggagccctgggagcctgccccccagtttctctgtagcctcacgattgtgctttctgctggtgagggaggtggctggaggtgggaagcgcccaggaggcccggctctccttgaggacacagctctgctcttaccctttgtgcttagtgcatccccagggccctcgggggaaagtccagccccctctccctgcccctccaggccctctgtgatgagtttcttccctgctcttgtgtgatttcctgtgtgcgcctacatcccaggcaaaccagggggttcctgctcttatgggctgccgtcttctgctcatgctgggctcagcctagataccctcccctacgccttgcacatagttcgggtttcacctgagctgcacccctttccaggaagccttcctgattgtcctgtgctagcttttcatttcactgctccccagcattttgtaycaaatccaaatgccttctgagctgacagcatctcactccctgacaagatgtgggcccctggggagcggtgccaaagtctggttaatcccagggtccctgctgcctgcacggagtggtgctgagtggagactccaggaaacccaagagcttcacctcgggcttgcccatcgggccctgcagctttgagcaaatcgaccgaaggtgcctactgtgtggaacccagcaaggggagccatgcagaccagggagaggaggctggcatgggcaggggctcctccctagaggctgcttggatttaaggcggttccctcatgcccagctcctctccttccttcccatattcaccatagaggtttgggtcccctctcccctctgcctctgccccaggaccacccgtgcagaccacccccgcctgccagaccagtctcagggcatctgatggcttccctgcctgctccgcccacatctcaggccaaacccctggacgtcaggacactgcaccatgcagcccactgtattttcagtctttcctggagccctgcccccgccaggtgagctggctgctttcttgggaagccaggaccttcctggccacctctgtctgccctgttgcctgcgcccctgcagtgctcccaccaggctttctgaagctggcctggccctgagacccccagccctgcctctctgtggaattgtttcctagctggtcgctccgtccttccgagcctccctctttggggctgcagaaagcgtggtctgagctacacagcactgagctccaccctgtcccaggctggtagttctttttttgttttgttttttgacacagggtctcgctctgtggcccaggctggagtgtgcgtgatctcagctcactgcaacctcccagactcaagcaatcctcccacctcagcctcccaagtagctgggaccacagacatgcaccaccatgcctgactaaatgtttgcatttttggtagagacagggtttcctcgtgttgcccaggctggtcttgaactcctgagctcaagtgatccacttgtctcgacctctcaaagtgctgcaattacaggcatgagccactgcgcctggcctggcggttctttattagcacaggtccaagactttgacttccttattgcagggcagatatggatgtgtgtgtcatgacctccaccacccgcgtgcacgaggggcacagcctcttgcaggtgtgtcacgtggcaacctggaccagggatctccccagcccagtgaggggccagcctcatctccattctacagatgagaaaaatacatacactatttaaaaacacttctatccaacacagccacacacacacattcatatgcatactcacacatgctcactcatgcactcacacatacactcacactcatgcacacacacacattcacacacacacacacacattcacatgcatgctttaactcgagggaaatgaactcacaggactctaatttcctgatgccataggaagaacaacgggcattcctgtcatgtttttcatgggaagctgattcagagaggctaaggggcatccctaacgtcacacagctaagaggcaaggctgaggtttgcacttccactgctctgacttggaagcccagtgaggcgctcaaattaaaattagaaaccttttcctgttgtccaggcagaaaaccgggagaggggagagaacagccactagggcgaggacagagcgcagccactgggcagccgggaaaccgaggcttgcgcctggctgcagacttccctcttcaggcccttctggcaccatctgctccagaacccacagctcccatccgccgctgcctgggatgaatggtgccctgtcaacagtgatacacctgctgtttagtgggaagagaggtgccaagagtgcacgggatgcccgggtgcacagaggggaggagacagggcacagccgagctgccaggccaggcacaacttcttgatgaatagagwggtgtggagccgcccgtcgttcatgtcgattctctcagtcaatcaaaacgctgccacagcaggctttgggatgcggcgtctcgatgtgtgtgggcgtgtgcagggcggttgctgatattagtcatgagcgctggcccaggaatcagagacggggatgagtctcagctctgccatttcttggctgtgtgacgtctgggccttgatttctccatatggagatagagaaccccttccttctctgtccccagaaaaagtgccggccacactctccttggcctgtcaacagcgatgcacccgctgtttagtgggaaaccatcttccttcatgaggtcaaagccctcacttttttctgggagggatgactgtgcaccgtgagttagccttagagtcaggcccaggaagacatcagccacctgcacccccccgccgccccccacccccctgccgaggcctggggagtcacagctcttcctgatcttgctgtgtggcctcgggcagggcgtttgccctctctgggcctcaggcactccatcttgacaataaggccattgcacttgctattcacattgggccacctgtgccagccatccatgacaggggttctttaggtagagacaaatggcctgcaggggcggggacccccggggcatggccgtccactgcaggtcccaggaggagccccagcctggctggctgcttccaagaatagagtagacagagtctgcacggggctgccagtgggccactcctgcacgcagggccccgggccctgagctcatcagtgaagcaggtaattatgtgtgtgctttgttcctgcacaaaggcactctcagagaacttccaagaggctctgcttccttgctgatttgattttttcagaactggagtgtgaaagtcaagctgaacctgcttaattgtgcctgcgaaggctattcagagagactgctcttggaaagaaatcaggacaattagctcttggctgcagggagagggggagcgagcgcttgatggtgaatgtcagcctgttcctgggagaaccaaagggcagagctgggcagagtggggaaaagacgggcgggggggtgggggggcatctgtagctgtctctggggctggggccaagcccaccacctgcagggggcaccaagctccacatgtgggtgtggggyagccaggctgggagcagaggccaggtccgacagcaagctcagggccactcccctcagtccagtgagggttggttgtgtgatcttgggcaagtcacatggccctctcggcctcagtttccccgggtctgcaaaatgagtgctgtgcagaatgagcagatggagcccactcatcccgggcagtggcgggtgggaactatggggtccacagcagatggtgccagaaaggcctgaagagggaagtctgcagccaggcgcgagcctcggttccccggctgcccagtggccgcgctctgtccctgccctagtggctgttctctcccctctcctggttttctgcctggacaacaggaaaaggtttctaattttaatttgagcacctcattgggcttccaagtcagagtagtggaagtgcaaacctcagccttgcctcttggctgtgtgacgttggggatgccccttagcctctctgaatcagcttcccatgaaaaagatgacaggaatgcccgttgttcttcctatggcatcaggaaattagagtcctgtgagttcatttccctcgagctaaagcatgcatgtgaatgtgtgcgtgtgtgtgtgtgtgtgcatgagtgtgagtgtgaatatgtgtgtgtgcatgagtgaacgtgtgtgtgagtgtgcatatgagtgtgtgtgtgtggctgtgttggatagaagtgtttttaaatagtgtatgtatttttcaaccttttttgaatggagcccagggtgtatttcccaaattctttttacattattttaaagagaggcagcagagtgttatgacagagaaccagctatggagctggcctgagtctgcatctgggctccacctcaccagctgtgtgtgaaaccactttgttcctgttttcttatttgtaagtagagatcatatcatctatccacatctctgcctaggtgtgtggacggcttaatacacttggaagcctcagaacaaggactggcagtaagtgctcaatacattttatcatcattgttatttttgacgctgagggtcactgtaacgaccaatgaaccagccagtgaagtgggatgaatccattcaggagcacacagggctcgggtgcactcagtgctcacgggcgaggtgagcaggctggcatctgtttggattggtctctgcttgaaccctgttagttgttaaacagtttgaatgccatcccagggtagaagagacagaaacttaagggctacttacagatgcagggactaggggagggatgtgggtgtggccagagaatccaaccctggggaccacccatttcctatctgggcggccagggccctgcaggaggtgcccccgtcacttacaagccagggcccccactgcccctccctggtcctgcagtccatctgggatgtgaggctactcaaccaagctcagtttttgcagccaggcgcacgggggaaggctgccactggctgccatcaccgactgcgaggggttcctcattctcagctggctttaccctttgctgctccttgaataaagtgttttgaattctgccgcacagaggggaccccgctttactcttttggtttccttttgcccgaacacagctcactacagcctcaacctcttgggctcaagccatcctcccaccttagcctcctgagtagctgggaccacaggtgcacatcaccacacctagctgattttttatattttgtagagacgtggtttcaccatgttgcccaggctgttctcaaactcctgagctcaagcaatccggctgcctcgacctcccaaagtgttgggattccaggcatgagccactgtgcccggcctcttttggttaccttcatcggaacacttgcagggcctttgagagaccccatcaaacaygtttccctttgggcacctacactgaatcctctgggatgaaatttcagccaggagagggactgaagtagagtcacatgtggggacctcccattagtgggctccgtagctgacggtcccaggacaggggccctgtgtggaaagaagggcagacctaagggaagccaacaggggtgaggaccacggcgcaggggccacatttaaccggctggggaccaactgtttctaaggcttccgccgctcagctgggcaaaagggagataaatattgtaaagtttacgggaaataacagttttaaacaagctctggaagtgtaatgtgcccacaggcattcatcatcatcaccgctctcatcctctcctgggtgaccagggcgatgaatgacccaaaacaccacacacgaggaaaggcaaagagatcagagactggttcacccagagagaccgggatgctgccttccaaaatggaagagctgtgctggaaaagctgcatttgaytcactggaataagtgcaggggtccagggcctgctgattgcttcctggtccctgtgcacatgccccrtggtgactccgtacagtgcttcacagatcttttgctgaggagctggggatgggcagggaaggaagcctggactgggtgcctagaagctctgggcagcagccgcatcagaggcttttgaaggcaggaagggcagccagcggcccggaggggagcacagcagctgctggtgacagcttgctgggtcgtcacaggggctctggacggtccttctgccccgaggtttggcttagcttggtgagggcagcgtggaggacaccgttccatcttaatgcctttccaataaagccttgaagacgacaggccccatttcctgagcagagctgaacagttactttacacttcatctaaktgattaaaatgactcctctaaattaaccaggccttccagagctgagtgcgggagagtgaagtccagagaccagagccggctgcaggggcaggccgggggcccacagcccttctcccgggccctgctgtccaccagccctgctcgcaccccaggttcctggtggccgatgcgcttaggtcagccgactggcttctgtgctctgcccctgaacaccaagctgccctgaacagagcctggtctctcagggtgagggtgggtcagggataccgcgtgtgctccctgctgtctgcgtccgtgtctggcaaattggtgaggggtcaggcatcccaggtctccttttatcttccacactgcccctgggggtagagaattatggtcccatttcacagctgaagaaactgaggcccgtctgcgatgcgtagctagcaggtgcagaggcagggatcaaggctcagcctgttgcctgcaaagccctcgccctgttccctatggcgcaccagctgcttggatgctcccacgcagcagtgccttgtcatcacattctatttgctgagcggcgatggaacaggccctgcgtccccgcctgtgtcctaagcactccacaagcatgagcgtgtctagatggtgatggtttgctcatggtctctctctcagagcttttaccctggcggggttgggagcgtggcaatgggtcaccactgaccctgttaggaaacaagtgtgtctgtacrtgccacttatgatggggacaggccrtggtcactttgctggggccagtgtcagcaggatggcagatgctttgagaacacggctaagaactctgccttctggagcaggatgtcaaatgctgtttgattcaggcatgtgmcacctgtcaagagccctggcacagctgctctcgagacacgcctcgactgccactctcccacccctgcgtggcaccctcctgactgttttatctgccttggtttttctgggtctggtgtagcacctgccccataagaagcgctcagtaaatgattgttgataaaagattgaaccaatcaaggaaygatgagccagtgaagggcaaatgactggaagcaaaaggccctcttgatggaattgggaagaagctgatccgagggcccaggacagccttctcttgaatgccctgctgctgaggtctcactgctcggcttggactcgcctctcgccctgcctggctgcagaggacaaacagtggggtggtgggtgtgtgtccgtgcctgtgcgtaggatgtggtagctggtgagtgtcagggctctgcacgctgcgccctgccttgcttctttctctcctctcaggctgtgtgtagtcctgggccaggttttttcagcgggcgtggtggtgggaaggtcctctgtcccttgctcatcctgtgtcctggctcttcctccttgtgtcttctctctgggccaggaggaagtggagaggtgggatcagggccgatgtccccagcctgggtggcagtgtactggaccatgggttcccacccagaactcttcatggcagagacctatggcctgcctgtcctcatctgaagataacttggccgttctgatttctcttcccacacaaggccatggtggctgcctctgagatttaataagcccttaggtcaaatgtctgcttggccagaggaattgtctcccgggctttcttggagacagctctaaagcatgcaaactatagtgtcaggaggaaaagctcttcctctacctactttgttctgtgtttgggggtctgagaaatttaacagtcaacagatcaacagtagaaaagacaaaggcttttctgttttttttttttttttgccttaagcaaaaatcctgctaggttggtttagccagagccccctcattcctggtgtttccccttagtagtttttcctccactgatccccaccctgctccggctattaattcctacttttccttgctgtatatgtggctgagcccaacctctctccccaactgcagaatcgcatcacagtgggtcctatacctaaggcgatagttccttccccccacccctgacacccccaataaaatgtgccttcttaccatcattaacaagcatcattgaataattttgatttaatagcgggttcgagagatctcctccatcttcatcctggcagggcttcccctccaccccagaaaggaatttatggcagtttcgctctgggcctccttcctgggagtgaagctgcctcttcttgaagagggggtttatggcagcctcactcccagaagtttctgcttttagtcagataagggaaactccaaaaatgcttctttctggatctgttgaatctcaaatgtcttcagtttaaaataatcttgataccaactctgggggttggggtgggtctcacaccactctcctatgcatccctacctgctaaaaagatgtgccggctctggcctggccggctcctccaccttccagccacctgtcctgtttattcatttcttccctctcttttctccttttcttttccatttatccagtcattccttccttctacccacccaccaacctgatcacccactcattcttctctccttcaatccaacctttcctcagtaccyaacctgtgcaactgtaccatggactccttcaggcagtggctcccaactcccatcacagagcaaatgctcaacacacacccgtgtttcatctgttattcaacaaacactgatcacttgcttctcttaattattattataatatttatttatttatttagagacagggtcttgctctgtcacccaggctggagtgcagtggtacaatcacagctcactgcagcctccacttcccaggctcaagccatccttccacctcagccttccaagtagctgggactacaggcacatgycaccatgcccagctactttttgtatttttttttttttttgtagagatggggtctcacagtgttgcccaggctagttttgaactcccgggctcaatcctcctgcctcagcctcccacagtgctgggattacaggtgtgcgccactgtgcccagctgcttctctttgtaagttcccaagttgaagcacccccttcaggtgtagttttagacgtgcaacatgaggggaaatcttaggttaattgctgggtccagaattgctctgaaagacaaagactgtctttgttctagaaaagtgctcataggcgctgtgaaggccttgatgtcctctggtgccaacgcaacagagaagccagcaaaatgctctgcatgggacaggttctggtttttgctacagagactgtaagagatgcaaagccaggacggtgagggtgagctggggttggggaggcgcaggggggctccccagcagagggagggcatttgaagacggcggctgctccttggaagctggcaggcacggccacagaatatgcgcccctttcctggccccctcgaggtctgcacagccctgagtgctcatgccatgaaaatgagtgtctctgagtttggagagctggcctccgcactgggcttcctgaggacgggagcaggagcaggaggctgaggccaggggggatggcagcccccggggatctgaggaagtctgggagctggctttgaacttctgcccacgctggaacttggggagaagagggagatgtgagtcaggttttcctagttcctgagggcctgggaggccttggctggcatcccgtttacatagcgagtggccccacctgatggttctgatccagattctggtacccgagtgagctaggccacgggagcagctgatgcccctgctgtccctgaaggcagcatgggaggcccccgggactggggctcaggctttccagagagaaggaggtgcctttccctgccaacttcctagctttaagtcacgctccggacatccagagtgagcacctgcacctgccagaaccccttgagccgcctctaccttccaggatgacccattcccagttttcccaattacctttcatatttcctctttggaaatggaatttgattttgaggctgagcaggtggctggagacatagaacataaatatatcatgacttgggagttgacttgcttatcatggaaataaatgtcctccctcctcaagaagcggtcacttggccaggtcactttgatcttgccccgtggtgaaatcagacggtccctggctcgtgggcgctggaaccaggggggaatttcagggtgagtcatgaatgctagggggcaggggtgaatgggctgtaatgtcagctttgttttcctgtcaggcgagagagagagagaggaggggaacaagagagaatgatgccaaggaggcgcctgggcagctgatgagctcagccccagggtgactgcggtcatttgggtcggcagtggggacagacatcagccccagctgggtcatgggtcatttacggcctgggtctccccctctcctccctcctccttctctccaacctgctttcttgctgctggaagggggtgtgcaggctcccgtgtgcctggcacagcaggggcagcacaggagactccatggggcctgtgtcccgcacccccacgcccccgcccccagccacagccctttgagagcacagcggaatgaacgcctgattaggaatcagatgccagaaagaagctgtgtctgttccaaaatcaagagaccaggagaagtgacgtcctttaaaaggagagagctaagtgacagagagggggcttgtccccagcccaggcacctcggggctgcaagctcctttgagatgcggggctcaggcctcatcaggggaaacgtgggcatctagatgaccctccacactgagcagacccagcacaggctgcgccactcatcattataggctgcgccactcattataggctgcggggcctgcacagaccccaggcatcgagcctgcgatggggcaacgtgtggtgtggaggccatacccctcctctgctggctggcagcttggcccagcctcctcactggtgaacagtcagctctgccccctgggctgtcaggaggattaaatgagataagacaaacacagagcaactccttgctaacagccatgcagtaccaagcaaggcacagcaaagggaaagagaaatccagtggcaccagtgggctgagaaactgtcgggtttggctgctgctgttgtctgcatctcccgccttcctcctgagccgtgcttccagggcagccccggcccttcatgtcagctggtgacatttctgcaattgttcctaaagaggggcctgtgggtcgagtgagctaagcagggcttggcaaggtggtgtcccccggtcagtgccagagtctccctaatgtggcctgtgagacagagctgatgctgaacaaaggaacagggtgatctgggagcagcagcagccgctgtcctgagcatctgggtcaggacgacacggatgccaccccaggacccctggcatagggagccgagcagggcagccgggcagaggcaggaatgaatcctactcagctgcagaatagtcacagacacctctccaccagcaacgtccctgaaacagtctttcttattaaaaaatattgagtgtcagttatgtgtcaggcactgttctggacacgaggtctcaggaacaaacaaaatatacagaaacttggcccttgtgttgctcaggatgaagaggagaagacaggagctgtgaggtgtccccacctgtccagaggctgggaaaacttaggagacggtgctgcttgtttagaaaaccgggcagaggagccctgctagtccaggccgggccagcgcccaaggatgaggggaagcacagctcctttggggtctgcgtgcatttgagcatgagtgcattaacagggggaacgtctgtgtttacagggcatgcgtttgggagccagacagacctgggctgagtcctgccctacatactaactagcctgctgtgtcgccttgcaaggggtgagatttctctgctctaagtcatgggtgctgaggcccacctgtctggcgagggtctgggggaggtcggatgagatgaaggaggctggggctggcaccgtggtggtccctgggctgtgcctgtttccctcccacttctgctgcctccatctgaccctgctccggagggaccaggggaggggcggacggaggacactgcttctgcagcgctccttgtctccgtcagtgatttataggaagctggctcaaccgagagctgagggaagacggtgaaggcccttttgtttttagttcaattttgtgagcagaatgctcctggggccaatagatttttccagtaatgaaattgtgaaaataattgaattatgcctttccagcttcaaagacaacctgtgccctttccccagccctccgcatggcattagagaacattcgcctcctgctgggtcggccccttcgcctcttccttctgtctgtcggtgcagcctctgaatagaatcctggtgaagggaggggctgggtgtgttgttgctgcacccaggactgcccacatcagttgcaaaatgcaatgtggggccctttgttgaaaaacaatgaagaatttcaagatggtggcagcagagcctgaaaccgagctcagggcccatctgagcaggggcccggtgtgaccacacggatcccataccggtgatgccaaccccctgagtcccggggaacagtggcaaatcagcactcaggaaatatctgttgaatggaaaatccagtttccttcgccgtcttccttgtctgtcctctcctgccgcctccattcaactttctcccttcttctcacagcactcggcagtgtggactctggctgcctgggttcaaatgagctcaccacctcctagttgtaagctcttcgacaagtgacttaaacactctgtgcccagttttccrcatctgcaaaatggggagataaatagcccctacctcctaggatcatcatgagaatgaggtgtgcgaagcttggccggcatgggttccatagcaggcactcaggggtgtcggccacgaagattattctttctcttctctctttgccgtcttatttcatctctctccgttatttggttcccctgtccttagtcccctttctcccccaatggcatcccaagatgcacaatagtggcaagtgcccagcctgtttccacagcctgatccccaccactgcgttggccagtcacccaagaagcagctggacccatcatctggctctagggatgacccagttccagcayccccgcaaacctccgtctgtccccctacctccctcagcagaggcccagcccaatgcaggcccgtggctggatgggagtagctcttcccaccacccctgggcagggctctgcggagcttgggagcctcacctggaatcggccctcatgcctcagtagagaaggagagcgaggagagaggtgatggggctccgcgggcacccccgatgcacagtctccttctgggcttctgatggccacaaggccagaagacctgcccagaagaattcagtataacccagttcagtgaaattggagagaacgagggcctgcgtcttccgggcagaaggcagggttcctgcsctctggagcccttggcctggcgcgggctgattaggacctagatctgcctgggtggctgggtggccgagtggcgattgggctggttctgtaccgggtgtrctccgtggggggcgtgatctggcaaagccttggaggtgggactgtggaggcaccattgattgaactgtgtcccctgcaattcacatgttgaggcccaaacccccagtgtggctgcatttggagtagggcagtaattatggttaaatgaggtcgtatgggcgggtgctgatccactaggattaggatccttataagaacctgccaccttctctctgccacgtgaggacatggggagraggcggctgcctcccacccaggaggagcccttactggacactgggccctggctgcaccttgaccttggacttctagtccccagaactgtgagaagtagatttctgctgattacgctttcctgtctgcggcctgagctaagacagcrgcgcttggggagaagcagaatttgaggagctcctcagtggcaggctgccctggccctgctgtcagcagaggggaatggccatccatgctggcccctcaccagccgggccttcagtgagctccccgggtaggtgaagctctcycagctctgtgtcccccgccaaagcaggcccacragcgagcgcctatggggtggagtgagagtgaggaagaaacattaccygaggggtcactctcttcagaagacctcaatgactgtagactactgaattatttccttaaaaaaaaaaaaaaarggctaggtatggtggctcaggcctataatcccagcactttgggaggacaaaggaccacctgaagccaggagttccagactagcctgggcaacacagcaagaccccatctctacaaaaaatttaaaacttagccaggcgtggtggcacatgcctgtaatttcaggtatttgggaggcagaggcaggaggatcacctgagcccaggagctagaggctgcagtgagctatgattgcaccactgctttccagcctgggtgacagagtgagactcaaaaatggttaaaaaaaaaaaaagaaaaaatgttgatagctactataaagtttctcttatgcagtacctcctcattttacaggaaatttggagatagggaaaatagaaagaagaggaaaagatgcccaaatatacccagaaagtccctgctaacatgctgctgtcgtccttctattccttaatctaggcatgtgggcttttttcttatttaaaaatgttgatttagatataattacatgcagaaaagtgcacaaatctgaagtctgcagtttgagaagttttagacatgtgcatactctgcaccsaccacctctgctaggatatagagcatggccagtgcccagagggcaccgcaggccctgcctagccacactcacactctcttcagtaacccctcattctgattctattgccatagaatagtttggtctttcttaaacctcatataaacgaaccatgttgtatgtggtctttgtgtctggctgttttttcccctattttaaaaattgtgttaaaatacacataaactttatcatcttgaccatttttaagtgtacagttcaacgttattaaatacattcataatgttgtataaccatcactgccatccgtctgtagaactcttttcatcttggaaaactaaactccatactcattaaacactaactctgtattccctcctccccgcagcccctggtaaacaccatcctaccttctgttcatatgaattaaaaaaaaawtttattttagtttttgagacagagtctcgctatgtaccccaggcgggagtgcagtggcgcaatctcggcttacggcaacctccgcctccccggttcaagtgattctccccatcagccctctgagtagctgggattacaggcacacaccaccacgctcagctaattttttttttttgatattttttaatagagacagggtttcaccatgttgaccaggctggtctcaaacacctgacctcaagtgatccacctgcctcagcctcccaaagtgctgggattacaggcatgagccattgtgcctggctgtgtttcctatgaatttgaccattctaggtacctcctatgggtggattcatacagtacttgcctttttgtgtctagcttatttcacttagcataatgtcttcagagttcatccatatctgtagcatgtctgaatttctttccttttcttaggctgaataatatttcattatggatatcatggcatgttgctcatccattaatcaatcagtggacactgggtagcatctgcccaagttttagacattgggaataatgctgctgtgaayatgtgtgcacaaaataactcttcaagaccctgttttcagtttttttgggcatatacccagaagtggaattcctgatcatatggtaattctacttctaattttttttctttttttagatggagttttgctcttgttgcccaggctggagtgcaatggcgcaatcttgactcactgcaacctccgcctcccgggttcaagtgattctcctgcctcagcctcccaagtcgctgggattacagacatacgccaccatgcccggctaattttgtatttttagtagagacggggtttctccatgttggtcaggctggtctcgaactcccaacctcaggtgatctgcccgcctcggcctcccaaagtgctgggattacaggcgtgagccatcgtctacttctaattttttaaaggaaccaccacactgttttccacagtggctgcatcattttacattttgtatctggtttcttttgcttaatattggtcagggagattcatcaatgtgtacagcacaagtttgtttctttataattgctgtgttaaggattccattgtatgaacaaaacacaatctattaattcccctattgatggacatttggattgttgcccactgtggctattatgaataatgctgtcattaaccgtcttgtacacattttctggtggtcataggcacctgtttctcctgtgggtatatttgggaatggaattgctgggtcatagggtaggcaattgtttcactttagtagatattaggtgtaaattttgatgtctttaaaatagtactgattgagccgggtacagtggctcatgccggtaatcccagcattttgggaggccgaggcgggtggatcacctgaggtcaggagtttgagaccagcctgaccaacacagtgaaaccccatctttactaaaaatacaaaaattagctgggcgtgatggtgggcatctgtaatcccagctactctggaggttgaggtaggagaatcgcttgaacccgggagttgaaggttgcggtgaaccaagatcgcaccattgcactccagcctgggygacagagcgagatttcgcttcaataaaataaaataaaatawtagaataaaatagaataaaaaaaaatatggtactgatcatcacataaagttttgaggtctgcctttttcacttaacattaaatcattactatttttaagttagaacttttattttgagataatgatagattcccatgtagttgtatggagtaacacagagagattcagtgcaccttgtacccttttctcctgtggtaacatcttgtgaacctaaaggcaatatcataataactatattgatgttgattcaatgtcctcagatctccctagcttcctttgcatccattcgtgtgtgtgtgttcctctagttctacacacttttatcacctgcacatatttgtgggtccaccaccacagttccaatgctacaaggatccctcctgtttgcttctttccttttccttccttccttccttccttccttccttccttccttccttcctctctccctccctccctccctctctctctctttctttctttctagctgagattacaggcatgcgccatcacgtctgtttaatttttgtatttttactggagatgaggcttcactatgttgaccaggctggtctcgaacttctgacttaaggtgatccacccgcctcagcctcacaaagtgctgggattacaggcatgagccactgcgctcaagctttttttttttttttctttagacggagtctcgctctgtcacccaggctggagtgcagtggcgcgatctcrgctcactgcaagctccgcctcccaggttcacgccattctcctgcctcagcctcctgagcagctgggactacaggtgcccaccaacacgcccggctaattttttttttcgtattcgtagtagagacggggtttcaccgtgttagccaggatggtctcaatctcctgacctcgtgatctgcctgcctcggcctcccaaagtcctgggattacaggcgtgagccaccgtgcaggctttttttttttttttttaatgtgaagtctcactgtgttgcccagactggagtgcaatggcaccatctcagctcactgcaacctccacctcctgggttcaagcaattctcccgcctcagcctcccaagtagctgggactacaggcacctgccaccatgcctggctaatttttgtatttttagtagagacagagtttcaccatgtcggccagactggtctcgaactcctgacctcaggtaatccacctgtctcggcctcccaaagtgctggaattacaggcatgagccactgtgcctggccacccctcctgtttgtttctaacacaatcatctacccccagcctctggcaaccaccaatctgttctccatctttatacctttgtcaccataagaatggtctgtacatggaatcaagcaactagtaaccttttgggattggctttttgcagtcggcatagttctctggagagtcatccaggttgctgtgtgctgtgatttgaatgttggtgccctcctaaattcatatgttggaatctcacacccaatataatagttttaagaggtgggacctttgggaagtgattaagtcacgagggctgtgacctcatgagtaggattaatgcccttataagagaggtgaagggagtgccactgcccctttaaccacgtgaggacacagcaacaaactgccgtctatgaatcagagagccctcaacagacaccgattctgctggcaccttgatcttggacttcccagcctccagagctgtgagcaataagtttctgctctttataaattatgcagtctaaggtactttgttatagcagctggaacagacttaagacactgtgtaccgatgatttattcttttcgttactgagtggtgtttctggatttggacataccgcagtatgtctggcattcatcctttttttgtttgtttgttttgagacagagtctcactctgtcaccaaggctgcagtgtagtggcgcgatctcagctcaccgcaacctccacctcctgggttcagctattctcatgcctcagcctcccaagtagctgggattacagccayatgccaccacgcccggctaatttttgtatttttagtagagacagggtttcaccacgttggccaggctggtctcaaactcccgacctagggcatccacccgcctcggcctcccaaagtgctgggattacagatgtgagccaccacacctggcctgacattcacccttaaaaggacatttgagtgctaccagtatttgcctgctttagtaaagctgctatggagactagtgtatagattcttttgtgaacttacattcacacaaaaatgcagttgctgggttgtgtggtatttgcctcataacttcagatgcttcttgactcacaacakggttacttcccgacgaacccattgtaaattggcagcgtggctgagtgggagctgcatctctctgcctctgtccagcactgtgagggaagtacagtttctattgaatgtgtatcactttcacaccatcataaagtcaaaaaatcctgagttgaaccatcataagccagggattgtcagtatttttagaggagctcagggtcataggttactctgccagttacatattctgatgcaaacgttttctgaagcctttattattatgacattctggggacctccataccccttatttttggggattagagcttccctctgtctaatccagctctagagccacctcctcgggaagccctccacccagagccacctctctgtgagagcggccccaccaatgactttcctgtgggatgatggagccctcatgctgagcagaggttaatgccatcccacrgctcccttcccccagaggaggtctgggtctcagctgaggcttacagcctaacacatctggctccggacatactgggagctctttacctgagggtgtccctgtcatgtagacagaggcttttgagaaaataaacagtcctgagagaacctcttcgtcctgggggaagctggcttggtctggtgaagacttgttcacttgcttccagcagaaaataacttcgctgtgagcctggaggttattataactaaatcattctgtgaactacacagacaggctgggcatggccattgtatttccgtcaccctggagagaaatctgtgaccaaatggttaaaaaaaattccaagtcattcattattcaccctcgctgcataatgcatgaaggctgcgggccaggcccatttatgttttcaacattggcatcaaatgtcagccactgcctcagagaggcccacgagggccttggcactcgtggttggccccttctcccctctggatgaacctcaggcctccagggctcctrcctcctgctcactaggctctcagcctggatggtccttctttctcttcttctatgaagccctctccatcctttagggcttagaaatcatctcctccctgtcacctgccagggcaggaagtcatcctccctctctgttccccctgtaacactttatttttatttatttatttatttatttttttgagatgagacggagtctcactctgtcgctaggctggagtgcagtggcatgattayggctcactgcaacctcygcctcccaggttcaagcgattcttgtgcctctgcctcccgagtagttaggactgcaggcacgcaccaccatgtctggctgatttttgtawttttagtagagatggggtttcaacatgttggccaggctggtcttgaacttctgacctcaggtcatctacctgcctcagcctcccaaagtgctgggattacaggtgtgagccaccgcacccagccccctgtggcactttagartattgataaccaccaccactgtgatcataactagtatgatttatatagtttgtattctctgctggacacttaactcacactatctcatttaattctcataatagccagtgaggcagatattctatttctcaattttaagatgaggaaacaggcttagagtggttaattaatttgcccaaagacatgcagctagcaagaggcagcatattgcaatttgcctkcaggatggtagcaattgtcatcccttttcttctcaatcattctcaccagaaatgtattagtttttgcagccttttcaaggaaccaactttaggtttcrttgattgtctctgtttcttagttcattacatgtgtatttttatttctagtcctgcttgcttaggatttattttgctgttccttttgtaatttcttgagatagatcttagtgcatttgtttttaatcmttcctcctttctccagttcaggctggtcttgaactcctgggctcaggcaagcatttcaggctagaaatttccctctgagtactgctttggttgcatccctgcacatacaagttttgattgtaggagtttattattccattgaaaatattttccgattttcctggtgatgtccaggtgggattgtgctcaatctgacagactgcacagctctctctctctctctctttttttttttttttttttttttttttwagacagggtctcagctctgtcactcaggctggagtgcagtgttgcgatcatggctcactgcagccttgacctccagggctcaagggatcctctcacctcagcctcccgagtagctgggactacaggagtgagccaccacatgcagctaatttaaaaaaaaaattgtagagataaagtctcactatgttgcccaggctggtcttgaactcgtaggttcaagcaatcctcattcctcagcctcccaaagtgctgggattataggtgtgagccactgtgcctggctctttttatgatactcttttctgacattgagcaaatcattttcatgtctgtccctcccccaggatcagtttgagaccagcctggccgacatggtgaaacactgtctctactaaaaatacagagactggctgggtgtggtggtacatgtctgtaatcccagctacttgggaggctgaggcaggagaattgcttaaacccgggaggcggaggttgcagtgagctgagatagttccactgcactccagcctagcagcctggacgacagaggaagactctgtctcaaaacaaacaaacaaacaaacaaaaaaaaacccaaaaaaaatcccacaaaaaacaaaactatgaactaggtggtctagaaacaattatttctcacaggtcgttttaagccactgagtttgtggtaatttgtcacagcagccctaaaaaataaatatacacagttttaattgaagttgggctaagaagctggacgctagtcccagctactcaggaagtggaggtgaggggatcgcttcagcccaaggagttcgaggctagcctgagcaacatagcaaggcctcatctctaaaaaataaaaattaaaaattgggttaagaatttagcagctagtccttaataggatgagccatgaggaccggcagctacatatcagtggtttgaagcaaatggttgccaagtcgctcctctccctcccaggtcatcaccgtgacatccttttgtccagtgtccttccctccagggtagctcaggttaggggaaacagccaacacatccatgcaaggaaataaatggccactcaaacgcagactcttttaaaagtgggagagtggctgggtgtaatggttcatacctgtgatcccaacactttgagaggccgaggtgggaggactgcttgagcccaggagttggagaccagtctgagcaacattaggaagaccctgtctctacaaaaattacaaaaatgagccaggtatggtggcgcgtacccagctacttgggaggctaaggcgggaggatggcttgagccctggaattcgagactgcagcgaactatgatggcaccactgcactccagcctgggccacagagcaagactctgtctctaaaacaaaacaaaataaatagaaggaggagaggcgtgagcattgagagcatggccaaagagcggcagcactggctacccagcacttactagccacatctgggcctaaggattttatgtccctcaggactcacggggctgrtgtgccatctgacccctctgagacctgtgggactgggctccgagcctctgggacactggaggggtggaggcaggtgtctgggcaacatccaataagaagcctgtgacagagtcaacagtggcaagagccctttgggccagcccggctcatcccctcctggctgcctgcccctccatggcaaggtcattttccttgattccgatcacagcagacctctgttgctctgtggctgattcattcagagaagcagggttctggctgggtatggtggcttatgcctgtaatcccagcattttgggaggccaaggtgggcagatcacttgaggtcaggagctcgagaccagcctggccaaaatggcaaatccctgtctctactaaaaataaaaaaattagctgggcatgatggcacgtccctggaggctgcagtgagctgagattgcgccaccgcactccagcctgggtgacggagtgagactctgtttcaaaaaaaaaaaaaggccaggtgcggtggctcacgcctgtaatcccagcactttgggaggccgaggcgggcggatcatgacgtcaggagatcgagaccatcctgcccaacatggtgaaaccctgtctctactaaaaatacaaaaacaaaatcagccaggcgtgatggcaggcgcctgtagtcccagctactggggaggctgaggcaggagaatggcgtgaacccaggaggtggagcttacagtgagccaagatcgcaccactgcactacagcctgggtgacagagcgagactccatctaaaaaaaaaaaaaaaaaaaaaaaaaaaaaagcaaaaaagcagggcagcagggttcctagccccggctccactgccttttctggcttggggagacaaagcttggtaacatcaggactgcaaacatcctgccattagatcttggaccagcaccggcctggtagtttgctgtttcatcagggggcttgcagttcataagcaatcccttcttttcttttctcccaaagctgggaaatcaaaacaaaacttccttcccttccgatattcctctttactaaaaatttgcgtagccaactctcctgggagtggggggaccaacttggctcaggttggctgggatggtcctgtttttagcattgaaaaccacaaaagcaatgaaagtctcaygttgtgggaggccctgagtcctgggcaaactgggactgttggtccaaaccgtcccttccagaagaggcccacatggcaggccctttgaggcctggggcaggcgggacagaggcagcacccgcctggcatgggkctgaggcctccttgcagctgcctcccggccccttgttctccttcatggctccatgcacagctgaggggagacatgaggtctctcggtctccatgggtttggggcaggcccagaatggccctgaatccagtaacaccaactgtccctggaagtgtcaccaccctggtctgggaggagctccatgaacatctcaaccatccacttcttgtgcagayggggaaactgagtcagaaagggaggagactgccttaagaaagattcttgcaacttgactttgatcctgtagagtgtttgtgggtttagaagagcacaggtctgaagatggaagacttgggtttcagacccgtctctgccctgtgcaccagcatgcccagagcagcactaacccaaagccaatctgacaaatgaacaagtcattctatttactggtttctttgatctatttataaaaatgaatatttatagcaaatcctgtaggatgcggtagatttggaagatttctgtgatgttttgtttgactaatgcttattttcccttttgtatcagtattttaacaaatgctttggatttcctccacgcagaggagaatcagtatgcagctgttaattttggctgctgactccaggacaagagacagagagagagcgtgaaagcgagacagagcgtgagagtgagagagagagagagaggcaggagaggctgagcgtgggagggagacagacggcatcgattcattaatatattcaaaactatattcaaaaactattcatttaaaaattctggaatatattgactacatactttaaaagacttttttataatgggaaactttgaacataggcaaaaatagaataatagaaaagcccagcgtgcgacatcagtgtcaacagaggtccatatgtggccagtcttgtctcagccttttccccacccattcactcctctcccaaatccggatggttttaaggtgattttagccatcgaattccatatgactctgttctcaagtgtactggatacattcttgaaaatactcttgaacatattcttgaggatgagaaattcttacaaatgtatattttttgtgcccctgtgtctccccttccttgcctttcaaactcctctctctgtccctttgtctcctttcccccacccttcacctcccctctctgttctccccagtctcccctaaactccaaatctctactctgaccctcagtctcatcttctgggtgaccgaagatggggcagtgcagcccctgctgagctgaccctcctttctgtccttcctcgtgccgaggttctctctccttgactgtttctcctagctgaagcagtaggctgctggacagaggcaggtccagcatactttgaatgttgttatgaagtccagtggagaagagctagcctaaattcggcagaaatcttcaatatctttaaaaaagaaatccctccattatggatcactgtaaacttgtatcagttgttataatcaatgaacacattgactgaattggccttttgatatattgacttagagctgtgtgattttggatgagccattttaccttttagagccccagtttccatctctgtgaagtggggaagtgtggaccatagcagtggttttcttttttctgaggcaattctcctgcctcagcatcccgagtagctgggattacaggcgcgcaccgccatgcccagctaattttttttttttttgtatttttagtagagacggagtttcaccgtgttggccaggatggtctcgatttcctgacctcgtgatccacccacctcggcctcccaaagtgctgggattacaggcgtgagccaccgtgcccggccagcagtggttttcaaactggtttcggaagcagattcattcttttcctagccaaagcctggtgaaccgtagtgtgtmcaacagttaaaagcagagacctgcaggtccacaggagcagacgctgagaccagcctgcctggggtcaatgccctctaacccctctgtgcctctgctgttcatctgctgaatgggtctcatagttgagcagtggtygagagatttcctggcatcaaatacatggaagggacttagcgtaggtcctgcttagcacatagtaagtgctcagcgaacttacttaccacttattacttaccacccctgcctgaagcagggtggggccaagggattggctggacctcagccactacccctcccctcacatggagccaggccccacctccacagattgggggcttggggacacrtcttctgtgctccatgctctcaggtcccagtgaggctgarcgctgaaccatccaagttggcagggccaggacaaggacccaggagctctggtgcccaggagtcccccgaaggggggctcagaggaggtgcgtgcggggctggtgccggtgcccccgaggcccacgtgcagccccgctctgtggggcctttgcccagcctcctggtccttgccagcgctgcatggcgtttcctgccggagtgctggtcactgagggctctcagacaaggaatgacccaggggctgggcccagcctctcccttgttccctgatgctgctggggccgctcctctctacccagcagaagggtcccgcaggaagatcagctctgaggttaattgtccttctggatagctgcagcccagttgtcatggaaaccggtcacgcagggctcggtagcaggaccctccttcctacctctgccacggtgccgcaggctcagagggggcgtgggagctgcatcaggtgatggtaagatactacagccattctccaactgcaggcacctggaaggagaaggtggcccggggccaactgtgcagtgagagaggctttttctgcgtctccccgcagctgtcttgttttcagcagtggccctgggggagatgtggacgctctgaggcctggggctggctctgtgtgtccaggtctgtgtgggggtcactgagagaagggaaaggcaggggatctggccccatgtggatcttggtggccctggcacttttttactctgagcccagccttccttgtgtgtaaaacagggattgtggtgcctacctcttgggcttgccctgcagatgggccgggctgagccacaccacagcggctgggcaggttcaggccccttctcacctctgctgtcctccagcaccatgattcggttgggaacagaggaaggcgaggagagccatccgcttcctgcttctgcagcattcggccatttgcccaatgctccctgatgccacggttctcaaagtgtggtccctgtccctggcctgggagcatcagcttcctgtggggactctagaaatgcaagttctccggccccacactagactgactgaatcagaaactcggggcggtggggtctagcgatctgtgcgttaacacatactctagggggttccgatgcccctcgagtttgagaccctctggtctaatgatttatgggtgagacactctgcgcctgcttccctgaggaccccgagctgcagccccagggcttccccctcccactttgggtgagtatgagcagggcccaggtggctggggtgcagtgggcagcccrgtggtcctgcctggggtctggtgctccctcggtgtctgtcagctcgggctgctctagcagaaggccacagaatgggggctcacaccgcaggaatatatagtctcatggttctggtgtctggaagtctaaaatgaaggcgttggtagactcagtttctagtggggcctctcttcctggccagcaggtggccgccttcttgctgtgtcctcacatggactttctctgtccatgcatccctggagtctcgccctcatctggtggtcctttgtaaggacaccagtcctactggattagggtcccacccttaggacctcatttcacatgaatcacctccttaaagacctcatctccaaatacgtcctgttgaggagttgggcttcagcatatggatttggggggacactcagtttccttgggcctctcagctcctgagggggtcatcatgagccaccttcctgcttgagggggataaagggcagctgggacccagggcctggggccttgggccgaggcatggggggcatttgtgggccggtgtttgaaatgctccaccagcactgcaaacacaccagacccctgaagagagggtcaggcgctcagctaggaagagggcgctgcggagagagtggtgtgtgtcttcctgtgtcctcctaggagcttctgtctgagaagtcagaagtcatgagttcccagtcctggccgcatttggaggctggatcattggagggaggcgccggcgccccatgtagctgatgttggtggagcattggctgagggcccagagagccatgctgctgcctcccacacatcaatcactcaggccacacagtcactggtgaaagagggcacacaggtaatcctccagttcttgaatggggaatggaggcacaggagggctaagcgagggcccatggcctcaagattcaaacacaggcactgtctggccccagaacacacgcccttcccacctggccgaggaggtgctcacaaggggcactccaggtggatgcagagtgggccagccccctcccttcctgcgggcagtggcccctgctcttcaggggagtcagatgcattgattctggaggctgaagccaggtggaagtgatctagaggggagatgaatgtgaggcgctgccccggaggagacaggaatggctcatcagccacgagccagtgccatttagaaactggcagccaaagtgacgaggccacacagggcaggaggagcaagagcacacgcttggaggtgatggtattccagcagtggcatcagctcagcctgggccaggccaatgagcccaccagcagcctgccccttgctggggtggaagcctgaaagcagaccacagtggctgctttctttggtctgggggagctcaggccaggggctggttagagtccccagcacagccccatcctccatcccacagtgggcagcagtgtgaaactgggcaggggacttcaactctcctagtctagttttttcattcatgtcaagggaacaccactactgacctcacagggtgagggttaagtcagatgatgtgcttaaaagtcttacatgaggcatggtgacactagatgggccagggcttcctgaaggcagggtcaactctgattcatcttgacatctccagttcctggcccagagcctggcacatagtgggcacttgagaagtgtctgttcccttccctcgagagggtcttcaagtggtgaatggagatgatggtgatagtgataatggtggtgatggtggtagtgatggtgatgatggtggtgatggtactgatgatggtggagatgatggtgatgatggtggtgatggtggtgatggtggtattggtggtgatggtggtggtgatggttatgatggtggtggtgatggtactgatgatggtggagatgatagtgatggtgatgatgatggtgatggtggtgatggtggtattggtggtgatggtggtggtgatggttatgatggtggtggtggtggtactgatgatggtggagatgatagtgatggtgatgatggtggtgatggtggtggtggtggtgatggtggtggtggtggtggaggtgatggtggggttggtggtgatgagtgtgatgatgtgatggtggtggtgatgatggtggtgaggatggtgttggtggtgatgagtgtgatgatgtggtgatggtgatggtggtggtgatggtggtgatgggggggttggtggtgatgagtgtgatgatgatgatgtgatgatggtggtgatggtgatggtggtggcgatggtggggttggtggtgataagtgtgataataatgacggtggtaatgatggtgttgatggtggtggtgaggatggtggtggtgatgatggtgatgatcatggtgatggtggtgatgttggcgatgatggtggtaatgatggtggcaatggtggtggtgatggtggggttggtggtgatgagtgtgatgataatggtggtgatgatggtgatggcagagatggttacaatgctgagagtgatgatcttggcggtgatggtggtgatgttggcgatgatggtggtaatgatggtggcaatggtggtggtgatggtggggttggtggtgatgagtgtgatgataatggtggtgatgatggtgatggcagagatggttacaatgctgagagtgatgatggtgatggtgacgatggtgatataagtccccatgcgcacttcctcttctctagctctgtctctcacctgctcttgcctgagctccactgtggccacccacctgtgacctgtggatggaaagtaattctaattatgacattttcctacaaagaacaaaccactgggcttctctggagcacaaaggcatggcgagatgagcagtttgccccacaggacsctggcattgccctctgaactttttcccagatgtgctgaggacaaggaagtcaggagtgtggcttgttttccatctgctcaacactgctcgtgcctggagccccccagctgtgcctatcagcccctaggggttggctgtcaggggagcagagagactcttggggcagcgtggccttggtcacagcagaatgctgggttctgacatttatgagccatgtgaccttggcatgctccttgacctctctaaaccttgcatgacacttaggaaggttaataagatcacgtctgtgagaggtcttagtgccacagtagatcagtgtcagtgagggtagggacttagctctgtggcttgggaggcgcaggtggcagtgagtagccagtgggtgagacccagagaggctgtgcctgtgagcggctgggcagagtgggaatgggtgctgtcagctgggtgcacaggcagaggaggtaccgctgcccacaaagggaagtctctgagttggagcggagcaggggcgggagagaaggcaattggggccttcttgggtttgggaggctcagcaccaggagcagcccacagccagggctcaggacccaggggctcacccagccctcctgaccaggctaacctgcggggtctggagggaacacgggcagccacggccatgcgcactgggaataagtgagaggctcccgctatctcagacctggcgtgggagctgtgggcctttccagggcccggctgctgcggaggtaggagtttggtgttggcagcaggagcagcaaggacacactttaggacctacagcgtggaggcaggaggacagggaaatggcctcgagtgagtccgtgaccccttgaggaatctgcacacgactcctggctgtcttgtcacttgatgtaaggcctcaagcggcatctcctgaggatttcatggaggccagaggggactcacccagaggtggagggatgcaagctcagaggccagggtgggcgggggctggagctgctctgtgacagcccagagctcccggagccgcagccaccgtcccaagagagctcaaaagaggagggggtgggaagggggaggtaaaagctgttcagccaaggctttctcagcctggggactgacctgggtttgtcctattctgtgaaccaacccaaacatgtaaatgtcctggcactgagcaaagccttccccaggggcgttttccctgaaggacttctcagagcctttaatgggccagggaatcttgtcacgctcaggtgatggtagaggaggaaaggacttctccaaccgtggtgactctagaacctctccctacagcagctcggggagctccagctctggagaacacactttgggaagccttcccacgcaggacagaggtctctctgccgggctgcgagccctgcccacttgtgaccagggttttcaatcccctggtgtgagagcagtctcaggtagcccaagcctaagtggaaaaggggccgggagaggcggctgggcaccccctcgctggggctggtctcctgggtccctgtttcctgtctcaggaactgggaggaacccacttccaccacccagcaggggaagactgaaagtattagggggcctgtctggggtcagtcccactgtggacttgggcactgccactccacccccccctgctgccacaggcagtacccaaaggtggtgcattcggaccctgaacccccagcttcatgggttctaggaccctcctctccatggctcagcttccaactgatgacccctctccagagccagcctctgtcctccagcaggaggtagctttggcctctcttggtctctgacccgcatgtcccttctgcgctgcagtctcctgggctcagggtcctccttcagactcctccagggaggccacaccctcacacagacctgccctgggctcccttctctgctctgagcagcccctagtcttacaggagctctgcagaggcccttccgctgcagaagagcttaggtgacaagccagaagcctcaggtggcctccttgttttgccagccctcccccgtcggttccttgctttttctacccagcttggatctcggggggctggcctggatggattttgtcaatgactcacttgccctttaatgatcattgcatttgggaagccctggccagagatgcaagtgtagcaggagaggttggaatgttcctgtgcctcctcccggagctgctgctgtggggcagggagacttctcccttctggtggcctcctctcctccagcccctccttctcacgaggctctgtgagactgttttgggcctggaggcggcaacagctttccacggggctgggtgccgggtgcctcagtgtcccccactgtccctccattctgcccactcctctgcaaacagcctctgcatcacgtgttcttcaagatgccagccgagcgcgcctgcaggagcctgtcctgctcaggggcggagggctctgctcgtgtgggcacagctctgaggcggtccttgtagcaaacatcgctgactgcctaccacacgcccggggacctcctgggcacctgtcagtcatgaacgtaacaggttcaggttacccaagtcccatgccctaactgggcagttgcaccatgggcagcaacagaccctgggcttcaggatgtcccagcagagccgcagcagccacagagcaacccctcttcaccctggggatggggctgggcctctgagagcaagcatgagattgcagagccaaaacccaagctgtcaaaacgaccagcaagaaagacagtttggattaattggcacagggaggtccctagacatttagattatggctgctcctgggctggagcgtggaacccagagacatttcacaaattaacataaatcctgtgaaccctctgtccatttcaacgcttaatgccaaacataaacaaatgaaagtcatttcagaagctggaggagtttgaataattcagtcccatcatcatttactccaaaacgcctcatttcatcttatgagtcatcgttgaaaggaaaagaagattttacttggtattagaaccgggagagctggaaaagcttcgaagaggaaggaggctgccagcttcctgggtgcacaaggccgtggccagcttccgggctcagtcgtggacaaaggcctcctgggacagagaagtggcctctaagcaaaggcggtggtgtgacgctagcaggcctgtgtccacctcctggtcaggctgctgactggcggggctctgggggtaaggccttggtcctgccgtgcctcctcctggctcatctgtgacacagaaatgacagttcctactccccagcttgtgcgggcccaaatgggatggggtgtgtgtgtgaggactggggcctaggcctgtgcagggcaggttgtgttactaacgtccccccgtggctcctgggctaacggtgcacttctccgtcctgcttcactgccttatggcacgtgtccatttccccaaccaccggtgggccccgggtggcttggccggcctggtgtcccgtgcccagcatgggctctggcccaagttagcacttgctgcctaagtgcctctgccttttactcacctccatctggagcgggctcagtggggttcctgctggggctctacgggggcatccagactttgccctctgaccagccccactgtcctgtccttccctcccctgcgtcctcatctgtcactccttggtcacagccgccccctgactttcctccctgcctccttggcatggtgggaaacatgcgagttccatttctgaggctgcctygtgcctgatcttgggcaagttgcttgctagacctctcggcgtctccgttctcagcggtgcgggtaacctggccctgtgctactgtgtgtgggtttacagccaaggcctgtgaggcacgtgaccaccaaaaccctcacgaggccatgtggtcgtggctacgggtttaatctaaaattcattctgatcccttggccttggaaaaggcacttagcagggtggtgagggccacaggtgtggtctgagctcctggggagctaccgagggcaacaggcatgttctggaagacccaccgtctgaggggtcatgtgacaggtgggctaggtgggcacagaatgggaagagaggcagtgaggcagcctctctgcagaggaggggcttcacagaggaggcagcggctcaggtggtcccaggaggatgggtggggttcggaggcagagggctggacttggaaggaaggaagagcggacacagggcctctgagcggacagtgctggcggagccctggggagcaccgagtccccgccgtgatgggtccctgaagcaccggagccagcagcaggagcatgcgggggagaccttggcccagccctgcagtcaggcagtaggtgagccctgaagggtgaggttgcttcagctggatgagagggtgtgggagagaggagcatcccaggcaaagtgagccgcgtttacctggagaccaagggtgggaagcgagggagaagaggtcgcggtgagcctcgggtggacccatgtggcagacctgtgagttggtccccgacagcctcctgcctttctccctgactgcccagcagcagtgttcttgggcctcagggacgtgtcgtgactggctgaaggctgtcacggtggtcctgtgtaggactggttgccacaggtaagtagtgacctggcctggccgatgctgtgttaggataaacgtgctaaggaggctctggaaaagaattttcctgcttggacaagacagagactcacacgaggaaattccttttgttcctaccctcacttccagtgttgaacacagtcatgctagaaatggtgcctggtgcagctgcagccgtcttgctaccagcagggcaaggcagagccggccgcccagggacctgccactgtggggtggccgaagcagccctggcaccacacagctgttatatgctgtggtcagaagtccttattaggtgagcaattaatcagatgtgtggcttctcaccctgtatttcctctggcaagaccctgcggcactgcagacccctgtcctcatatgaggcctaagcagtgaggagcttcagacccgtgtgaagacagaaggcgcggggagcaaaggtggccagagaggggtggggtgggccacgagcccccaccaactgcaggcccacggctcagcagcaatctgaggtctcccaggcagccttcttgccttccttccatggctccttggaaagagctgggtttcatctcgggacacagtggcattagggatcggcagagaccagcaggagccctgggtccagactgtggctgtttctgtggtgaccagcagccggcactgcctggcagtgcctgggagtggacgttgaggacactgtgcccaggaggtcagtctgcccacccaggctgtgtcctggttgctgggtgggggtgtgaagagtccaggaccagccgttgtcccacccagcaaaaccctctgtgtgtggatcccatggggggccgggctccggggatggacagccagcagccctggcctgagcagccatccggaggagggagcagacaagaaacaggcagtgaccgcacagggcgatggggctgggcagggaggaggcgggttcgctgtggccagatgccaagccagagccgggaggccagagggagggccgcagccgggacaggagtgactgatgccagggcctcagagtgaagacagggctggggtcccctgccccctgatgggaaggagactgcgtggctggggtccctgggagcgcatccctkttgagaccacactcctcagcagcacctccctctctcaagcaccaacactggccttttggctgcctgagaaggggctctggggtccaggggagccagctcagctcaccccagtgagcttcccacactcagacaaggccctactccagggcagcttggcccgtgcctctgcccctacccctgccatggcgtctctccaggccctaggtctgtactcacataacccagtcctgcattgtgctgactcagcctctgagcctcaacaatccctccttcgagtggggacaacatccctgcctccgagggctggtgtgcggatcgagggaagtcacaggtagtcacagctctgtgaagggtaacgcgagcgcctaggctgggaggctgggtctgcagctgccggctccacgggctgtctccacctctccctgcctggctctcctggctcttcgtttcgtcatgttccttctgcccaaccagtcctagggggacagggagactcctgggcacaggggctgctcaaactgccctgggacagatggcctcctgccctgccccaggcagcactgggaagcagaagggctgggggaactccagcaaggcctggggggcattgagcaaagcctggagagagcacacttgtggatgggtgcacctgtgggtggccatacctgcggggcgggcacacctgcaggctaggagtaggggggctgggcggtgggcccaggggagggtgttactgagttacgtggcccccagtgctcctggtcctttcaacctttaagttgaagataaagtcacttttgcaatactaaagaccaacagattctaatattcactcccatgcaggaactaagtgcctgttacctgctgtcctgcttgtcccatcttagggtttcccagggcccagcagagcctttgccataccttctctaaggcccaggctctgggaggaaggtcactcagactttcagcactgctgctggtggatggggcccctctcagaggccctggatcctgctgggcctgtctgcctgtctgaccatggaaacctccaatggggcagggtccaggtttccctccctacaagcacgctcctaagcacgtccgctctgtcgttgtaggtgtagaactcaacaatcacaccctgcaaaggcggaggaaaccctcttccctccccaggcccattctgtgtctcaggccctgcctctcccctgtatgtaccgcatacatccctttcggggctatgcacaggcttcaggggagccccacccatggggtgcatcttcagcaggacaatcatcagagaatgttgtggtccaggatagggcagtcctccacttctggtcctccagaagtggactaactaacatctcctccaaagtcattcttcttccatgtttacggtgacctctgtgttctaatcctgggagaagccctaagctgagctcacgggagctgggagaccctgctgccaagctgagtctcaccatctttggcccattttttttttttttttagacagggtctcgtgctgttgcccagcctggagtgcagtggtgcgctcttggctcactgcagcctcaccttctctggctcaagcaatcctccagcttcagctttccaagtagctgaggatacagacgtgcatcactatgcctggctaattttttgtatttttttttgtagagatggggttttgcatgttggccaggctggtcttgaactcctgagtgtaagagttgaagaaagaagaaagaaacacgaaaagtggctcaacagtccaagacaggtttattttggagaataaacctgagaggggcttctggccgattgctgtcaggagcactctctcttacagactaagggtatttaagggtttagggagggagagcttatcgcaggttgggaatgtttctggtcagaggagtgtttgatttcggggtaggaatgtttctggttggagggcgctttatctcagggttggaatgtttctgattggaggtgtcatttgtggtttatggtcatgctgacagccattaggctgattttttgggggctggatttaggcggtttttaatcaaggggaacttaaaatgctgctgtttgtccaaaatgktgatgctcctgctttgtcaatccagaccctatagttataaaaggatgaggggcgacgtgctctttctggctacttcctgctgagagagggttgtcgttatgggacactgaacatggtgctggagtggaagaggtcgatttgttctgggtagcacactctgcctcagaggcccagaggcagcgcccactgaaacatctaattttcagctcacagggcttcaagaaagcacagcttaggttttagtgatctccagctagaaaaaaaaaaggggggggggaaggaaaagaaaaaggaaaaattgaaaacattattttggagacttgtagccagaaaaattagaatttaatccaaactgtagaaaacaataaaaattgaaaaacctcagacaagactagaatttaacaacaggtgtgctacagtttttgaaacacaattctctctctccagttttccatttatattaaaagacaaatcatggggccaggtgtggtggctcacacctgtaatcccagcactttgggaggccgaggtgggcggatcacaaggtcaggagatcaagaccatcctggctaacacagtgaaaccccgtctctactaaaaatacaaaaattagctgggtgtggtggcgggcgcctgaagtcccagctactcgggaggctgaggcgggagaatggcgtgaacccagaaggtggagcttgcagtgaactgagatcgtgccactgcactccagtctgggtgacagagtgagactcagtctcaaaaaaaaaaaaaaaaaaaaaaaaaaaaaacaaatcatggtatgactagtttgctttgccagatttttttttaggtaaagtttcactcttgttgcccaggctggagtgcaatggtgcaatctcagctcactgcaacctccacctcctgagttcaagcgattctccagccttacttcctgagtagctgggattacaggcatgtgccaccatgcccagctaatttttgtatttttagtggagatggggtctcaccatgttggccaggctgatctccaactcctgacctcaggtgatccacccatgtcagcctcccaaagtgctgggattacagaagtgaaccaccgcacccagctgtggccagattatttgtataaggtgcagcaagaataattatttttacataggccttttaagttggcttcaaaaaaactctgtttcatggaaggaatttgagataagacctttttaaagccaatcccagccatggaagtgcaccatcaaatacctgtgagttgggtgaattcttccactcttgaggctccaagataacctggggttcctggcctgtgagaaagtgacattcctttacttacctcaggtcagaaacctgcacagggactgcgcgcacaaaatatgaggcccacagggaccgcgcgcgcaaaatatgaggcccacagggaccgcgcgcgcaaaatatgaggcccacaggcaccgcgcacacaaaatatgaggcccacagggactgcgcgcacaaattatgagtcccacggggaccgcgcacacaaaatatgaggcccgccatctaagggctctactggcttcacaagtcaagtttgattccttaaaggagagcacaccattccagtcaaagccttgctaaaacaaccagttcttccaattgtgtcctgccataaaagaaaacagacttttggtcgggtgccatggctcacacctgtaatcccagcactttgggagcccgaggcgggcagatcacctgatgtcaggagttcaagaccagcctagccaatgtggcgaaaccctgtctgtactaaaaaacacaaaagttagctgggcatggtggtgcatgcctgtaatcccagctactcgggaggctgaggcagggagaattgcttgaacctgggaggtggaggttgcagtgagccgagattgcaccactgctctccagcctggggaacagagcaagattccatctcaaaaaaaaaaaaaagaaagaaagaaagaaagaaaacagacttgtattgcacctttgcaaataaccatactgccataatttaaggatactcacaggtagtttccagactcgggagaaaaccaggcagagagaaataagcatgcctcaaattttgttcatgggagcacaccaaactgtcaaaagctgttgatagckcaaaagaaaagcctctttgactctgaaaagcaaacaaaggaccaacaatattccgagcaaaacatcaaaaagatcactccagtctgttagttcagttcacgcagtcagttcctgtcctgcctgatatcaatgaacattccagctcttcaagagtcctgaacgtccttcctctattctgatgtcacaatctgcaaagttatcagaaacctgcattcaagagcacctgtcagaactttatagctgatcataaaaccaccttctaaagaggaccaaaacaagacaacaattgttcatggatgacaaaaagttttagggtggccgcagttaaagacacaattgatgaggaaatctgttacctacgtggcacacaacaattttaacataacaattataattattactgataatgtacactaaaacatatcaggattgtaggagtctcccacaaccttggaacacataccaaaaacatatctacacaaatatagcccaaagaaagccaagcaccatttcgtatttgacaatattttctgtataatttttataccaaataagccaaatttcacctttacattagtgtactatgaatgttaaaccgaattaataaatccttatagacatatttactcaattttaatatttgaccacaaggtaagatttttatagactttttatagccctttacaatttttgttaaagagcaggttagtgctctaagagaaacccactgtgcttttattttaataaaatttaatttacagaaaaactggaggataccccttttagccaatatgtttacacacagaactgcctctaaaatcagcctttcacaactagcccaaaccttcatttttattttatccaactgaaaaaaaaatcctttaacctttcaaacttggcaaaaatccacattctcatgcctccctgcaatctttctaccaaaactatattttacttttcctacataccttgcatgtaaggacagtggcttggaatgttggaacctttccttggaatgttctgggtttcagcaccaaatgtaagacttgaagaaggaagaaagaaacatgaaaagcggctcaacagtcaaagacagatttattttggagaataaacctgagaggagcttctggccgatttctctcaggggcactctctcttatagactaagggtatttacgggtttagggagggagagcttatcacaggttcagaatgtttctggttggaggagagttttattttggggtgagaaggtttctggtcggcagggaagttatctcaggttggcatgtttctggttggagacaggtttatctcagggttggaatgtgtctggttggaggtgtcatttgtagtttatgatcatgctgacattagccattaggctgctgtttttggggtggatttaggtggtttttaatcaagaggaacttaaaatggcagtgtttgtccaagatggtgatgctcctgctctgtgactgagctcaagcgatttgcctgcctcggcctcccaaagtgctgggattacaggcgagaggcactgttcccagccgttggcccgttttctaaagccacgtcttcctctgcgatcatccagaacaacacagattctccacctcctctttttctaagctcttgctgcaaatgctggagaaagaacagtgagcgttcaggctgcagcttggccaaaaggccagcgagggagaagtaattacctcggcaatgacaggtgttccatcctttcttctcccctggaaatatcagccatccatcagccagggccaaacacccacccacatctggctcggaaagcagtaatgtaccaggaagcagctgttttcgagagaagccagccctctgtcagtttactagcttattctctcactcattcaacattcctgtgtttatcataccatcccaggggtggtgtggcttaaggatgggtctsgggctggcctggctgctcctgtttcccgactgccacccactagctgtgtgacctcaagcaagctgcttaacctcccatgccttggtttcctcaaccattaagtgggaggtaacaatagtggcacctacgcatagattgttcttggggggtaaatgaattaatacatgtgagggttggccaggcacagtggctcacgcctgtaatcccagcactttgggaagctgaggcggacagatcacaaggtcaggagttcgagcccagcctggccaataaggtgaaaccccatctctctactaaaaatacaaaacttagccaggcgtggtggtgcaagcctgtaattgcagctactcgggaggctgaggcagaagaataacttgaacccgggaggcggaggttgcagtgagcagagattgtgccatcgcactccagcctgggtgacagagtgagactctgtctcacaaaaataaatacatacatacatacatacatacahgtgacggtctcccagacatgcactccggctccaccttgaccaaggggatggggctcacggttaagtcaaactctcaggctctttctccagagaatttgaactctgagccttgggctgatgacacaaagactcaaatggtggctgcgcctttctcccccaagtgcacccccagagactgctggtgcttcctgctagctggatccccagagctgcttggtccctgttctaggtgaggccattcagcagtccttgtgattttctgagcatactttagccttctagcacactcctctcttcccctaaaattagccaagagtgggtttctgttgcttgcatcccaactaccrtcattgggacagagcccctgtgcttgagacaagcagaagatagacttctttcacctggggcctggcttcgtccaacagcagagcccaacctccagggcagactgacccgtgatgggcatgggagcccagaaaaaggccccatccagcctgtgggatcagaggagccttcttggaggaggtgatgctgggcgagtgttaaaggatayctaggcatcagctaggtgaagagagcagggaaggagactccagggagaggaatgtgtgagaaaatggggaggagagggaggaacggttggtgggcagcggccactctgtccactggcagagaagcagccaagtctctgatggagcccaccggagcagcctacctggcttctgtggtcactggctgtgaccccgccagccctgctcagcgctgtgcccagccctgggtgcagggaggtgcggtttgctctcagaggagcagctagctgggagcatccgaggccattagggacaggacgctaatgcatcggcgccccattgattctgcctggcttttgtgaacacgtctgcgctgactaatttgtttaattactcattgccgcatctgttctcaattgccctatgcagatacttagtctgtggctgggagccaagcctcagggtcccttttcctcttccaagatgggtggcactgaacgcygaggccacggcccgtcctgatgtggtcagagatgtcgtcatgtgccactaacaggcgtcgccaagaccagccaggtgcagaccttgggtgggtcctatggggtcctacaggaagcataggcatggtccctggtggtccccaggagcacggctctaacacagccgaggcatagtgtgagcaaagtcagacgcagtggttacaagcaaccccacgtggtctgcttcgaatccagcaaacttttgttttcagtgcccagctccctaagccttctttgtccttaccgtctcttcagaatctgtctgcttcaccctgaatcttgtctattgtcctggctagttcagctggaggccaggggtcggagacttagagaaatgaggagggggcgtggagcaggggctgaggcctgagcggtgagtggggctcggtattgacgatcagcgaacagtctcctggggagtcagcttgaatggggcctgtgatatctgcggccagtgccctcggtatgtcccactcagcatcctccccaggtcagaacacattttggggcagaaccgagttttctcttcactttcagactcaagtccagcttattggggcttatgaagacttccacctcatacaggatgaatgattctcttctccattccctctgctgctcgtggacactcggaggtgggggaaggctctgttcttttacttttctggttctagtttctcagggaatgaggcaggaggagagacatggaaagggagagagataccttccgtttcaaggaatatgcagtttggatgtctgaaaaagatttatggcagagatgctggatggaaaacaaacacacagtttgagagggtcctttttatttttattttattttatttatttatttttttgagatggagtcttgctgtgtcacccaggctggagtgcaatggtgcaatctccgctcactgcaacctctgcctcctggtttcaagtgattctcctgcctcagcctctggagtagctgggactacaggcacctgccaccacccctggataatttttgtatttttagtggagacgaggttttcaccacgttgaccaggctggtctcgaactcctgacctcatatgatcctcccgccttggcttcccaaagttctgggattacaggcatgagccactgcgcctggccaagagggtgtctgggaggccgaagcgggaggatcatgaggtcaggagatcgagaccatcctggctaacatggtgaaaccctgtctgtactaaaaatacaaaaaattagccaggcatggtggtgggcacctgtagttccagctactcaggaggctgaggcaggagaatggcgtgaatctgggaggcggagcttgcagtgagctgagatcgcaccactgtactccagcctgggcaacagagcaagactccgtctcaaaaaaaaaaaaaaaaagttaaacacatgtctaacctatgacccagaaatttcagttctgggtatttatgcacaagaaatgaaaaggtatctatctgcataaaaagacttgaataagatttttcataatagttgtattcaccataactaaaaatataagccacctaaacatctattatgtgaaagagtacccatggaatgtatagcttggatactactcagcaataagagaagtatgaacaagaggtagaatgcagttcagagacaaacacatgaaaaacacaaaagagaggcaaaaaaaggtggcagtggaaggaggaattctgacacatgcttaaccggagttccagaagaagataagacagtgaaggggacatgtgatagtcaaaggcaggccccaatcctcagatcaggaaccataacaattctcagagagaataaatgaacagaaatccatatttagatccatcagagtgaaactgcagwacaccaaagaccacaagaagattttaaaagcagcaagtacaagagagattaccctcagaacaccaacaacagattgacagttgacttcacaacagcaataatggaagacacagagctggatacacaaaggaaattgactacaatctagaatccaaaagattcttgaaggatgagggcaaaataaagccattttcggatacacaaaagctgagagcagctattgcaaagagactctcactaaagggcctccacaccaatgcacttcaggaagaaggaaagaggtttcggacggaaggtctgtgtgcagagggaatggctgtctcagaggcgactcaaactcagtatgtccagaaaggactcacaatctgctctcccagcccagcgcctcctgggactttggcctctgtggatgatgaccacagtcacttgggccagaaacatagacatcatcttgataccccttctccctcacctcccccatatccagtcacctccagtcctgtcatctttgcctcctaatctctttcatctctgcccttttctctccatctccatggccacccagctgccactgcattttgctcaccacctgcaattggccttccagcccctgaacccctctgatctgctcagcccgctctccacaccgaacccgaggctctctctttgaatggcaatctgatagtctcccccctgtttaaaacatgaaatggtatcctactaccctggggataaaaacaagacaaaaacgtttaagaggttagagaggtcttcatgaytcagtccccacccacctctcagactcacctcccgccccagcctctctggactcttttggcccctcatgggtgccatcattttgcccacataggctcttgtcygtgctgttttcactatagagtgggtccttcccttctttctttgtctaattcatgacactcatcgtttagtgcatttggcacttcctccaggaagcctgccttgacctccctgactatatcagctctcccccattaaatgttcccctcgtgccatggtcccctcatctgtgacattgatcacatgagcaatttcacatttattcatgtagttagttatagtctggatcctcctttggattttaagttcctataggtaaaagccttcctctcctttggccacygagatatctccaggactaccatggacatgcagtaaacattcaccagttgttgaatttatgagtgggtgagtggtgcctgccaccctagaatttcccttatttgaaattctagaataagcagattcacttctttttcacatccatgtgaatttttgttcttgtataaatgaatagtaagtaagagccataagaaataattggagaaagaaggaattgggaattgggaagagaaaagagagaaaaacaatagaggcagagcaggggctttttgcagtgatgcttggggagaagaaggaagccgaagggacagcaagtgggtagatggcaggwgactggccccaggttatccagagcagagctgagaccacccagtcctaaggggaaggggctgggaaggaagccactcagctctgccaagcagattaaatacagatcaacaagagcctttcccattttgaaaatgtacattgctctgtgttgctgggactgcagtgagacccaggaggcaggaataaacaattctgagtcataaaatcattaaggcatcaaacatttggatcgatgagcagacacaaaagaatatgcttcctatacacatgttaaaagcctaactcttgacaaggatctcaccgaatctcttgggcagaaggattctgtaatggaaagtaattgcacgccactcatctttgttaatttaagatgagtaaagggttattgattcactctttgtttcatgagctgttttcatattgaatttcagtgaacaaaaatatttttaataaggatttcatgggcttatttggcatctttctctcccaagctgcagagctatagatccaactgccagctggacaaacccaactcatctccagccatggcccctcctgatgtgagcctatctcaggttctggtaccacaatccacccagtgccaagccagacactcacgtatcaccctggatgccctccgcagcccctcacccatccaacagatgccccgtccctgtgcctgctaactccctcccacctctccagctcaaggcctccctcccacgtgctggatcstgcctgttcagacctgtcctgtctcctggtggccaaactggcctccccagtcagtccctgctgcagaaagtggtttctttctttctttctttctttctttcttttttttttttttttgagatgaagtcttattccatcgaccagggcctggagtgcaatggtgcaatcttggctcactgcaacctctgcctcctgggttcaagcaattcttttgcctcattcccctgagtagctgggattatagacatgcaccaccacgcatggctaatttttgtatttttagtaggggtggggtttcaccatgttggccaggctggtcttgaactcctgacctcaagtgatccactgatcttggcctcccaaagtgctgggattacccctgtgagccaccgcacccagcctggaaagtagtttctatagtacaaagccgggggtgctgctcccctgccccacacacctcagcacctccatgttgcttcctgtggagtagacactattgttttgtctgcccagtctcttcttttcttgtgggaatatgcttctggaatatttgtctggaaaaccctctccttttgataactgtctttgcctccctgggactgcagctgacgtgcttgcatgtgtgtgtgtgtgtgcgcgcgcgtgtgtgtgcgtgcatgcgtgtgtgtgtgtgtgtgtgtgttgggatcggcttccaaatcttcctactgggggaatgcccattatccattagatgccactcagtgggaagtggtgccccacccgtccgtggagacctaaggggcttaatagatcctccctgcatagccagagacggatacaatctgggctcagtgaatcggtgctttgactgctcacagcgtagctgagagcttactcccagaatggcgaaggtggcaaagagtccccatagctggtgttgttggctgccatcaccccttttatccaggggcacagctgaaatctgtgccactcggctctgctgggcaggtgggataaatctgccccagcctctgtgctgtccccatccctgctcctgctgcccagcagcctggagtccttctccagacttcctgtaactctctccccaagccaatgccctccctcgggtgaacaagggcccctccttgtgacccatggtgcctggcttgccttggccccagccctcctccctgtgccgaaatcatctctctgtggacctttctccctcatggactcccacctccttgtgggcaggaaccagcccttggccatgttccggctccctagtgcccagtatgtgtttggtgaatttgggggcatgggttggatgatcttggttcagttaccaaatctttctttcctgtccaatcagtcttccaggatctcaaccagttctctcactgcagagtctggagaagcccagccctcattgtgaagggagagccaccgtggtgctcacagcaagacacccagagtcccttccagacagggacacccctggagcgaccctgtttcagaatgaagttatctgggtgggaactcaccaagaatgcacagagggcgctgggctccaagcttcagcatatcctttcactggactccacacaggcctgcggagcaggtggacccaccattctcagaccccccagggccccatagacagcagatctgctgctttcaatcacacccactgcctctcatgccggagtgggggaaatggaacccgcaaagcctgcaggccagggagggtgggaaactggggtgatgtgagcccacagggtggagcactgtggactgaatgcctgtgtcccctgggttcatatgttgaacccctaactcccaatgtgatggtgtcaggaggtggagcctttgggaggtggttaggccgtgagggtggagacccatgctggggttggtgcccttatggttctcccatgtgaggacacagagggcagccatctacaagccaagaagagaggcctcaccagacaccaaacctgccggcaccttgctgtgagatttccagcccccagagctgtgagaaataaatttctgttgtttaaggcactcaatattttgttacagtagcccaagctgactgagcagatattcatatggaaagtgaattttgatctctacttcatgccgtacataaaagccaattccagattgactgtagatacagattggcaaagcaaaacagtacagtttctagaaagaaacaggaaaatatctgcatgaggtggtcaaatatttcctagagaggacacaaaaagcactaactacaaaataaacaatgataaattggactgcattaaaattaagaacatctgtttaacaaaagaccccacgaagagcgtgagaagccagagtgcagagtgggaggagaaatctgacctgagatgggaaattagaatatgaagaactccttcaagtcagcaagaagacaggcaagccgagaggaggacgggcaaacgacctcaacagacactttacagaagagatatccaggccaggtgcagtggctcatgcctgtaatcccagcactttgggaggctgaggccggtggatcacctgggatcaggagtccaagatcagcctggccaacatgtcgaagtgccatctctactaaaaatacaaaaatttgctgggcttggtggtgtgcacttgtaatcccagctacatgggaagcggaggtgggagaatttcttgaacccgggaggcagactttgcagtgagctgagatcgtgccactgcactccagcctgcgggacagagtgagactccatatcaaaaaaaaaaaaaaagatatacacataagagaatattcaactttattaatcattggggaaatacaaattaaagccaaagggagacaacactccttacccctaggaatggctaaagttaaaaagatgggaatacccatgtcaggaaggatttgaaacaactgcaactctcatatgctgcaggtgggaagtaggaggcaggcctccactccagaggaggggctcacatgacacacaccaaattgaggactagctagaacagggatggctggaagcagctttccataagacacacccaccagtgtgccacgtcagtttaccattgccatggcgacacccagaagttaatgcccctttccatggcaatgacctgatgacccagaagctaccatccttttcctagaaatttctgaataatccacctcttaatttgcatgtaattaaaagtggcaataaatctgactacacactacctctgagctgctgctccgggcacactgcctatggggtagccctgccccacagggagcagcccttctgctgctgctgctgctgtttacggctgcttcaataaaaactgctaactccattggctcgcccttaccttctttcttgggtgaagccacaaaccctcctggggtaagccccaattttggggctcgcctggcctgcatcagtgggagtttttggcagtataagttaagctggatacaagtatcctccatggtgtgacttctaggcagcatataatcaattaaaatgcaaacataagttaccaaaagacatgtacaagaatgttcctagcagcctattcataacagccagaactgggagtactccggatgttaccaagaggagaatgggtaagtcaattgtggtatattcatgtaatggaatactccacaatgagaacaaatgaaccacaccttcatgcaacagtgtggatggcgattcgagttcaaaaacaggcaccattagttggtcatattagaaataaggctgtgctggccaggcatggtggctcacaactgtaatcccagcactttggaaggccgaggcaggtggatcacttgagtccaagagtttgagatcagtctgggcaacgtgaggaaaccctgtgtctacaaaaatacaaaaattagctaggcgtagtggcacatgcctgtagtcccagggagggaggctgaggtgggaggattgcttgagcccgggaggtggaggttgcagtgagcaaagattgtgtcactgcgctccagcctgggtgacagagtaagaacctgtcagaaaagaaagaaagagaagaaagaaagaaaagaaagaaaagaaggaaggaaggagggaaggaaggaaggaaaagaaaataaaaggaaaaaagaaagaaagaaaagaaaagaaaggaaggaaagagagggaaggaaggaaggaaagaagggagggaggggagggaaagggagggaggggaggggagggaaaagataagaaaggaaaagaaaagacataaggttgtgttggccgggcgcagtggctcacgtctgtaatcccagcactttgggaggctgaggtgggtggattgcttgagcccaggagtttgagaccagcctgggcaacatagtggggccttgtctctacaaaaaataaaaaaattagccaggtgtggtggcaggtgcctgtagtcccagcttattcgagaggctgaggtgggaggattgcttgaacctgaaacgtggaggttgcagggagctgagatcgtgccactgcactccagcctgggggacagagtgagaccctgtctcaaaaaaaaaaaaaaaaaaaagaaggctgtgtttacccttggaaggtcacgagggagggaggtttctaggggttccagcaatgttctattttttgatccaagtactggttctcaagcatgctcactttgtgaaaatttactgggtggaactgtggggaaaagagagagatcagactgttactgtgtctgtgtagaaagaagtagacataagagactccattttgttcttgtggcccaggctgaagtgcaatggcgcgatctcggctcactgcaacctccacctcccaggttcaagcaattctcctgcctcagccttcccaagtagctgggattacaggcatgcgccaccacgcccggctaattttgtatttttagtagagatggggtttctccgtgtgggtcaggctggtctcaaactcccgatctcaggtgatctgcccacctcggcctcccaaagtcctgggattacaggtgtgagctaccgcgcccggctaatttttttgtattggttgcagtgagccgagatcgcgccattgcactccagcctgggcaacaagaacaaaatggagtctcttatgtctacttctttctacacagacacagtagcaatctgatctctctttcctttccccacatggaactcaatttgtgtttttcaaacaaagatgttacaccttgcagtttgtactctgttaaatgcttttaaattttacacacaaaactccaagggatcacatgagtgacagaattgaaacactcacactgttttttgggtttggaaaccacccccgctccatcccacacaggggcttgcggatccagctctgtgcccggcccccctcttgcacacatccggaaagcaggtgggcagggaaagcaggtgggtgtggtctggaggagagaggggcacaggctgagaatggtgggggggtccctgggccctgcatggtgagaggaggcccagggcagggccttctaaaatccaaggccccgacagcaggatccctggctgcctaggtctaggggcaggaccgaaggtcatcgaggacgggtggcctgggattgctggcaccaattcctgttacctcgagggtggggcctgccaaaaggagggattaggatgaggaggcaatgcctcccttaaggaattctgactgtgactcggtcgttgtagggagggggctgtgcatttccatgcaggcaagtcaggccctgggcacatcctggctcctgtcttggaagctggtgaacacccctagccagtgtggccgaaggcagcattctggaccagtccaggccttctgcacgggtatagcacagccctttgcctctcactatatgggctgtgccaggacatagtaccttgaccttcaagttcttttttttttttttttaaattgagacagggttttgctctgtcgtccaggctggagtgcagtggcacgatctcagctcactgaaacctccgcctcctgggctcaacggatcctcctgcctcagcctcctgagtagctgggactacaggcacctgccaccatgcctggccagttttaaaaaatattttgtagagagttgcccaggctggtctcaaattcctgggcccaggcagtcctcccacctttgcctcccaaagtgctgggattacagttgtgagctgccacacagccccccaggttgttatcactcatcacagaatgttctcagcttgttcttctgcgtgtggccaacctggaggcgcagggctgggttcccatgcggcctccttgccacagggtccaggaaggctgtttccaaaccctcttggcaggaagatacacttctggtgggattcaggtggaaagagactccctcactactggagagcaggctggggtctgtgtgcttggatagttatcccacagagagggacttcacaagcccgagagagaacagtcccaccaggaacagaggaggagtgaacaggacagagacacagacaggcaggacttttctgaacagtcatttgaaccagagaacaatttttcaatggacaataaatgttgcatataattgaaatctcggttacattccctgaaaagtgctttctgtgcaacctgagataagagactctcctggagctgcggtttcctcatctgttacacagtggttataacgccttgccgtttctatccgggatgactgggaaattcctctggaaaacaactacaaatgcaaaggtgaagtatttgatgatgtgtatatgagcacttcccagtgggttttgtggtctgtgggcatctccataggtcaataggtcttaatagtttaaaaaaagattccttggttaattaatttgatgaaacactgggttaaacacagtcaagcagatttccttactgcaggacttctcaaggcctttagtatgttaatacgcattgaaaatcgccaggagaggggtgttctatgtggcatatctcagacatatttacctagagaagggggtgtggtatgtgtgcgtgtgtgtgtgtgtgtgtgagagagagagagagagagaaagaagaaggaaggaaggaaagaaggaaggaaggaaaaggaaggaaggaagaggaaaggaaggaaggaaggagggagggagagagggagggaaggaaggaaaaggaaagggaaggaaggaaggaaggaaggaaggaaaaaaattcacggggttagtgcagggaaattctgtggtaaattttaacagcaagtgaagaatgctgttccacatggatgcaggtattttttccaccatgccaattttacagtgcaaactgaatctaacaggttggattaatttggggatatgcattgctccactcagacagtctctgcatagattgccagggcgatgggaactaattcagaaaagcggaggaagactgtggcttgcaaagcccgcagatacatggctgctttgaggattttcttttgctcaaaggatttagggtgggggtggggagtggggaggacgggaggtgcttcttttgcttagaataaaattgcaaccttgaggccaaatgacagaggcttctcagcgtatggctggagaagtgcaaatg

SEQ ID NO: 95170 - DNA, 749760 bp, Homo sapiens
  misc_feature (1)...(749760): n = A,T,C or G
gttaaccgagagtttttatcatgaatgaatgttgaattttgtcacataccttttctgctttaattgataggatcatgtagttttctttaatctatctttaatgtaaaagagccttaccagtcatatttgctatgactatttaatcctttttttttagacagcgtctagctctgtcacccagcctgcagtgcagtgctgcaattacagctcactgtagcctcaatttcccaggctcaagagatcctctcacctcagactcctgagtagctgggagtatagccacacaccactaagcttggctaattttttttttaagagactggggtctcactatgttgctcaggctggtcttgaactcctgggctcaagtgatccccccatcttggcctcccaaaatgttgggatgacaggcataagccaccacacccaaacttaatcctacttgttaaatagtgtattaaaacaccactatatggccgggtgcagtggctcacgcctgtaatcccagcactttgggaggcggaggcaggcagatcacttgaggccaggagtttgagaccagcctagccatcatggcgaaaccccatctctactaaaaatacaaaaaattagctgggcgtggtggtgcacgcctgtagtcccagctactcaggaggctaaggcaggagaactgcttgaatccaggaggtggaggttgcattgaactgagattgtgccactgtactccagcctgggcaacagagcaagactctgtttcaaaaaaaaaaaaatgccactgcatgttcattttctttcagccactgaatatagggctttttgtaatgacaaaagttattattaggggacttaagagattttctatggttatatatattttcagaataaataggctttgctaagtcttaagttctttaaaataaacattgcctcaaaatttaaagttaggatgattacaatgggttttgttgttgttgtacaaacattcacttgagaagttgaaagcccagtcacaaatgtgttttgtctatacatgaaaacaaacgaagggtaaaaggtaaatgggctttgtatttatttcctagggctgatgtaactaagtacatccaactaaatggcttaaaacaacaggaattcaatgtctcacaattctggtggctagaaatctaaaatgaaggtgtcatcagggttatgctccctctgaaatctgtaagggaagtttttgcctcttcctagcttttggtgtttgctggcaatacttggtgttccttggcttgtagatgcatcactccaatcacatggctgtcttcttcctgtgtcttcccctcatctttcctgtgtgcttgtctgtgtctgtgcccaaacttcccttttctatgaagacaccagtcatattcgattaggacccacactaaggacctcattttaactacattacctctggaatgaccatatgtccaaataagttcacatcctgagcttctaagggttagataccttctttcaacattacttcacaataattcaacccataacaggcactactcacttttaacagtagatgaagtagattgtttgtatagaaggccacaaatttcctcctacctttctattcatgtccttttgcttcctgactttgctgcttctcccatcaagaactggagtccatttccacctcctcttgaatctgccctggccttgtcttgctttgaccagtcaaatgaaatggaagtaatttcacacaactactaagtctaggtctccaggtgccttgcaattttcactctcactctcctacctgagatctttttgtaaataagtctgagacaggctgctatagagattagtgggtgaggtctgagatgctccaaccaacagccagcacgaattgccaggcatttgagtcagggaatcttagactacgaagccccagctgagcatctggattctggtgctatagatgcatgagtgacctcacacagaaccaacagaagaactactcagctgagcccaccccaaacttctgtcctactgttttaagctactacgttttgaagtgatttgttacacaacaataaatgattgatacagaagaatgttaaaagcttgagtcttctgttgtttacagtctgaattgcctcaactaaatcacttaattctaacagcccctgcttccttttttgtaaaatgtagatattttactcatctgtcaccactggttccaggtttcaggttttcagttttaatgaataaaaacgtaagggataggaataagaggaaattattagctcaagtaactgacaagtcaaggagttggtttggcttcaggtatgacttgattcaaggactcaaatgaaggtatcagggatttgttggcccccacctctgtattctttttttcttcttgtgtcagattctcagatgggcttgccccaagtgagggccctccttgcagtatgaggtttaagttgatctggcctggcaaacctaaaaggaagtttgactttcattggacctactagaaatatgtgcccatccctagaccagtctggtcagagggatgaaatgctccatttggtcaggactagggcacgtgtccacctaacccagtgaagtggagaggtggaggtagggataggggaagaaagggttaggctcaccaagaccatctggggagactggcacaaaggaaaactgggacactattactagaagaaaagaaatggacgctgagcaggtagaaaataacagatgttcacttcttattacataggctgggtaaacagataacagtaatagcttatacttattaaatgcttattaggttcccagcactgatctgaatagtttatgtatattaattcctcttattcttctctatttaggaagatgtatggttattatagtattcctactttacaaatgaggaagccaaggcataaagtgattaagttgcctatggtcatgcatatatgagtagcatcagaatctaactagactggcttgaaagctactgcctttaacctccagtctatattcaaaataggtcaccagcactatggtaggcaggattctaacatggtccccaagatccccaacccttggcatataattccttcttcttgaaagtgggtgggacctgtgaacatgacaggatagccactcccttgactaggttacattatatgacaaaagtgatgaaacggtcactctctagactcctgtaggaggattctcctgctgactttcaaggagtaagctgccatgttgtgagggcgccgtgtggcttagaccactagttgaaagcagcccttggccaacagccatcaagaaaatagtaatctcagtcctacaaccacaaggatctgaattctgtcaataacctgaatgtgcttgaaggaggagcccaagctccagatgagaaagcctggcccatcccttgatttcagcctgatgagcccttgagcagaggacccagccatactgtgccccagcttctcacctctaaaagtgacaggcaatgagtatatatttttttaagctgctaaatttgagggtcatttgttactaacgtcagcatcttctctttgtagcctttttatcttccatcagggtagctaggctctccctcctttggcactcccagggcttttcacaccaacttgctcactgttatcatagagctcccatatcacctgggttaggattgtaattaccaggtaggagcatggcagggctactgctaggtcattattgtgtgactagcacttgaaagtgtctattatatatgaatcgctctgtaattggttgcagaataaatgaaaaggcatctgtgatgtatgtttgcaaaattttatcttttgtaggaactggtggggcctggattgtgcttccaagggtagtttgggggtaaccttcagcctggggtcctaggacagtcaccagtccataccgaattggatgtgaagttttagcatggggcctcctacactactaaggtagtggtaattcactctgcaaacccatatgaggttttccccgactctgaagctctttttttacattccacattttggtgccttctcaagccattattctgttgccttgaatcacagctgtggaggcaaacaggcctgggttgagaatctcagctctgctgcccactagctgaggatccatcattgtactcttctgagcatgtttccttgtctattaaatggggaaaataattctcacagctggcagtattttaagaactccatgagagaacggagcatggacttaggaaggtatgctcccataaggcatgggggcttgccctttttgttcgaggctgtgttcccagtgtgtccctcaaacagtaggtgctcaatacatttgttgaatgagcaagcagtttatggcatgaattcagcacaatgcctggtagacagtaagcattccacaaaggacagcttttactgtccatttcacagaggaggaaacctcacctgaggacgctgacacaagtatttgacgagtttttcctattttatcactcgacattaagaaggtagtcagggatgctggggtaatctaacttgaggaacgaatatccctcattacaacacttccaagaaaaatggccctcgcaatcctttataaagaagtcaggattccaataaaaccaggaaggaccacattccaaagcaaacaaactcgcctcattccccaccctgggggagggtgttcacccccgttctgctaaagatagagctagggccctccccaggaacttcctggcttttattagtttgtaatcccawacgtaacttttcaaaggtttttcttttggaagtgtgggtgtgaaaatgcttccttaatcacatcgaacgggaggatctccgaccatctgtactttatttgaaaacctagcatccggttgggatgtttgggtgggtggaggaccctgccgtgttgggatgaaacagcagggacacgtttaaaacacaagaaccatgcgcggtggctcacgcctgtaatctcagcactttgggaggctgaggcaggcggatcacaaggtcaggagttcgagaccagccttgccaaaacggtgaaaccccgcctctacaaaaaaaaccaaaataaaacaaaaaacaaacaaaaaaaaccaccaaaaaaataatcagccgggcgtggtggcgggcgcctgtagtcccagctactcgggaggctgaggcaggagaatcgcccgaacccgggaggcgaaggttgtagtgagccgaaatcgagccactgtactccagcctgggcgacggagcgagactccgtctcaaaacaaaacaaaacaatcccacgtcaagatcgctttgaaacacaggcagaaaaattaggcaaaaaatgtcaaacggctaattaccttggctcagttacacatttactcgaaagcccgcctcccccacttttagccccagcgttaagaatgtaaaatagggcgcttagaagtctaagcgataaagatcttcttaccgagagccamgggacaaaactcattacagataagcctagtcctcccatttcccccggacgcctctccccgattgctaaagaagcagccgctccccgggtagctgccaggaaatcagtccrgccccgcggcgctgctttcaccctgcagggkgtaagaggcgcacttcctgcgccctccccgcggccaaaccggggtgcgggaaccttctccagagaagctgcgagttggggaaactccgccaccgatccatcgtggcgccgggaaaggggatgcggggctcggaagggctagatttcgcaatcctgggatcgacattcctcccctcccccactttccccagccttggactgggccaatgaaagcccgaaaaagaaaaaaaaaaaaaattaaatctcaatgtagccggagtgcaaaggccgctcggctttgtttcccggcgggggaatgcgctgtgttggaggcgcgaacaggagccgcagacggtgagccccaccgctgcaaatgccagggcagtgaagccgaacagaaaaccccatcgctttaaaaaggcagctgtccgccctccccctttcccctcgccagggcgaggggcccctcaagtccgggatccgcgagctgcgcggaggatctcgccaaacccragcaccgtgcggcgtcttttaagagctcgaacaacgggaatccagcaaaaaacaagccggccccagaaggcagcctccctcctctctccgcgcacgggctacaatcgcccccagtccccaaactgtcccagtagaggccgcgcggagagagcagagccgagggacccagcgcaaggcgggagccaagcgcggctgctttaagaacgcggagagcgcgcgcccgccgccagctggcccgggctgcgcgcccccgccgccaccgcgcgccccctgttcgctcgctccttcgctcgccggctttaaagtctctgccaggatccatgctcacatgttacttcctgtatggaggcatggccagtttccagccccgcgctcttcgttccttcccagcctgcgccggagccacaactttcaggagcatggactgaaggcgccctcgccccagcgcccctctgagatcctttgtgttttcctccgtttcctccggccgtttctattttggggggctctccgctccccctgcctctcccctccccttcccctctcgcaaacatgcctccttccttcccggggccctggaaggagctgcctgcctgaagcccggagacgccgcgccgcgctcagccccgccgccgcccgccggctctcgggctgtgctgcgctgccgactcaagttggggatcctcggctgctcgccgccgccgcccgcggtccctgcctgccccaggcccggggcatcgccgccggccgccgactccgcgccctgcccgatcggctctctcctttttaaacggaaagcagcctttctccgccgagaggatcgtccccagcgtggctctgcgttcccggtcactttttgagattttccggggggcgctcggcggcttcccggattccaaggggactcgggccgccgagcgcggggggcccgtggagcgggcgagccggggaagcgccccggcttagcggaggctcgcacggaggcaagaacttattcaacaagtttacctccctgctttcctcttttcgatgtgcgttttcggacatgcggaggttactggaaccgtgttggtggattttgttcctgaaaatcaccagttccgtgctccattatgtcgtgtgcttcccckgtgagtgccggccgccgaggggatgcggccccggccggcgcgcgttggggatgcggagttgtcgcctgggcgcggagctccggcgcccgtccgggagaccctggagagggtggagggtggcccggcgcccggataggagaaaaggattgctccgctggcttggatgatgtttagggaggcaggctagtggtcgaggaaggtggaggcaggggctggccggggagggggctgggggacgcgggggtctgctcccgctcccttttgggggtcctggggagctggaatcgggagaaagggggacttgctttgctgactcgtcgccgatcgggagaactcgagttgtggggcggttggggagactgaggccatggaaaggatgcttctgtgggtttggggggcccgggatgagccccctcgctctggcgggtattgaaggaactcagaaggtgggggtttgctttgctgttctccatccctttgggagggctaggtttcggggaatggaagtcggaggctggctgcggaggactgaggatgtgtggggagcagcctgcgttctgggtcgggggcgtcctccctctctctgggggctggggcgcgggcagcacttcggtgccggcgtgaggcagcctccttgggcgcagtgagacggcagggcgcaggcggtttcggagagatccgtgtctcccctagccccggcccgtggccctttccctccgctgctctgctcgattggattgcctgggtctggacgcggggagggggcgggggcggtttcggcggccggggcggtttcggcggccgggttgctgttcgcgccggggctgatttttttcctgtctcgcgcgccctgcctaccttcatctttgcccttttgcaggctgttcgcggctggcagacccagtctcgctcctttctggccaggttaagacaggaacaatactggccgttgataagaataaatcaccgcacgtaacggtgtgcggctcggcgaccctccacttccagctctcagctggcagttccccctcctctctcccctggggagggcagaggccagctgcctccctctcctctcttgcaggtcccccgggcagcagccccgagctccctcgtagctgtcccttggggtggaggccaagtcctgccctagcccggggaagggctggaagaaggggtgatttgcttttcatccctcgctcccctaaggacagagaattccccgtttttctgccctctcatccatcaactcctgcatacccggaggtggaggttatctgaatcaagaaaaagaggaatgtgccccgaggtctccgctctgcctggttacagacgcctgtcctcgggcggctggagcgcccgtttttggtgcagcgggtcccttagtcccgtcgtgcgacccggagcagggcgcgcgggagccctcgtcgcccttggggatcccctcgggggactggcagcgaatgccccctttgcagaatcggggatggcctcgaggggcagaaagggaaaacaccgtctggtattctgcacccccttttctctctgcgcatcctcctgcccgcggagcggcacggagctccagcccagaaacgcagctcggaggccgagcgaggacgtgcgtccacactcaccctggggtttgcccactggagtcctgcctctacggtaggacactggggcctggggtttgcccactggagtcctgcctctacggcctctacggtagtgtaggccatggggacatctccccttagaaacagctgccttcattcactaaaagatcactgctcagtatttgggttaatcatctctcctttctagtctcccctgctttaccacggacttgacgactgagcgggctcaggtgcacacaggggttgagctttgtgagggccactctttaatgggtgcagtgggaggtcgtggagggctgccttgcaaattagaggaatttccaattccacttctgtccttcttgcgctcggggatgcagtcagtgggctgaccgtggttttcttttccctggtgtgtgaggaagcttgagatccaaaatgggactgccagggaaccagccttcgtggggcttggaccattttcgtcttctcattttcttttcgcgcccacgctgcgaggtaaatagcccctttcctggtccgggagccgaggggtgtgggaaagggaaaggacagtggtgggaggcgcagggaagagggcggtttggtttggaaaagtgcagcccgagagggagcagcaggctttggagcaaggtaaagttaaaatatcagagctctgggagacgctggcttttcgttttccgaggttgccgcgacgccgctggacctcagggggcgcccccgagccactggtggggctcctgccacctccacactggtcggcctcggccacctccacgcctcagggatggggcgcgcgtgcccgggttcccaggctctggggctgcagacgcgccttggcgcgaggcggcggcctcggcctggcgatgctgctcctggctttctcgaaacccgctgggggctggagttagccttgggacccctacttcttgcctgctatgacctcgaaagcgcttatctgtttgacatgagggataaaaatgcttctgttttggagtagggtcgtccttgtgaggtcttagccaaaatccctttttatttagtatttttgtgtttcctctcagaatcataactcagcataactcttcagttgcatttgagttctcagctcctgttcaggatatgggttagctgtagtttgggcagggttttggaaacacagccctggcatgagctttttcccagtggattggaaacagtggattttagtctttgaacagcagtgtggcaggtttgggatccattcagggttaataatgcttcaagtgatgctttccaagtgcaaagctaagagtgttaccaaacatgatattaggcatattacattgctatatacatctttataaagcactgtagaaacgtttacaaaaatagcaaaatataatggatcccccacccaacttcaacactcacaactcaatcttctctcatctcttcctccccaacaccttattattttaaagcaaatcctacacatagttcattcaaactctgatacatatctccaatcactgggaatttaattgcctctgacacagtataaaatatgttacttcagagtgttaaccttttatctagtttacattctcaagctcagcagattttttttttaattgatttttgtctttcggccctcagagtgaaactctggttttgatatgttttgtattgtaattacattatatctaggatgctgccattggaaacagttcagatggataagctcagctgtgtaccttggatgtgtcagaattggaggctccatgattaatgtcgggtgaatcatgaatctccctctaagctgtctcttattttatttgcatgtgcgggctttagttctgatgggcatccgttatggccttaggaaaaggcaaaagtaatatttggaaatcagcaatctttctctttacagggtgtgagattgtacaggttttttttccctctccctcatgtatcatgtttgaaaatgaagaatctttacccagtctctaaactggrttcctttgacacagttatggaataaaatctttgatgtttccttctaaacagtgttcacatttgagggttgatggacttaaaacactaataaagataggcataaacagggccttttggaaataggggaagttgctgttgttgctgaaagaagaaaggtcataggaagggttggctgatgtgggaaaagtgactattccatagtgaagctttgagtatctcccattaattatggacctgttttcactgaataaaagattatgttgttgtttacatgaagcgatccagcgaatgctgatgatttaatgcagcaaaacaaacagccctttcagatttgcctttctattctaaacagctcccaagttaacagagtagaatcagttatacacctgtgtgctgattgaaagtaacttycttggcattcacgtgagatcacttaaaatgccctagagtagttactcaggagcctctcctactcccttgtctccctgccttttcctggagacttcttttctttttttgagatggagtctcactctgtcacccaggctggagtgcagtagtgagatcctagctcattgcaacctctacttcccaggttcaagcgattctcctgcctcagcctcctgagtagctgagtctacaggcacgtgccactatgcctagctaatttttgtaattttgtggagacggagttccgccatgttggccagggtggtcttgaactcctgacctcaggtgctctgcccacctcggcctcccagagtgctgggattacattgctactgggctgttgctttaacactttgcttttacagtgacacgttgtttgttctttttaaatcttgatttccattcagcatgtgggacaatgaaatgccatttctaggcaggttgaagattgcaatatgcgtacattctgaattaagagatttaaacaattgtagttaatactgtcatcctgggttacatttcatgtggtcacattccataacccggagcttatgggaaaaatttagggcatctgaagttccctctaaagcacttggtgcccagaaattagcccttggtttgctttggttcagagttgacctctgttagatgttgggtggtggtcactgaaactgttttcggctgtatcctgtttagagaataaaagggctgttttattaatattatagaagccaaggagtacactgctccccacctttaattttccacctgagcttgatctaggttaagcagccactgacgaggtagagggagtggctcaggagggactcaggaggggctgagaagagcctgctctgtgagggcttcttgtgggatttggcaatagtcactgaatttgtcccagaatgaggttgcctgtgcaaatgattaaaagataaaactgggcactgtggctcactcctataatcacagtgctttgggaggcgggagggtcacttgagcccagaagttcgagaccagccagggcaacatagggagaccctgcctctacagataataaaagaaaaattagctgggtgcactcttttgtccccactacttgggaggccaagatgggaggattgcttgagcccacgaggttgaggccgcagtgtactgtgatcatgccactgcactccagcttgagtgacacagtgagaccctgtctcaaaaaaaaaaaaaaaaaaattaaaagatcaaatgtaggctgggcatggtggctcatgcctgtcatctcagcactttgggagacccaggtgggcagattgcttgagcccaggagttcaagaccagccatgtgcaacatggtgagacctcatctctacaaaaaatacaaaaattagctgtacttggtggtatgcgcctgtagttccagctactccagaggtggaggacaggactttggggctgcaatgagctgtgatggtgccactgctctccagcctgggcracatagtgagaccctgyctcaaaaaaaaaaaaaaaaaaaaagttcatttgccagtctgagaaatgggagcaaccatcttacttggaaacaaactatatccaggactagggcaacattctgtgcacttaaaaaatcaactatacttgtgtaaaaaagagttatcggacttggctttgacttatttttggtattgtgtttatgtggagttgtaaccaacaaaatcaataaaaaggataagtatattccagaaacctgtatttacgtctccttgcttttccctacaatttgcctgttgcaaatttctaagaacatgggattgttaatgtctctttaaaagatgtcttaaagtaatacaggtaaatttcactgtcaggaaagtctgtgatgattgagatgtagaacagataaatttgtggttaactcagtatgaaaaggattgttaggtataagtgatggctgtgcaagattgctttaagtagctagagggcttcttgagtgattgtccccttctattgggacaactataattggagggaccatttcacctggtatcatttgtggcaagatatttggtgttttgacagaaaaatatattctgtgtgagatagcttgctggatctatgcaggcctaaggtttttatgattgcagcccttaatacaactgtaaaaaaaattttttttttggccyggcatggtggctcatgcctgtaattccagcattttgggaggcccaggcggacggaacatgaggtcaagagattgagaccatcctggccaatatagtgaaacccygtctcttctaaaaatacaaaaattagctgggcatggtggtgcacacctgtagtcccagctactcgggaggctgaggcgggagaattgcttgaacccaggaggcagaggttgcagtgagttgagattgcaccactgcactgcagcctgtgcgacagagcaagactccgtctcaaaaaaaaaaaaaaagattcgttttaagtgcttccagggataggaagaggaatgacagctgatgaggtttctatatgtgcctggtttctgttttggaagcctcccaaacggaattgggtagtgtttcacttgtacttgtggtgggtgtggggatggaggtaacttacacattgaatgaaaacttcatgtgtcagccagttgatgagarttgccatactattttgtcagcatgtagcaggaagaaaaatcttttaggagcctggaacttgttaatgcttttytatttgttttctaaactaggtggctattgagagttatacagaacatagcaaaataggtaagaatatggcctctggagccagcctacctgtgccattgctagccgtgctaccttagaaaagttacataccctctctgtgcctcattatttttttcttcctctgtgaaatggggtggtgatagaagcctaactcctaaagtctttgtgaggcttgaatgagaatgtatataaggacttagtgctgtgcatggtaaacagtaagtgctcaataaccatttttttaaatcaaaagttttatatgtttatttttayagagaccgggtctctccctgtgttgcccaggctggtcttaaactcctgacctcaagtgatcctcctacctcaacttcccaaagtgctaggattacaggcctgagccattgctcctggccaccgtttttaagtgttcttaagagatttggataggagtgtatggaaagcggacggtggaactgaaaaggacaactgtatgtatagacaactttttgaaaaattgtataaacatacgtgatgggtttttgtatctgtctttgctgttgagggtgaggaggagtagggatcagcatggggrcattctatgtaagattactaacaggttacattttgaggtttaaataaatgagaaagtcctcatgaagtctgagatatcaccttgcccacattgcaaaggaggtctctgctttctcagcttaaagtgggaaaaatgctttctgtgggcttaaaatgtgtctcataartcttccaaatccctgtgtagaaagagtcgcctagtcctgcaycctcagatgttaattcctcttctcaggctttatggacagtgtggtaatggagggaaataggttactcattactgggattcaatttggctccactgatgggaagcaaacagtagttgggtgtttgcttttattttacacttgtgtgacacttgaacacattgatgtcctgtctctatatgttcatggattcagagctacagagcatatgagagagaaccaaacactgatgcacacctcgtaccctctaatcttttcttttttttttttgcagactgaaatcagcatgatatttttctggccaaacaacaaaatgtgattttaaactactcagtttagctatttttggggagtagcaaagtgacacagttggctgctgaattctagcaactaaaaaagaaaaaaatgaaagcatagttcatggaatatgtaacacttccatgtaagaaaataggacaactggtcttatttttgggtctgtgatactgtctttctaagtgagtgaagcagggtgttgtataatgcagtggatatacttttgaggaattcatactagttacaatatacatctaagaggtatttgagttttcatagcattgctgcctcatgaatcctgcagtgcacttaaatcagatctgttcattaattgggaatgatttggataaggggacacagccataagcaattgaccaagcataaaagcatagtccagattagtgaggaaatattactgactttttaaggttgtctcgagaactttttaagaattgtcaaaaggatttatttacaaagcggtggttatttataaatgagttctacctgtttttaaaatgacacttttccagaagcgtttctcttcagtaagtgtggaggcttagctctgtctgtgggtagctaagggtggttacccaacatcttacggaagtggggttgggtggcgctggggctctgggagtttcagatatacatatctcttattcagaatccacaccaaaaccacagagacctgggttgaaattcttagttcattacagcatttaccttgggcaaatgggcctcacccttttaatctataaaatgggaatagtaattataatagcctacgcttaccaagcacatgtgatctatgccccgtgcttgagcattttatatgcttttaatcatccctggaagtatgaaccatgattatttccactgtagggttaggaaactaaagttgaagaaggtaggtccaaggtcaccggggtagcaaggcgcggggagcggtggggggcggtgactgtaatatgtttctctaatcattgctcaggattttttttaaattttatttcagaccatttgctttttgaagagagtatggaaactatttttcctaattgcacaggagggccaattgaaagatctagctttttatgtatttcaccctgttacttttcccatataagcaagtgccatgaacactgggtggaataaaggtgtcttcctgtacttgctacaattaaataagtaagtaatgcaattagtataggattttatttggttacgttgaagagatgacctttcagcaaattactttagcttctgaataagctgataataactgtggatagagtctgaatttgttggtggtgagtttttttttgacactactcctcttccaaattacctaaattgatttgctttgtaatttgagaacttttgtttggggctttgaatatggttactttgtagtaatgcggtatttttactgtcccatgtatatcatctaagtgtgggcagcaggctctgaatcataacttcaggaaaggtctgagggtgttgtgtttggcaagaaatggcttggattctgcatttttcctctggagtttggaactagccatgggagccagccaaaccagctgtgggatcttgggcaagaccctcaatttctttcgggttgtttgcctcacccttcactaaatggcttctaaaatttttttctggaattttagagattgttgattccaggctaggcagtttggaagggttatggtctttttgcrgtatgcaagtcagatgcccaggacacactgtgatttgtgaggtgcacttgttgactttttcctgtgagrgtttgcttcctaaggcgttgagaacccttccattatcttgctaaccttgctacggattatcctgagggagtagcagacaaggtggtgagtggaacttggttaatggaatgcctataagctatgtttttgtttgtttgtttgttttttaaacatgaaaccttatttcttctggagaccaagttaaaaaaaatatggagatttgctcatgtcaacaaagttatgtgtatagcgtttaaaactatctaatgtgatttatgattggagtggtgggggcagacgtctttgtctaaaatgagaaacgaagctcgttctggatcttgtgtctggaaaggagaaatggagaaaggacaggcatttatttgggttatctggaattctacagatgttcttttggccatactgcatttaaaagaaaaaataaattaaaaattaagaatgcattaaaaatcagtcattttgcattcatgccatcaacaagtttctgggtgcctagagcatgccaggtgctgttctaggcactgggggagacaatggtgaccaaaacagatggaagccccggccctcatgacagcttcccgtgaaagtggggttactcttgaaaaataggaaggtctagcagcctagggcctatgttagtgcttggcaacaacattaacctgaaattaaatagtgctaccccttgggatggggcacacacctgtcccgtagtggttatttacaatactcagctggtccctggaggtgtttgtcacccaagcataggtgattttcctgagggacagattttttctttgggcttgtttggggttttgtattgcctggattggtcatgtataaccatgtgcgtgggcacatgcgctagtgcacacaggtgcattgctggctgatgacatgacttctttcctgtcaatcttgcttatgaagctgaagctcacctctcctggctgtgtcgttttctggctctacaaatggcctgctccttggatatttcacagtcatgtgttgacttccctggttgatttgaatttctgttagcttgttcagttaagacaaaagtgtgttttgaaaaatcgctcatttaagagctggttctcttgatcagtttcttgttatcagatggcccaagaaggggtatgatgtcgggggacaagggggggaaagccagtgactattaatagagtaggatctgagtacattaatattggagatgccatattagtgggtcccttgctacttakttttttttacacaatattgctgccctcctaatttttgcacatggatttccaataaatgatagaaatagtgcacattttaatttttacaacaacaacatgygaaagcctgaactttgtacaatagagtggctagcttttgactattacagatggaagatttgaggggatgattccttcacccttgttttagtacatgttcattaagtggtcaccgtgatacgcaatacatttacatgaattccccacatgtgattcagagccaaattaggctatgttctttgagggcaggaccacattcctccttgtgctgtgtctttggtgtgtcagtagtggtagtcatgtatgagggctgacagaatgagtagataatgctcttcaaatgattataggatgttttagaagacattgatgtcactgtatgtagtttcaagatatctcatgtttgtatattgtgtcttaagagatacactatccaaggttaatatcttccttaagagaattctgagtatatatattgtcatggtggttgaagtttatctttaaaaagagaagctaaattcgtaccttctgttggctgctaaggtatctgttgctgagaacgggattccattctaattagaggacaaatgtctataggacagcagggttatgttttgatggttgcaatggtagtaaaccttttttttttttcctctcttgtggaataatttaagctaaattctgtgaatctggtggtcattgtatcraaagtggccttggctsttaggtgattcaggagaaggtagccctcttattagtgctttgttccagaaacagtgaatgaggtatgcagagagcagcagagcttgcctcagctgacagtagagcgcaaaaatgaatgccattgcccagtaatggctttgtgcaggttggactaggagaagggcttgcctgagctgatcatttttgcttggttgacaagtactagttggtcaccagatctactgcccttgatgagacagatgttggctggtgcatcatggtgattctaatgtgcacaggcagaagctaagttttctagaacacattgctagtcaatgcctgccctgttttatccctcttcccaccagttgttttctcttctaaaactagtcattttctcttatttacatgtgtgtaaaggttacgagtggagggtgcagaaaatctcttgacagttttaggcactagcttctcattttcccagtcagtcaatttgggcagaagctgctgaaattatttcatgtgatagaggtttgcatgctagaggtcttagtccattttatgttgctgtaacattatctgagactgggtagtttataaagaaaagaggtttatttagcttacagttttacaggctgggaagttcgagggcacggccctggtgtctggtgagggcttttgtgctgcatcataacatggtggagaaggtggaaggggaagtggacatgtgcaaagagaggcaaaacccaagtgatgccctggcttcgtaacaaccccgctcaagggaactaatccattcccacgagaagtgactcgggcttgccagaatgagaactcagtcactgcctcgagaatggcaccaagccattcgtgagggacccaccctcatgactcagacaacttccactaggctccacttcccagcaccaccatgttgaggatcaaatttcaacaagatttggtgaggacagaccgaaaccatagcagcgcataactttagcgttagagttctttctgaacatattttaggatgtggtttttagaagaacacgtcagttgctagtgaagtttcttaactgaaatgagggagttgctggttcttgaaatttctgctgctccttatgatgcgaagtggaggtaaaattgatttctggggagtctaggggaaatgtaagcactctgaccacataaacaaaggattttgtgaaaataaatcttatatgccttggaacctttaaatggggttgagggaatgagacttgaagacaagtggattctgatgaaagaggccagtggcaaatgtgtatttaaaaaaaaatgcatttttttgcaggtaccagagtgaatcctagctttgtcctttgctaactttggccagttacttaactttattggttttcttacctttaaaatggggataatgagaatttcaaccttcttgagtccttgtgaatattaaatgagatgtgtgtgcaaagcaccagaaaagcattaggcacacagaactttttttttttttttttttttgagatggagtctcgctttgtcacccagactgttcagtggcgcactttcggctcgctgaaacctctgcctcccgggttcaagcagttctccctgcctcagcctcctgagtagctggaattacaggcgcatgccaccacgcccggctaatttttatattttacatagagatgaggtttcaccatgttggcaccatgttggccaggctggtctcgaactcctgaactcaggtgatgtgccttcatcggccttccaaagtgctggagctgatattatagacatgagccactgtgcccggctggcacacaaaattttataaatggtacctgtttttaatagccagtgtttaagattcatgaaacaaaagtgtgcctaaacacgctctcaacgaatgctatgccactgttgtgaagacatgggagagagctggagctgtgacagcagagatcccacagcgaataaagtggcagaaccagaatctgaactggcttttggctgttgtcatgctttcttctgtgcagagcaggagtgtgatgaattaaggctcacagggctaccaggaagaggttttttgtttgtttgtttgtttttttgacagaggtttagcaaagatggcttttaggatttaatttgtcctatatctcccaccttgaagaaaaaggttcatagctactcttcatattctcattgctgaaattatcagcacgagtagggtacacatgcyttgctgtatatctttgtgttaatatggggccagtcacaccccctaggtgcatataaacagggacattcagtgaaagtgaacagcatatgtcttcttcctgtccctgtgtgttattttgcagtttttctacagaggaattggaggttggcatttgagccaatggtccccattcccatagctgtggtagatgttgctaattgatcacagagctttttgctactgaagcctgaacgaggtcttagaatcattttcaatagttggtctgggagaggacttttgtgccatctctgtgcctataataaggcagattaaccaaccttcgaaaatagcatgagaaagagaggtgtatccaagtggctactgtattcttggaaataggtgtgctgctacatgggcaatttttaaggtttgcttgtccataaaattgatttgaacttatatttgactcacatttgtttattcagaaaaaaaaatccagtctcttgatggtggttacatcatattttaattggtaagatccactaatggaggtatagggatctaaattcacttgcttatttttccttcaaagcccaggggttttgcatcagattatggcgcttgtaggagtgtttatattccgaagtgacacctttctgaattcttagctatttaagtaagtgttaagaatgggcttggtgacagcagtttttaaaactgtgattgacttattggatcttttccctctgttgtttatacctgacagagtatcttatgtttgttctgaataagttgattgttacctttagggtagcttgtttctcaaaatttgagtggtcctctgatcagtgttatttttgataaggaaattgaagagtaggcatgaaaggtgaaaggaattcatttgcaaagctgacatcagataaattttaggtgcttggtaacataccaagtactcggatgacatcaggtaatcccgtatttgtttcctgtatatgagtttttccacctcaagattccttttgatgttgagcctttgcttaatgaatgtgaaatgtctatagagctctctgttcaatatggtagccaccagccacctgtggctagtaaacacttcaagtatggcatgtctaaattgagatgtgcttcaagtgtaaaatatacaccagatttcaaagacaaatgaaaaaagaatgtgaaatatctcattaaaacttttcattgactgcctattaaaatgatattttagatatattaagtagaaaatgccattgaaattactgtcacttgtttccttttactgtttcatgtgactaccataaaattttaaattacacatgtggctcgcatttgtagctcgcattgtatttttatcggacggcactggtctagagagctctttccaaccttttctcaccttccagaagagcatttcacagctgtaatcccctgtgtgacattgattacctgttttctcttccctaccccttcaaaatgtagggctaagagaaactcttgtaattgatggagaaggttgtctcctagaagatactgcctctgggatattccgggtatgttaggatagcaggttagggtcatttagctttgtgtgcctgtttacccatctgtgaaatgggtttaacagtccctgctctgtgaggttgttggaggagtaaatgaggtaaaccatgtaaggcatttggcacaggccttggcatctagggagcacttgaaaataaaagccgttgttattattttaccagctcatgagtagacatttagcagagttcctggcattgatttctccctctcctagttcctgttggtgctacatcgtgggacctgtgtgggttgcagactggtccctgctacctagaaaatccaggaacaacatctcgcttgagctcctgctcagcaatttgaaaggtagaagggaacttggagattttcagagattgcacacggcctgcggaagcttcttgacagactgatataatccattgcagcaatcagcccctggtgcctgatgaaagagctttataatttcatgtatttcatgaatagccaagctcatttaggatccaagctgtggactccagggtattaccagtggtccaggctttaatacagctgtggatttatttgaccagttggattgggtggtggtctctgcatctgagtagtgtagagacatccaaaatcccctcttgggatgtttggttcctttctccaacagaatgctaaaatgggtggcttttccaagtaaggtgaatattctctactctccagcctgctacttaatttggaaattaaaatgtggagaatgtgagaggcagacaggacatacccatctgagaaaacagttaggtctgcccagaagggcttctagcttggatcccattgagtccatgtgcatccacaggccaaggaaatgggcagtggtggctaatggctagggagggatgcaaaggcacagctgggaaaaccccatccctgtttaattgtttttgaggttcccccgatggaaatacttccttcccagggaatgtttggcagggtggacacatgccctttgtttggtgcaggtgataagaatctgggtttcagtggtaagttcttttacgagggataaacaaggatgttaaagtcttgcagttagtgtgttgaaggggcgctggaggatcctcaggccccatctcgagccttggaaactcaggggagggcttctgagagcagcctgtgagtgtccacatgggagtgggaacaaaaagagttccctgaggactagctaataccctccagcagagccagacttcagagtgactctgaaagagactagtccttcagacctttctgttcacacggaactttggccaagttatctcttgctacgttatcaaggcaaaccctttctagggagtgctgtgatcacctgcatctgcctctagcgacagctccctctccccgtgtcccttcatggggtctgggagttttactcttgtgtagtattttccactgaaagccccaagggaagaacatctccttcaccrggggtgagggagggcatcctgaaattctgctgctattccgacasgtgttttttacaatgtggctaacacaaaccattttttgagcacctactgtgagcatgagctggtaaaataaaataacttcatcttaggggctggacacactttatctgtaattcatccttgcattttccaggtgtaaaagttgaggttttgctaagttaagaaatttgccctgtatcacgtaacttggaaagcggcgaaagccaggcttctgactccaaagccagtgctcttctttctaacagtgtggtgtttctgttcatacatggataccatctacgcgcagcttgtgaattgcacttattggattgaattttgggtactttaagagctgagttctgaaaaggagaaaggccaggtgagcgaggacagaaggctaacttagactgatatcttcattttctggcacttggccactgtagggatacatggagtagggtgaagtctttgtatacacagctgaccctcgaacaacatgggtttgaactgtgtgggtccacttatacatggattttttcttcaataaatgtcttagaagattttttggagatttgtgacaatttttaaaaaatcacacatcaaccatgtagctgagaaatattgaaaaaaataaaaaatatgtcataaatgcataagatgcatgtagatactagtctgttaatgtgttaactgatggtttatgttattagtaaggcttgtggtcaacagtaggctattagtaaagctcctggggagtccagagttgtactctgagccaggcacggtggaacctgtaatcccagctactctggaggctgaggcaggaggattgtcggagcccaggagtttgcagccagtctgggcaacatggcgagaccctatctcaaacaaacaaaattaaaaaacaaacaacagttatactcagattttcgaccgtgcaggagtcaatacccttaacccttgagtcgttcaagggtcaactctattctgattttttttttttttttttgagacggagtcttgctctgtctccaggctggaatgtagtggcgtgatctcagctcactgcaacctctgcctcccaggttcaagagattctcctgcctcagctaatttttgtatttttagtagagacggcgtttcaccatgtgggccaggatggtgtccatctcttgaccttgtgatgtgcccgcctcagcctcctaaagtgctgggattataggcgtgagccaatgcgcccggccatctgatttatggttgataaaatactataatgtattttaaacttagtaagtgttacatatgttaataaaagtaagggaaaaaaacctaactgggtaagtgtgttttattcctgtggctaagaataaaataaaaggacttaacgattattattttcttttggctgcagaaacccttcagtagatcttcttaagttaccttgggtaacaggatataattatacccttggtctgcagagggcatgttagcaaggtactgtgtgatttgtactggtttctggaggttttggagtagttacagggaagtaatgtcttgatggagagaaaatatttgtgtttccctcattggcatgttagtcctagagcatagcagacatgccttcttgctttctgacttttcaaagcctgggcttggtccattctgatgtttttctcaatggtatttttttgtacccatctatagccaaggaagcagccatgtagccagggatgaattttaaacttctctggaggtggatactccttgaataatgaatcccatctcactgtgctctcagttagttctagcctggaggaggcgttgtaaatctagtcgttaattcccccagagaaagttgccagggtttgtttttgtctttctttcatgccacacctgttaattagttccagacactagctaatcagactcaagtgtaaaagctctggggtaagaaggaaggtcaaatcagcggtctttctccacacacaacagaagccctggttttagtagcaaggtttcatggcatccttttccccaccttagttccctsactctgcatttgattcatttctgagtgcaggctgtgcgtagctctggggctttttgtcttctgtggtgttaggtttgtgcttctcagttttagagcgtgtggccacgagaatgtgagagggggagcagggcagagttaatgagagaacccatggttgcttctttttttctttttttttttttttatgagacagtctcgctctgtcccccaggctggagcgcagtggcacaatctcggctccctgcaacctctgcttcccaggttcaagtgattctcatgcctcagtctcccaagtagctggaattagaggcacgcgccaccacgcccagctaatttttatatttttagtagagacaggattccaccacgttggccaggctggtctcgaactcctgaccttaagtgatctgctcacctcagcctcccaaaatgctgggattacaggtatgagcctgtacctggcatataggtccttctttatcttggcatgtactgtactcttattttattttgttttgttttatttttatttttatttttttgagacagggtcttgctctaacacccaggctggagtgcagtggcgtgatctcccctcattgcaacttccccctactgggctcaagccatcctcccatctcagcctcccgcataactggtactacagacgtgtaccaccatgcccggctgatttctgtattttttgtagagacagggttttgccatgttgcccaggccggtctcaaactcctggtctcaagtgatccactygccttggcctctcaaagtgctgggattacagggtgtgagccactgcacctggcccttattttgttttatttattaattttttggtgctgggaatgctgartatatcatatattcatacatgtcattatatmtaaatgataaaaatcacaagagtagcaaccacatgtagccaaagtggaaagctgtccagtacattctttttsgtcctggcacaactctgagattgatgctgtttctctaggggggaatggggacagcatgagatagaacaatttatccgaagtggcgagtgcagccaggacgtagcctgataggaacccagaagcctttgcctatgtttgataagagtggaattcatgttaactttaaccatgtattctgtgtttgttgggatgctgtgaagggaaggatgaccaggctcactcttgggtccagctgttgacttctggaccttcctgtttccaggctgtagatacagaaatgaatgcctgagatgtccagtgggacgttatgatttttaactattagggagtttcctcttgtacattattgcaaggaagataatggattcaagtcaactgttagtggaaacgccatgtgttagcactttgcttcgggttttgggggttcaaaaaatgtgtgcaaaaagtccctaaagcaatgtgttgcagtgtaagactgaagctaataacatgctgaaatactgattcagatcccaagtgttcaggagcgatagaataatgagataagataccttcctacgggtatcctggctggtattttatgtacacaatgaagtgaacacaaagtgaacagaggcaataatgagcatacggtggttgaccatgaggcaaatgggcttattcctagagatgaatcatgcatgtctgggacttggacccatatctgccttgtatcttaggtgcttcctcatggtataaagccattagtgactgctagctggcagatgggccctgcagagatttgagaggcttgggagccaatgttgatacgcatgggagccaatgctggatgcattgactggcccctgaacgcaaggctgaggcattgtccatggagactgagcacagggaagggctcagtggcttccttacagtggtcttgtaaactatagtgtctctgtgcttgctggtcatggactagctttgtgtcctcaggccccagtacatctataagatgggatgatgatccctgtctcatagagctgatggaagaattggatgcggatgtaagtaaagcactggtccctagcaaacacatgattattgttgtttttattgtactgctattatttttgcctgccyagcatctcttttaacattctttgctaataggacctttgctactctttgggtattgatctcctctcctctctgtgttcttgatgggatcatctgctgattaaggagctctgtccacacctttttgagggtggtaaaaaactcaggctgggctcgatacaccttttctccctagaattggcatcttgagccacgtgacatgaagacatcctcatctttctcaattcctgctccctgaagctcagagccactctgatccttgccytttcaaagctggattgtttggttcttggttggtgtctctgagatgtccaaggttctctcaatacattcttttaatgcctacgttaaccaagggttgatttgggtcattttcaatcaaagggcaccaatatcagctggaagtacacagaaggatagataactagatgtgttgagaaggacaggaaccttctcccctgcctgccaaaaataatcctttaatagtggtttcatttctttgtttggtttttcgagttcattcattttgagctttttatcttygggaatctgaggacttttattttggtgctagggacagcctctctggaggagacatgctgataacacttagccttaactgcttctcttgattttatttgtaaattagaatcctaaggatctgtaaggaaatgagtaaaacttaattgtacaacatttagagcctgaattaaaaataataataaaaagagtctataatggtaagaggccctggaggatgagatgaatgctgagctgtgtgtctgggcatgtattttgtccacacctaatcctttctgtcatgttttaactactccttagagtggaggtcagcagtgtctgattacctccagagttcctctctcttatcgtatcttgtccctcgctccatttccttttctggcattattggacagcaagtgttacaacttaaaatcaatacgaagcaatttcatttgtttataactatgaagatgagcgcttccagcagagcactgtactttcaagtaaagtttaggttttttttttttttctactttttctgtctggtgcccaaaatgcattaatttttcattgtacgagtttgcttatgttatcccgctttgatctaaggccttgttaccatcatcatctctttaaaactgggattgttggcatctgaatcatttttgtgttttgtaggtccttagtaatcacagctccattgagtttgtccagccctcacacggaatcttattaaaaatgcagcatctctgcctgccccagaccaatggaatcagaatttgtgtttcagcaagatcgccaggtgacttggtacatgttggagtttgaagactgctctgtgtttgaatgggatgtcattctaatctccacgtttcttcataaatttttcactaattattgaagtatagcaaatgttcgttacagaaaataggggaattcagctgggtgtggtggttcacgcctgtaatcccagcactttgggaggctgaggtgggcagattgcttgagctcaggagttccagaccagcctggccaacatggcaaaaccccatctgtattaaaaatacaaaaattagcctggtctgatgtctggcacctgtagtcccagctacttgggaggctgaggcaggaggatcacttgaacctgggaggcagaggtagcagtgagccaagattgcgccactgcactccagcctgggcaacagagggagaccctgtctcaaaaaaaaaaaaaaaagaaaaaggaagaaaagaaaataggggaataattcatataggtacgtggaggaaaatggcaatcttctgtaaatcatctgtaacctcaacacgcagtcttatgacttgccatttggtactatagccattgggtgggttgttgattcattctaaaaaacaatattagaggctggtgtggtggctcccacctaaatcccagcactttgggaggctgaggagggcggattgcttgagctcaggtgttggacaccagcctgggcaacatggcaaaaccctgtctctacaaaaaaagtacaaaaattagccaggtgtggttccgtgtgcctatagtcccagctacttgggaggctgaggtgggaggatggcttcagcccaggaggcaaaggttgcagggagctgagatggtgccaccacactccagcctgggcaacagagccagaccgtgtctcaaaagaaaacaatattaggacaatattgcaaatattaaaacatcttttattcagcatgcagtttgattcttaggagatgaatgatgaagatccaagttctgttttggtcagtggcacaaaattcttgaagaaaccttcttttctctcaaacctgtttcatttgttggggacctactgtgtgccaggtgctgctgcctaccttggggaaccgtctagttggtaatcacagtggaatatgaaaagacactgattgggctattggattataacatgaatttttagtgaagcctctggacggttgagacaaaggaaattattaatgcattttgttttctgctttttcttttttattttttgccttgttttgctagtatggattttgatttaattgctactttaattgctttcattgggtgatagattcctctgattgagtagaccttttccatccccaaatatctaggagttgaaacttaaggtcaggaaggacaagttcttcagtgggaaataaaaaaaaaaaaggtggttgtcttggcagcggaagcttgctaattacactgccagttgtagtatctatttatgatggaggcactggggacccaattagcaggtcattttcatgtaaaagtttgggattggactctcgtgtatgaagatgatatggcaaccagtgagcaccttcccagtgcaggggaattgaaggtggttttagatctcattgccttggatctccacaggtcactgataggaaactaaagcttgactgttccttctgttcgtttgcaccaccagtttctaaagttatcttgtctgcagggccaacattactgaaaagttgctacttttgmgagcctgacttcctgggaaggaactggtcatagtgatgagaccaatagggttgtgagaatttgcaaactggaaacatagggatgggaaaggcagtgggaccaggagggcattgacacatcccttcggtctggatgtcccatttgtttcggggctgcctcccagaaacaatctacttggcttctttgactaacattgatttggaaatgctagagcatcatcagacagactgggctaccgtgttctctccctgtttattccttatcatttgtagacctcgtgttacccaggtatttctgtgcccagatatatgtgtctgcttccagctctctgcccacatgtaggacacagagcaggtgtgactcacctggtggatgccaagaacaggggagtctgtgatggcccattgcaggggccactgttacgggggatgggggtagtgttctgactcctttttatgttactcacagcagaaattaagggcctatggtgacagtatacacagtcttgatgttagtttatttgtagcactgatggcaaatatctccctacattattgtgtaaaatagaaatgtagaaagcaaacaggcatgctgtgtataaagggcttttaacagggaacttgtagctatcacttataatttgtccttaaattgttaaattttgaaataatttcagatttctagaaaacttacaaaattgtacaaaggatttctgtgtccccttctcaggttctccaaatgttaagttgatcacatttgttttttctctctatgcacatacactctttctgtcagactcattttctctcaaacacacacttttttttttctgagcagtttaagttgcagccgtgatgtttctttacctttaaagacttgaagatgtgtttcctcaaaacagggactttctcttgcttaagtataatacagtcatcaacatcagaaaaccaactcagatacattctgttatgtaattacagaccttattcaaatttagttaattatcccactaatgtcttttatttaataggaaacaataaagtttttcattttatcttattttattttattattttttttaagacagggtcttactttgtcatccaggctggagtccagtggcacaatcatagctcactgcagcctcaaccacctgggctcaagcaatcctcccacctcagcctcttgagtagccaggactacaggtgcacaccaccatgtccagctagtttttaaaatttatatttgtagaggtggccttactgtgttgcccaggctggtctcagactcctgggcttaagtgatccttccatcttggcctcacaaagtgttggaattccaggcatgagccactgcagctgtcccattttttttttttaaactttttttctggtccaggatccaaatccatgatcaccgtgttacattgggttgtcttgtcgctttaaaaagtcttcttaaattaggaactttctctttcatgaccctgccccttcaagagtacagaccacttaattttgtagactctccctcactttggatttgtgtgatgcttcctgtggttagattcaggttattatttgctttttattacagttatgcgtcctgtttctgaaaggaggcatggagagctcgtttcaactctttttgatctggtactcttactgcagggagaaagttttgaacatatacccctattatacatactttcctaaattacagttgtactcttatrctgatgttatatctatcataaaacattccagaaatacaaaatttaaggataatttttttttttttatcttgagrcagagtcttgccctgttgcccaggccggagtgatgttggctcactgcaacctccacctcttgagttcaggcaattctcatgcctcagcctctggagcagtgatgtgatgttggctcactgcaacctccacctcctgagttcaggcaattctcatgcctcagcctctggagcagctgggactacaggcctgcaccaccactccctgctaattttttgtattgtagtagagacaaggtttcaccatgttgtccaggctggtctcagactcctgagcgcagatagtccgcctgccttgacctcccaaagtgctgggattacaggaatgagccgccgcgcccggccctaggagggataaatattcattaacattcatatatatgaaaaaaatatatacacacacatactcatatatgcatccgtgtatatgtatgcatagatgctctgttgttttcttcaagtagcacagtgctggagacttctgcaacaaacagcagttgtagtcacctctctacagggaggaagaattcatagcatgctaagttgggatttattgatctctccatagcttataggatttcctgtaaaacaggggtcagcaaatcatagcctgggaccacccagtctggcccactgcctattctgtacagctagcaagctaagaatattttgctacatttttaattgttgaaaataattaaaaataatattattttgagacggacataattatatgactttcaaatttcaggtccataagtaaagttttcttgaaatacccatgcccatattttattgaaatagccgtatctgtttttttatgaacagcaccacaatggaagaatgctgtgtagcctgcatgcctaaaatatttattatatggcctgttacagaaaaaggctgccaactcttactctaataccatctcattaaggaaactatcacttgttgaatgatatgttccaggtcctgaacttagcactttgcatatattaatttaatctttgccccaaacscatgagatacaagggtcttctcagatatctgcttctaagatactgtctctgccatagaagtgagaaaactttgaggctcacagaaaaatttcccccagttacacaactggccagtggcagggctaggatttgaaagcagttcttttccattttggttgttggtgactcaaagtcattctgaactttcagaattcaggtggttgatggggtggggtgggggtgtcagtatgcgtagctcaggccactagactggtctgcgtgtcaggatggccttgtccgttgctgtatgcttagcacatggggacacgtggcagctgcttagtgaagagttgtcgggtggatggatgagtggatgggtagatgggtggatggataggtggatagtggacagctggatggatggatagatgatgcctaaactcagcatggaaaatgaaagtcgaatatggatgtgtagtcagggtcagttactagactagatttatagaaaacagccactcacatttggctagagcaagagacccacagtttagggaatctgtggtgagaagttgaggagttaggccagagatgatgctaggagccagagggtttcagactgatgctttccgagacacgtggtaagtggtgactcaggatgacacagctctttggaaatgcctagagcttgtgtccgtgtaccattgggcacaatccttctcaggatggcatcatcttctatttcagaatgagatggatgggccaggagcatggcagcatctactcctggagtaggcattgttggcatttatttttttctttaatcaaaaaaaaaaaaaaaataggctgggtgcggtggctcacgcctgtaatcccagcactttgggaggctgaggtgggcggatcacttgaggtcaggagttcaagacgaccctggccaacatggccaaaccccgtctctattaaaaaatatataaaaattagctggcgtagtggcacgcacctgtaaccacagctacttgggaggctgaggcaggagaatcgcttgaacctgggaggtggagattgtggtgagccaagatcgtgccactgcactccagcctgggcaacagagcaagactccatctcaaaaaaaaaaagtataatacataaatacgtttttttcttaraacatttcaactaaggcttacatctgttgactacttccctcttgtcctgctgccctagagtatgaagagatttgaataggtttacaaaagtatatttatagaaatacatagattatttttacatgaataatatgctgtatttatcattgtattgcttgtttttttcatttggtaatagtttaaaaaatacttgattgttgayccctaatacatttagcatagtctttttagttacagtatagtattctattgttgaaaatatgttgcagaggtgccatatgcagtggctcatgcctgtaatcccagcactttgggatgccagatcactcgaggtcagragttcaagaccagcctggccaacatgatgaaataccatgtctattaaaaatacaaaaattagccaggtatgatggtgcatgcctgtaatcccagctatttgagaggctgaggtgagagaattgcttgagcctgtgggaagtggagtgaaacctccactgggcaacagagcaagaccctgtcccaaaaaaagaaatgctgcaaatgtaattaggcattctcctgctgatggccattaaggccacttcacagaaaacagtctttatatgtacctccttgtgcacatttgccagtatttgtttagggtcaatacagagatttggaactgttggatcataggataatagaaacgagggtcttggctagccctccccttcttatggtactggatacccgagggcaagattcagtctccattagctggtcctcttagcttttcttcttgtggatgctatttgtttttctttctttttttggagattgagagggcacagggatgagcttgctgtgataattgcaggccaagtttgtatgaatccaggacctcctatctgctgtgtcactgggcctgcaatgggttttcttccctctgttgttaagggacagataagatgtaattgccttaatgctgaattgcctttcagcaggagggaaaagggaccagtggcttctccttctctaggccagtggcatggaaaggagatgaagaaggagtaggaagaggagagggcagtgaggtgtgtagaggaactagagagaatcctgtagacctcaggttttgaacttggtggtggaagcatgatatgctctggcttaaaaatattcactgaagcactatgtatagtggttggggttggggacatgggctttggaactgggtagatggtgacaagggctttggaactgrtagatagatacggtgcgattcctgtttctaggcataactagctaagttactcaacctattctgaacttgatttccccaaggatccttaagaattgttcctcaaaggggtagaaggggatgttccagaagaaaacagatgtgaagtgctcctccacacagtggagtgctaattttttttttttttggatggagtttcactcttgttgcccaggctggagtcaayggcatgatctccgtatcaccgcagcctccgcctcctgggttcgagcaattctcctgcctcagcctcccgagcagctgggattacaggccaccatacccagctaattttgtatttttagtagaaacagggtttctccatgttggtcagggtggtctcgaactcccaacctcaggtgatccgcctgcctcagcctcccaaagtgctgggattacaggtgtgagccaccgcgtccagcagtggagtgctaattgttaattctctgctgtatgtcagttcctagttttgtgcggagactgtaaaggataagacgtgttcccgccttcagagcaagtatggcctagaaactgctgtgtaagtcaatcagcatgaatacaatgttggatgagcccaaactgcttggagtttctctcagtaagaggcactgggggaaaaaaggactgaattttccctttctctgaagcttaaactgtgccagggtgaatggatgttgcagcatgcaatttttgtttttatataaagtttagcctaatcaaaatagttgcatattattttcttagtagtcattgtaggaaacaccaattttttcttttctctctctttttctttctttctttctttctttytttttttttttaagaaagggggtgatctgtctagcttgtggactctctcaatattcaccctgtctctgaaaatcaccctcccacctccttgaattctggtgaaggcagtcccacaagtttgtgttccaccggttgaatagccctgttaggaagacatccattttcccccacaagttcccataaaagccgtggggctgacccttactggactcaacttggggcatggccccatccttgacctaagtatggcccrtggggctgtgctgaaggtggttccttagaataaatactgggcaggcaaaaacaatataggtgctgactgggcctagggtattctaggatattctatgtcttactactcagggtatcatgctctggtcagcagcatcaccattacctggaagcttgttggaaatgcagactcatagactcttaggccccactgtgggatctcatggatcagaatctgttcttaacatattcctatgcacattggaatttgagatgtgtgcagtgctggagcaagtcagggaactctggcccatatccatctcttcttcatggcatatccctgtatacacactgggcacctccatctcccaccagggctcacacctttgaaaccctaaagcagtgtgtgtcaagagaggccccaccatgatgaattgcttttagatgttcctatagtttcctttaagaccaggaatcagcatttcctttgttagctaggtaaaaataatgaattggaaaaaaaaaaaaaaaaccaaccacaaaagatggtccaggttttcctcacagttaaaataactggttacatgggtgggaattgctgcataaaggcttaaatctattccttaaaaacaagctgtgtatacagttctccttttcttagctaaacaaaatgaactgggtttcaaaaattggagatgaatgaggttcttataataatcagttgcatttacttatcagctcttgttcctgttctcttcatttcctttcagattgaggcatttttaatgaggagagaagttagaaaagggggtcaggaaaactggaaaaaaaaaaaaaaagaagaaaaagccagaaaaactcttctgctgagctctgtagctgttctcagttctttaaagtgcttgaaaagtaatattttgttgctactaaatctaattaatagctagctggtactcatcaagacctcatttctttcaaccttgaaggcaattggaaagatacacagatctgtgtattatcacagcaaacgaattctcttttttccttaatcacttagagcttggtaaagcaatgtaggcagcagacggacagctgtgttttaaaaaataaaacgcatctcaggatgttcactgtggctcgtaatgaatgtgtattgatttttagaattactttttgaaaaaaatagaattttgaaagcagaatctaaactgtatactaggcatggttcttaacagaatagcctacctgttcctgaatgtttggattgagtgaataagtatttggaagcctgtcctctgcccagcacggactaatcagaatgctgtgggccaaaatgggtttaaacacaaagagaggatgaaaatactcctccgggaggagggcgccgggtggattacaatgcagagccctgcatctctgcctgtgtagggtgcagctgtgggctgttagttacatgggcatttcttccattctgagtggacsaagtgtgaattgacttggtgcctgaggtgcagataggctcaaggaaagtaggtcaggcctgaattgtggctgttagacgttgggagtgcaagcagaagagaagacagtgattacaaatrctgcctatttagaggacaagagcaacttcggagagttggaggagcaccccccatctgcataccacctcctccatccaatcagttatttctgcggaagcacacccaggactgatgatgttttgtgtgttgttaggtagactgttactcatttggcagatatttattaggtgtgtactttgtgccaggtcctttgtttgaacctcaaacctgccttgggttggttgtgccagtggcgccgacatccatcactactttgcatgttggtaatttatatactacactaataatctggcagtcctgctttcaagcctgactcttatcaataaagcgtaactgagaaatgcgcacagtgtgtttggggaaatagtttacaggaagaaacacgatgttacaataaaattggcctgatctaagcatagctaaagtctgaaattgacagggaattgttacaattagtgcactgattttttttttcttttaaccattccttgtctgttgcgggaaaatgaaagtttttcctctccggatgaaaagcgagaaaactgatctgtttatttacagatgtttgtcattttgtcaaaacacacagatgacggtctacgttctttggtttctgtctggacatgctgcatgtgtctgtataatgagagcagcaataatctcccacttcccctggacgaaaccgaacaagatgtgtttttctttttttttttcctttgtactctgaatgtgggaacttaattgtctgtgtttgctggtgaactatttgtttctatgctaggtgctagtacatattaacgttgtacttcctttgcagaaggggaaaaaaatctgattatatagtgttacttagctgctcaaagttaattgaaattgactgaagtaagactgtggggactctaagatgtctcttcttacagctgggaatgtgtcctcaaagtttgtatattctccaagatgggtcagcagtgttgcaattccaagaaagggactagatgtcagaacttgggcaaaggaggcatttcctgtgactgcttgagagaaggtggtagagaatttcattttggtaactttagtagtttggccctaggccttgacccttccttctcctaattgaaaagacattatattcataggctagtaggctggaataccatttatatacttgacacagcatctgtcaagctcagtgggactgtctaatattcacatgtaaaactgggttggggtcttggagtctttattggttttataggtttaggtaactgattcatatagtagctaagaaatctatctagtgttcactccaagggaaaagattagataatttatatgttgtatttctttttatacttctgtttctctcagtaaacaaagtgtttaaagaataagcagctatagcctgaagtgttagtaccattgtgtttttttagcaagtcttggaaaaactgaaggtattcttgaaaagaaagctccaccaccccatgtaatttatacatagcctacgttcaaggcaaaaatccatttaggcagaaggacaattcattttgaaaacaaattgcacaatctccatttgtatttggttttagaaatggaaaatgtactcttcttaagtcagttttcagtaacttttggccaaaggatattttrggacaaagagtattcttgaaaagttgcttatctttgaaatgcttaggttaacgtagaaattttatcgttgtcaccccctcattcctgaaccycrcagtctcaacttgttttccattgtaagaagacagtggatatgtacatttagcttaaattaagtsgaattgtaccatagtttcacattacttttaytgtgtgagtatgagacaacatacatattcatttataaaaacaacaggaatttttgcaagagaaaaacagatttcactagtggttttcaaaacacagaatctgtttcaattcggatggatttgttgttgttgttgaagcacagtatatgaaacacgtagcatgacctctttatttgacaaataactggggcagtgtagggcaagacacttgctatctgaggctttaaagcaagctatttgttttttatctagtgtaacacttctctcattcctgatgaggaaactgagattcagaaagtccgagacccattcagagtcactgtgagttggtgggagaagtgagtttgaacccaggtctcctctttgctagtttgtaattgtttcctttttcacaagtagaaaagacaatgaacaamaatgagaattgcatgaatatgagtttagagtctcaattagtttattattattattattattatgtttactcttattccctagtgagacagaattactttttagaagtgaataattgtctcaaggtttttatgcagcttaacctatattttagtaacatatgtcttagtccattttgtgctgttataacagaatacctaagactaggtaatttatagtgaagagaaatttattagtgcaggcttttggaggctgggaagtccaagattaaggggccagcatgtggtgagggtcttctcgctgtgtcatccctttgtggaaaggcaaagagaaggcgaggtagggaaggggcaaactagtccttttataaggaacttactctcccagtaacaaacccactccctccttaatgacattaatycattcatgagggcagtgctcccatgacccaaacacttcccattatgctccacccaacactgctgaattggggagcaggtttccagcacatgacctttgggcgacagattcagaccatactgtattatccgccctccatatctgctgagtattgattctaggactccctgtggataccaaaatttgcagatgctcaagtcccttatcgtcggccctctagatccttggattttgatctgctgttgaytgaattcaaggatgtggaacctgctgctgttagggaggcctgactgcatatttgatkgaaataaatggtatagaacatttaatgttgaattttactttccctggtctattagtttagaataccaccagctgcccacattatctagggcatgtaagtccatttgttaaagggtctgatttaatctttttaccatgtaggatttggtkttaggtcattgtcctgaacttaataaattggtttggatttcctgtgtgttgtgggcttatgtcatctttaatttaatctattaaaatggataaatctgcaaggatgttgaagaccctgtatttctttgacagatttctgtgagccactgaatcactttatttttgctaaatattgatatttatgtgaaaatggatagagtgatttgtgttagttgtcattagggacattttactaataagaaatttatcctcttaaagcattttggagccattgtcatggagtataaaacaaagctaaacattattctagcatgaaaaatccacttaaagggtacagtagttgccacagtttgtttttctttaccaaccaagatacggctttgaaactgaggggcactggctatgggaaggaaccgctggcactgaatgaatagaaattttgaacatgcttgttttgaaactcggctacctctgttcagggttgaccsgtctcagtggtaacaagctaaaagtgaaataatgcctttttgccaacaccatcttgattcttcttgtatggactgcttgagccaatgtaacacataatgtagagcaaaacaaggaatcgataaagccattaagcagctcactgtctggctaggaatgttgatgaatgggtccgcatttccccttgggtgtttttattcaccacgggaagaaaaggagtgggccaagaaagtagaaaaattgagaagaacggcttttcttgcttcagtgaggcagcgcagctagtgtctgtccttttaccctggagattccttttcttatctctgaactaggatgtgaggttgagcgtcctgtgctgtccccrtcctgtctcttattttggggctttattacttgatgatagagtgaagagctataagacacgctcattaaactcrgccatcagttaaggtgtgrctccgcttagagtcggggaccagtgcccaagagatgtgatgccattgagtggggccacaagagaagatgtgagcttggatggtatattcgtttgctagggcccctgtaacaaagtacaacagcattacaacagtctgggtggctttaacaatggcaatgtattgtttcatagttttggagggcagaaatctgagagtgtaggcagagttggttccttctcagggtcgtgagggagaatctgttccgtgccctcccctagcttctggtggtcttttgacattctttggcccgcggaagcaccataccgacgtaattccttcatgttcacctggtgttctccctggctgtgtgtgtctgtgtccaagtttctccttgctgtaaggataccagttgtactggaataaggcccaccctaatgacytcatcttaattaatgatatctgcagtgacccaatttcaattcaacacatacagatggataggaagatagctagttttgtgtctctaaaatcttagttaagagtggctgcagtcaagcaacctcagtcaagcaacctacagatttggaattagcacctactgtgcattaaaccattaattaattaattaactaatgatagtcttgccctgtcgcccaggctggagtgcagtgcaatgactcgatttcagctcactgcaacctccgcctcccaggttcaagcgattctcctgcctcagtttcccaagtagctggcattataggcacaccaccacgcctggctaatttttgtatgtttagtagagacaggatttcacaatgttggccagactggtctcgaactcctgacatcaagtgatgtacctgccttggcttcccaaagtgttgagattacaggcatgacccattgtgcttggccattgaaacttttttctaggtgctttcacatatcctgcattcttttttctttgtttgttagtttgagacagggtctagctctgtcgtccaggctgaagtgcagaggtatgatctcggttcactgcaatctccatttcctgggctcaagtggtcctcccaacttaggttcccaagtagcggggactacaggtgcacaccaccatgcctccctaattttttttttttgtagtagagacggggttttgctatgtcacccaggctggtcttgaactcctggactgaagtgatctgcacgccttggcctcccaaagtgctaggataatcggcatgaaccaccgcacctggctgatcctgcattcttcaccacagcaaacaaatgcattcatgtttctgaaagttgtaaaggctttataatagaatagaatagaatggctgggcagggtggcccacgcctgtaatctcagcactttgggaagctgaggcaggctgatcacttgaggccaggagtttgagaccagcctggccaacttggcaaaaccccatctctaccaaaaaatacaaaaattagccaggtgtggtggtgtacacctgtagtcccagctaatcaagaggctgagacaggagaatcacttgagcccaggaggcagaggttgcagtgagccaagagcaagccactatactccagcctgggcgacagagtgagacattgtctcaaaaaaaaaaaaatatatatatatatatrtgtgtgtgtgtgtgtgtgtgtgtgtgtaaaatagaatgaactttatagacaagcaggcacactttagaatcttctactcatcttttattcctttctgggtactgaaaagcatagtaattctaattcccagtcacctgcatgaagactttgatttcagtcaagctcagtgggcagccaatgttgacattacacaaaacatgtactgtatcattacgtaagacatgaactgtactttttgagtgattcacgggatttgtcargggtaattttgactctggatgaaaccttttactttgtcttttgaacttcttactaaagtttgatgatgatgtggttttggttcttttgttttttgtttttgttttttgagacaaggtcttgttctgtcacccaagctgggagtgcagcggcacaatgacagcccactgcagccttaatctctcaggctcaagcgatcctcccacttcagcctcctaagtagctgggaccataggtgtgcactaccatgcctggctcatttttaatttttttgtggagatagagttttcccagtgttgccgaggctggtctcaaactcctaagctcaagcagtcctgctacctcggtgtcccaaagtgctgggattacaggcttgagccactgcaccaggcctgtttttgttttttaaaatgtcttaaagttgggtattttcaagcctgcctttagaagtggaacctgttttgcaaataaaatcttacttcaaatctcaatgtataaaacagatttttaaaaagagcttttttgggccagatgtggtggctcacgcctgtgaccccagcactctgggaggtcgaggcgggcagatcacttgaggtcgggagttcgagaccagcctggcttacatgacataaccctgtctctaccaaaaaatagaaaaattagccagacgtgatggcacacgcctgtagtcccacctccttgggaggctgaggtgggagaatcacttgaaccctgaaggcggaggttgcagtgagctgagattgcaccacggcactccagcctgggtgacagacggggactctgtctcaaaaagcaaaacagagcaaaacaaaacaaaaggagcttttctgaatcagggtatcggcttctgttcgatgcctgcctcccacctttctgagttgagttaactcatccagaacacactttgggaagacactgaaacactgtagaatgtgggcatgttggcctctgctatttgatgtgagttttattatctagaggaaaattgcaacattatatcctttgggtaatctccagtatttatgggctcaaatcagtgttgatggtgtattcttttgttcacttattcaacaaaaacaaaaacgatgttggaggtcaaaggatcrgtgagtctcttccataagagttcttggtttctctttatccatccatctcatatttattgagtacctcctatgtgccataccttattttaggtatttggaaaagtgacaaaaccaacaaataatatcagcctttatggagcttgtattttagtggggggaaacagactaacatgatagaaggtgacaygtgtcagtaaaaaggaaagaagaatcatggaaatcaggaattgggtgggagttgggtggattgccacctatcttaaatagacctcattggaagaagttaatatttgagcagaaatgtgaaggaggtaaagttaaragttaggagcagagggaacatactactcactctcatgcgtggtttcatttgaaccttacaacaacgctgttagagcgttgctgtcaaccttcagccaacactgacgttgtccaggatgaagtgattaggaaacagtggtggaattcccagcctgtgggtggctttatgcaagatgcagctggctaattggacaaatgtatctatgtgactgtgttaatggaagccttcttgggcttctgttcaggccttcctagctttttttttttaaatttttaatttctgtgggtacttctagccttttggctggctgtcttagtcaatagggttgagactgtacctgtcttgctcacttgggtttccacagtgtctcgttcatagcttacatgtgttgattaaacaagaaggawaaaatatgccacctgcccccttgtaattaaaagagaagttcaaacatccaacccagtgtacacaatccagagggaaatgaaatcagcatcctcacggtgggaccagtcaagtgtccagctacctcacacacgtgggcttctaattttctctgtgggtcacactaaatagtccattgttcatcaaggagagaggaaattgatttcaaattacgcctgtattggttaaaaactgaactgccatgaatgctttatgggatcagggagaagataggcccagggttttagctgcagtaaaacctgcttaattaaccagacactgtctattactatcttgacagtcagcaggaccccctcttcggcacaggggcttagttttgcagcccatgcttgcagggccaggcttggtttagacctataagggtggagggtttgggcttctcatctgttgtctacttccttccctgggtcactgcttgtgccggctsgtgagaactgattgttacattttcaggaattttgagagccaattattaaacacagtcttttaaaacatagacttatgtaaacttacaattaaattacatttaagaagtgacaaatatctcaagctcaacacttcctaatgattttcctgcattttactctgatctgtgctccggaggttgtatctgtggtgtgtgtggtagtattactgtataatggtttgctactgcacatctttcctccttcacatttagtgatgttacttcattttggtgctttgaaatgggtcatcatgggartatttataccatggaaatcagcaaacactataaatcagccaccctgctggaactggatggtaagtgtttaccaaaccaccactgacttggggcatcctctgagttccttagggctactgataaagtttggatgtttgtccctacccaacactcatgttgaattgtaattcagcatgctggaggtggggcctggtgggaggagtttggataataggggcggagcctttgtggtttggtgctgtctatgccatagtgagttcctatgagatctggtcatttaaaattgtgtggcatccctcacctacccccacttgcttctgctttgccttctgccatgattgaaagctccttgaggcttcaccggaagccaagtagatgccagcactgtgcttccagtatagcctgaaaaactgtgagctcttttctttataaattacccagtctcaggtatttctttatagcaatgcaatcatggcctaatatagctaccattacaaaatgctacaaactggtgagttaaaaaagaaggaaatttattgcctcacagttgtggagttcagatggtccaaaatcaaggtgttggcaaggttgctttcattttggaggctctgagggagaatctgtcccttgccactttgtagcttctggtccttgctggcaatccttggcattccttgccttgcagatgtggctccaatctctgcctccatcttcacatggcactctacctgtgtctgtgttttcacatgctcatcctaccatcagtgtctctctccccttactataaggacaccagtcatattggattaagggctcattctactccaatatgacttcaccttaaccagttatatccacagtgaccctatttccaaatcatgtcacattctgaggtactgggcattagaactttagcatggctgggcacggttttattgacayatatttgtcaayatatgcctgtaaacccagctcatgcctgtaatcccagcactttgggaggccgaggtggcagatcgcttgaggctaggagtacaagacctgtctggccaacrtggcaaaaccttgtctctactaaaaatacaaaaattagctgggcatagtggtgggcacctgtattcccaggtactcgggaggctgaggcaggagaatcacttggacctgggaggcggaggttgcagtgagcagagattgcaccactgcactccaacctaggtgacagggtgagactccgtctcaaaaaaataaaataaaaaatagaactttaacatatcttgttctttgatggtgacgggaggttgtaataattcaacttttaacttctgccagtggttttaagttgcctattgtgacatctggcctgtaggagcccagctcagatcatacaaataaacattaamggcccatatgtctaagaacttyagtggcttactatgcatcaggtattattctttgtcacatcagttctcctttaaccctctsaaccagcctgtaatgtaagtaccattttttccatttaccaaataaggaatttggtaaactsagtaagctggaataattgtcctggctaacaagtagcatacttggtagttgaacgcaggtctgtgaccttttgtattgtaacactgccattcatcagcttgcttgccatgagtttttttttccccctagaaccctattagctgtgccacggccacatggagggttcattgtggcaaagtaggagagaaggagtatctgtttttcaataaaactccytgtagattcagggtccaggcagggtgccctgatatatattacctgatttgatcttcatgacaactttacaagtcactcggtctgctagatgagaaaatggaactggaggggaataaaatgaactttgtacacagagctggtaaaggggacaactgacgaggtagcccaggtctcttcrgacctaaaggcctttcttgttggatcatgccacactctgtccttcagcacatccaacatctgataaactggcatctcccattcgctatccttctctttgctggaggatttagtcacgcgtctgtttattttctcattcagttagttaagtactgagagaaccctaacgatgtgctgaggactgtgttaggggtgggttgtgacttgtaaataaacatttattttaattaatttttttcttttttattcttttgatacagagtcttgctctgtcacccaggctggagtgcactggcatgatctcgactcactgcaacctctgcctcccaggttcaagtgattctcctgcctcagcctcctgagtagctgggattacaggtgcacaccaccacacccagctaatttttgtgtttttaatagagacggggttttgccatgttgactgggctggtctcaaactctggacctcaggggatctgtccactttggcctcccaaagtgctaggattacaggtgtgagccaccacaccaagccaatttttttattttywtgttttttttatttttagaaagagtcttgctccgtcacctagactgaagtgcagtgctgtgatcatagcttactgctgccttgaactcctggcctcaagtgattctttcacctctgcctcccaagtagctgggactacgggcacacaccaccatgcttggctaagttttctagttttatgtttgtagagatggtgtcttgctacgttgcccaggctggtcttgaactcctggccttaagcaatcctcctgcctcacttctcaaagcagtgggactacagatgtgagtcaccacacccagcctgacttgtgaataaatatgaacagcttggctgccagaactagaaggctttggcatctcccactgccatgctgccttaaaagggcatgaggtcccacctctgtcttttccattttcctggttggtggcacccctcaccccatgtggtgtatccattttctattgctgtataacaaattaccataaactcagcaatctaaaacaacacacatttattatcttgcggtttccrtgggtcatgagtctgggcattagctgggtcctctgctcaggctgaaattagggtgccagccagggctgtgatctcatcggaggctcattctctcccaggcttgctggttgttagcagaacgtagcgcttcatgtttgtaggactgaggcctcagctcctgaaggatgcctgcctttgcctgcgacgtggctgtctccacaatgtggatgtttgcttctccaaggccaacaaggtggtgggggtgcggggtgtcagggtgtctctgctatttgtagtctcttttaaaagrctcacctgattaggtcaggcccacttagaataaattctcttcattaaattaaagtcagctgatcagggccattgatatacatctgcaatatccctaactcctgcggagctatatacagagcttatttctaaggagagaagttcttctggtgtcccaatgtcagtccatgtatgttgttataacaaaatatctgcaaccaggtaacttayaaagaagagaaattaattttcttacacttctggaggctgggaagcccaggatcaaggcactggaggcattccttgtctggcaagggctacatcctccagaggggaggaacactgccctcaacatggtggaaggaagaaaggcagctttcctggaggcgctgtgggtcctcttttataagggccttaattttattcaccagggaggagccctcagggcctcatcacctcttaagggccctaactattattactatcacattggcaacacctggattttggagggcaggcactctaaccatagcaccagatatcatgccttactcttaatgatcaagatttgggtcacgttcagctggaccaataactgaacaggctcagatgacgtccccacctacgtgatagaagtgaggatgaaagcccccacttcagcctcagggaatagcattgtcttaggaaagaggactctctgccaagaggtgagagaaggagctttgggcaggtaaggataacacatgcccactttggaacttagagtgaccagcacatcctacacggatcaacttggttatcattctaggggtctagaattggtattctgtgtacctccttccttgacactgtagtggtatggacagccacctgtgaaataaagctgtgggtacagagcagtccctgttaggttttcattttggtgtgaatcctctgtctccttgacatgagtatcctttaaatacttagaatattgtcccgagaaaatgccatatgaattcagaaatcggatcaaactgtgttctttgggatccattaaaactgaaatgcctggggccaaaacacttaccagatgcatcaaacactactgtcagtctgagactgtgctcagccacatcgctaccgctctcatttcataggakttttctttcccacagaaaggcagctcgacaaactcttttaaaccttacttttttttggttttggtagtggtagagggaaggtctgagcaaagataacagagtggctacaaacttaattattaatctgactcttctctcctgcttctctttagaagtgacattctctgtggagaggccaggagggggaagttgtagcattcaggttttatcagtttgagggcccactttcttcagtgggtctctgtgatggctgaaacgggttgcaaataaataaatgccatgtgggctcaggaagctaaagtgaaagagtgaggtgcagagccacagcgaggggctggactgtggagaactggacgcgacttgcctcttctccaggcctggcggggttgggcttggggtgaggattaccctgttggaatttgagccagcattgttagatcattctaatatttccagagaaactagacatcttaaactttacctaattacttccaatttttatttttttttaatgaattcagcttttattactgcatgagggctgaaataattgtcttttggctagacttgtcctgtgggtggccagttttgatctctggtccgcaacttgccagggcagaaggcttatcggggatgctgtttgatgccttgtcagcatccatttctatcttccttcttcgtacagagcctcggttttgtacagatatctgtcctcctccataaagctgagcagctagggagaagctgagcagcaagggagaagctgagccactagggagaagcccagcagttgggtagaagccagaccctagctccaggttggctatatttggttcacagccatcattaaggattggttcaggagcaactatgtgatctcaccacgtgtgtaatggaattgggaggatgtgtgtgctgggcccttccgtggagagctgcatctttccttgaagcctgggaatctgtattctgtttgctgtgggtgctgccaggatgtgccacccacaactgcatgtggcagccatcctgctgccagcctgagggtacaaggttgaggagagctgacctggaagggaagggaagcacctggattcttgttcgacttctttgagctgctcaatcagctggctctggaagcctgcctttcctttggactcccatttgtgtgaaacaataaatgttttattgtttaaggcagcatgagtcggcctgggaagcagactaggagagggacctcagtccatttctagacttcatgaactattggtgataaaggatgctttccctgatgccaggctaagctgccactaattcagggctagatgatggaaggatttcatcgtctttacgctgagcccttgctattgtccctttaggggattatccaagataatactccatctgaggtctgggctcagtggggaagagcataatcacttacatctgccatgggggctcagcatgaggagtggcaggagtaccagtgtttgccctcgatgtgtgaggttgggtcagcytgaacatgatacggaagcctttggtctctagagagggttagatatagattgatactaaactatgacctyttccatttatgaaaattactcttcaggacgatataccttcatcaaggtataggaagttattggacttcccttaggcygtgtccccttatctgtaaaattgggctaaccatccctctataccttgctgtgtgggtcgaatgaagttatgtatgtaaagtgatgagcacagtgcctttctcattttaattttcatgttttcctgttccatttctacryatcatcttggctaccaagtcagaaacctagaaagccttttggggaactttatatatgttgtgctgtttgctgatttttctggtggagttttctgagaagggagcttcgcctttcaaggaagagctgagttgtatgtggtatcatccacagtttcaggttcttaagagtagtacaaacagaaaaggtggttcaccaacaactacaagcactctacatctcttatcattccagatgtttctttctttttttaaaataagaaataagactgggtgtggtggctcatgcctgtaatccttgcacttcgtgaggccgagttgggtggattgcttgagcccaagagtttgagactagcctgggcaatacggcaaaaccgccctctacacaaaataccaaaaaaattagctgggtgtggtggcgtgcacctgtagtcctagctacttgggaggccaaggtgggaggatcacttgagtctaggaagcccaggttgcggtgactgcactctagcctgggcaacagagtgagatcctatctcaaaataaataaataaaatagcattgcattttgttttcttatttctatcaatttacacagattattctttccaacttttttccaacaagttaacaattaaagacagcccttctattaataatgcagataacttttgattatatacaaattattttcacactttaaaatgtttttatttgtatctagtatggagaggcagtgaggcatgtgatgtaaggagtatgaactccgataccacactgcctgggtttgaatcccagcatggctacctagtggtaaatcacttaatcttgttgtgcctcagtttcctaatctgtaaaatgagagcaattatagtacaactttgtagggatgtgaggattaacagtttaatgcatttaatacatttaatgtgcttggaatagtgcctggcgcagtctaagtgctgtgtgttcacttctatgcatagtcaaaaataacagtaataaaatctgcagtactactactggctctatcatcagtctttgctaagagattttgcaagacccaaatcatttggtagatgtattgtcattgtctcttagattacaagtgatttactgctgaatataaaaaaattgcccaggcaggtaagcttaggaaaaggagcctccatggggcaaagatgctgggctatagccagcagtcttcgtagcagatggataaagagattatatcgtatgtttgcctacatagatttggctgtacttagggtgatagtaagaacaggaactgaatgttacttaagagctcaacactaatgcatatgcagcatttaataagacaaatattcctctgttaagtgaccattcctttcacaggtaggtagttattttcgtttcactcacttgagtattacttattctctcattgccttcctgcctccctgcctccctccctccctccctccctacctccctccctctctctctccatctctctttctctatctctctctttgtttttctttctttcttctcctgttgcccaggctggagtgcaattgcactatcttggctcactgcactgtctaccttctgggttcaagtgattctcctgcctcagcctcccaagtagctgtcactacatgtgtgtgccaccatacccagctcattttaaaactatttttagtagagatggagctttgccatgttggccaggctggtcctgaacgcaagtgatcctcctstcttggcctcccaaagtgctgggattacaggcatgagccaccgagtccggtgtattctttctttttctaaacggcaaaagcaagtttttgaacagagatcctaatcatcctgtaatagtttaaaagtatgagacttagagccagtaaaacgtgggcttgagctctgaaggtatcatataccgctgtgactttatcagaatgttattcagcttcttgtgggttcagtctccttacctggaataaggtgaataaccatccctcagaaccttgctgtgtggatcaaatggaaagatgtacacaaagtgacaagcacagtgcctttctcatcattttaattttcatttttttcccactcaatgttaactaccatcttgactggtaagtaaaaaaaacttgaatgcttttttggggactttatgtatgttgtgccatttactgatttttctagtagactttttggagaagggagcctgtttagaaggaaaagagcgatttttcttgcattagtaagtacatttttctagtgggccttcagtttatttggagctgctttccccaaatttgtgggtcaattaaggcaggggttggcgaacattttctgtaaagagcccaatagacattttcaactttgcaggccatatgcctcagttggacatactcactgcgttgtagtgcagaagtagccacagacagtacatcaatgaatgggtatggtagtgttccaataaaactttatttatagactctgaagttgaatttcatatccttttcatgtgtcaggaaatattcttttgacttttaaaaaactatttaaaaatataaaaatccttctttacatgaggactattcaaaaggaagcagcaggtcagagtttgttaamccctgctgtaagggttttttgttttatttttgagatggagtcctgctccattgcccaggctggagtgcagtggcactatctcggctcactgcaacctccgcctcccgggttcaaggaattctcctgtctcagcctcccgagtggctgggacaacaggcgcctgccaccatgactgggtaatttttgtatttttggtagagacagggtttcaccttgttggtcaggctggtcttgaactcctgacctcaggtgatccacctgccttggcctaatcccaaagtgctgggattacaggtgtgagctaccacgcctggccactgtaaggcttttgataagccctgttgcaatctgtgcagttgagaaggctctcatttaaagaggttctctggtgagcttcttggaatgcgaagcatctttctgtaacctttgtcgtgactctacaattccatccagttgagcaactgttctcttggatgrcctttgcctaaagtgagatgcacatgtgcctccagttcagttgtaggtagttctcsgcagtactgcatgtggcctgtttccagttagaaatgtcaacactgtgagcccaggtaggtgctgggcacgaattgcctgatggactctctgagaagctgttaacttctccactgcttttgaaaggatcttcacctttatgcattctctagcctattttgttcctctgtttttttcccccgtcttctctacattaaaggtgcattagtgtattctcagtgcaacactttagagttcttggaatgggcagagagcagttatgtcccataatggcaggataatcaatggaaagagatagattgccaggttgtaaatcatgtgagagaatttgatgatatcagcttcgggggaatgggatcctattactcgttctgaattctctggttcctggaattaattgtgtgtgtgtgtgtgtgtgtgtgtgygcgcacttgtaatcttttggtagaacagcctttgttgtgaaccagaggatgacaaaggacaggtcagcttgtctcaatctctccctccattccttgctgtctgtgctcaccttcgacgagaaatgctttccataaagccaccaatagcgcagcagagtggcttacgcttagactgtcagagtcaaaagaacatttatttctccatattcaagggaaatcacaccctttagactaggacactcaaaagcctagtagaatcctagcaaatgcatttgctggcaatagaaagcaaagggctttttctatttttaagaggaataaactgtgccttttactttctgacttaatgcagagagatgaaaatatgctaaaatcatgttttttttaaaggcatagaccagagacattttggaagcttttcatctagcaaagccagcrttcctttaagcaaagcatcaggattgcttcaatatttaggtattaatattcccttgtggctcaatcagctctttgaagatgaatttctcagcactgctgtcacaattaaagaaagacatgcaggggtgaaagggaatttgtgtgtttcttagattggaaggatgtgttgagtcaaatgaacattctctcaaggttaaattatctatttaaaacccacccaattacagtgccaggtacaatctttgatgagattcagggaaaacaaattaatctgtgtgggagagattctctttgtatgaaggcaagctrtgaaatcagaatgaactgggcattgtttgttaagggggaaatggttatataaattgaagatggtgtagtctcaaaaaccatgatccattattaggttactgaagacctcctaatagaagagggtagaggtggtttattacagttgtgcttttgtattttgttgaaagaattgtgaggtgaccacaacacaaaaccatgagcaatatactgtgacctctgtgtgcggagactaatccaaggaatttagagtaatctcagggcatggctttctagaatgatcctcacatcctgttggtttcacctcccaaataaatcttgaatctccctgagcagtgctctctaaatttactgctattgacttggtgagctacyatcctccctgggttaaaatatggtggtagccctctaagtgatcttcctccttttagaaacatcttcctagtacagatgaaaaaatccaaactctcacccatgggcctgcctccgcctctcacctcttcgcctgttgttcctcactcactcactcactagctccagccttcatggctgggatggttcagcaggcctggctccattgtgcctccccatccttctgttagttgcttggggttgccacaatggcagagtaattaagtatagtctctggagtcaaactggtagattccaatcctggctgtgctactaaccaaccctatgaccttgagtgagttactaaaacctttctgtgtcccagtttcctcatctttaagttgggtataataataatttgactttaataatacctttttttttttttttttgagacaggatctttcccaggctggagtgcagtggcgtgatctcggctcactgcaacctctgcttctggggctcaagtgatcctgccacctcagcttcccaagtagttgggaccacaggtgtgcaccaccacgcccagctaatttttttggtgtattttatgagatggggttttagcatgctgctcaggctggtcttgaactcctggattcaagcaatccacccgctttggcctcccaaagtgctgggattacaggcgtgagccactgtgcccagcctactttaataatacttaataattctaattaggtttttgttgaggaatgaatgaattaaaatatagaaggaattttagaccactgctttgagctcagtagcactgtatagattgtggcacagttttgttataaaattagcatcctcattattatgtctgccctttggatttgtatgtggcagctccttctcttgtacatctcagctctagtgtcttctttcagagtgactttcccacccagcttctgaaagaacctaccgcttccaaacacaccatgcgctccacccgttatagttttaaaaagatggaaaaaattgtaacaacataaaagaacttttcctcgctgaactacttggattcattgccagcctggcaccctgtcccctctggacacttgaatgtgtatttcctacaaacaagaacagtcgtgtatcacaatacatccatcagtattgtgaaattaactttataccacactactgtctaatcctcagamctcattcaaatatgccctaattgtcccaatgacagaaggaaccatttagaatcacgtgtctgttgttagtctctttcaggtctggaacagtttctcggaatttccttggcctctatgacctcgatactttygaaggtaacacaccagttgtttagctagactgtcactcagttttggtttgtctgaggtttcctcgtgattacgttcaggttatgcgttgggacagaaacaccagcggagtggtgctctgggcctttcaatcctatcaggtgatttgatttgtcccattgctggtggtgttaactttgatcacttgataaggcagcatctgccaggcttccccacttaaacttattcttctttttccctttgtaataagtgtgttttgagcaggtactttgagactgctttccataaactttcaacttactctttatttgacttaatccataaatcctcatcagtttggatgatggatttttattttatttgggttatagtctgttaccatcattattttgatgctcagatctctccacatttagatagtgggagttcttgccagctggttcctgtgtccttttgacatgtccccatcattatttgagtaattccttactgtctagaacaagaagttccaggttcatcttgtactctgccggccctggctctggatttggccaagaagctgaggagccaaagagctctgatttcttttagaggagactagtatttatttacttatttgtttgtttgtttgtttgagatggagtctcgctctgttcccaggctggagtgcagtggcacaatctcggctcactgcaacctccgccttctgggttcaagcaattctcccgcctcagcctcccaagtagctggaattatagtcatgtgccaccatgccaggctaatttttgtatctttagtagagatgggggtttcaccatgttggctaccttggtcttgaactcctgccctcaggtcatctgcccaccttggcctcccaaagtgctgggattacaggcgcgagccaccatgcccggctgagaatggtatttagaaaccaacatctgagcatatcttgggatattgcagcccccaggcccttttagtggacaaatctatgggttaagtatgtatgtccatgtccatatacacacattaacatctgtatgtctgttaacattcacaagttcaacaacacatgctttattttagttttctctttcatggatttgtgggactccttctgtgacaaggtgaaactgggctccgactgtttkgaatatgtttatttactcagtccatcccactgtgtgttggaatactcttccgtgtagacacttctcaactccctcaaacaccaacctccacgccaagcccttctccctgccatatagacaccctcctcgtctcacttggttaccccttctggacagacggtactcttctgcagaataaggcatgtcttcctcctggtggagggcagccccatggcaaagtacttggcttggcaagcagggtgtgttggctagatttcattctctcaattgaccggacacctttgtgttaatacgcaactttatgtggcaaccctgaggactctgccccaccccagctctgcacccatcttgggactgaggcactgctgctgcaggggtgctgctctgttaaacctaggaacagaaagggtgttgttggtagttgactttccaccatcgatgccggaagataacagaaaactcagtaagaggggcataaagtaggtagacagagaagatagcaaaagaggactgctggagttttggtaaaaggattgtgtgcctgatcctggtttgtgtccgaggctagctgcatccctgcccttggtatttgagggacaatgttataaaagatttcactcttgaagttaagctaccaactgaaacaagtcacatggtcaagctccaagtcaagggacaggaattacactgtgtkggaggaactgcaaagttgcctgtagaaggacccggatacagacagggccaattacccagtctactatagagaggtcaacttgtttgccaagggctaacttgttaataagtggtagaatctaaatgaggtctgtccagccagggtgtgtcggtatttaatggctcttctactgcttctggataaaatagtcagggacttgttcggcatgtgggttgctcagggtgtacaggccatttataagggtgttcctttccttttgctttctcttgcctccttgtatgtaggaagtatactttcaagaagatagtgttaatcagatacagaacttccaagaaccagatggccttcatttctttcttcctgattagctatataaaaccaattgtccaactgagaaaggcttaattttacaggcttaccggggaggcaagcttattgtttacagctttcaacctccctcttgccttccttgccagaggctcggctccagcaagggaacctgaatctaacactgaagaattttggaagaagttggatttttacaaggagtcctcacacagtggatagatacgaaaacggtctctttacttctgtgagttaaaggtgtgcctgtgttgttcttagggcctgccttctatatcttctttgttgtgtcatattttaaatggcaaatgacattgactgacagtaagagcttgtatcgtatttttcagatagtatctgcattaatgtcctgtaggaaaacgtctgatagtgctgcagaccattttaaggaattgaaatctaaaaatttcactgaattataaatgtgcaggtacactatataactaattattaagcttacaaagcggccaggtggtacttggagaatcttagtatttagtgtggtggaagaactattcttgcatcagtggaaatattacactgaagccgtgtgcttttttatgcagagtaaagataatagtggctggaatacaggatcagccatgtgctatgtgaaagatggcaggcttaaaaaaatccatttgtatttctggcaaattgtcttaacataatccacatgcctttctaatttaaaatataaaaaattaaataaagtttatactgaagttatatccattaagaaactggtaaattagttaagtctcacaagcttagactccagcatgagaggggggtgtgtgtgcctgtgtgtgtgtcctgctcacatttgaattgtgaattcacattgcattcccttgcaaggatgtgccatttttaattaagactaaagcatggtggggtattctaaattgggcctgattataattgcagatggcaattgagcttttggaagctggtttctttaactgttaaataaaaattgtcttttttagtattggtttgcagaagtttagcagtggatgtcgaggggaaaaaaacggtaacctctttctttccttgaaactaaatgtcacagcatatccatcttctgttaaaggggtttagctctgaagaaatttttcttaaggcctttttaaacaattgatcagataaaaaattttggctcataaagctgaactttccagagactttctgttgatgagagtcaatacagtaaaaaatgacagtattcattgttattataaagagtacttttgaccatcacacttttagtgatcataattagtaccttaggctgggcttggtggctcgcgcctgtaatcccagcactttgggagcccaaggcaggaggaccatttaagcccaggagttcgagaccarcctgggcagcatagtgagatcctgtctcaaaaaaaaaaaaaaaaaaaaaaaagttaaaaactaccctggtgtgttggtgcgcatctgtggtcccagctactcgggaggctgaggtgggaggattgcctgagcctgggagatcaaggctacagtgaaccgtgatcatgccactgcattccagcctgggcaaaacagtaagaccctgtctcaaaaattaaaaaaagaaaaggtaccttagcatacagagccttcttctgtttggtaggcaaacatggctttgttctgtgctccaaaaaggatgggcttgacagtctgggcttttaatgaatttctgtatggagttctatatacatacaatttctgcctattgatgagtatgtacacccacgagaccagtggtttgtaactgagggagggttaatagttttgttctcttccaaggggacatttggcaatgtctggaagcattttcgactgtcaggactgggaggatggtgctactggcatttggtaggtagaggccaggcatgctgctgggcatccagtagtgcacaggacagccaccgcaggaaagaattatccagtccaaaatgtcagcaatgcagcctttgagaaacccaacactgaacaatgagcctctagtgcctctttttgtctcactgcaaaaatgggcttgggttcaacatgggcttcctatattttatcttcccattatagtactggtgggtgtatgaaacatgaattaatagaaaatggtgttttctggaagaagtcaacaaggaaggtgagctatgaattagtggcatagcaggtaactggtattgtggacagagccagaagtttacaacagacctggtagtggatttgtttatgggctttggggaaatggactgttttgaaccctaggaagtctagctttttttgggtaaacatcacctcttaaatgttaactcttctaagtgatggattattaaacaggtgctgatgaaagcatcttaataaracacatcacacagttgtgttactccttcacgctgwgctctgcctaatgaagattggctgtgtagagccactactgcttcattttgttgcattttgtatacacagttcagaaaatyaagagacaagggaactagtattgagtagaataataaaaggactttcttgaaygatggcacttctgattttttttttccctgccctacgtgactggacgaataagggaggaagatgtcatggggcctctaaacagctgataacaacagggttcatttacattttgtagcttgtgtrtcccccctacttcaagcacatgcrtagggaattgaaattgcagtttgcctattacgtgttggcagtaatctttcaaaaaaaattttatgtttcaaaatcaggcagccaacagcagtagccagtgatatatggggctattgatgcrgattgaatttgcagagggaaaatgggatttggttgccatatgaactcataatgaggtggcctcacagatttgtaatggtcaaccattatttgcacctggaatccgccaggaatcaaatacctttcaaggagagactgaaatgaaacttgagggttttttttgttcctcgtccggtgaatggagcagttccaaagtaatgtcatttggtttgtcagttgaagatgcttaaagttaacagttacttttttttttcttttttgaaatggagttaacgctcttgtcacccaggctggagtgcaatrgtgcgattttggctcactgcaacctccgcctcccaggttcaagcagttctcctgcctcagcctcccgagtagctaggattacaagtgtgtgccaccatgcccagctagtttttgtgtttttactagagacagggtttcactatgttggccaggcaggtctggaactcctgacctctggtgatcctcccacctcagcctcccaacatgctgggattacaggcgtgagccaccgcgcccggccttacagttactcttttaataagcgtagtgtggatcagtggtcttcactgatcccattgccttatcagcaaaaaaaaatttggacccatgccccagtgtgtgtgtgtrtatatatatatatatatgtgtgtgtgtgtgtgtgtgtgtgtgtatatttatttatctgttatgttcttatactaaaatcctatgaaaattataaaaccttaaaaatgtaaagcatgaggtcaaaactattctggatatagaaggctaaatattgtttcccacatcccctttgaattgtcttatgcacccctggatactcagtgctggaaatgaccagcaggaatcctgccttaggtgacgaggctggcactggagaatgttgggccgtccttccttccatcctgcagggatcttgctaaaataaatgacttaaccttgaaactttactgattacgtggtatgtgctatagatgggattggattaatactaaacatttcagcagcagttcttctccccaggtgtggggtgtaggcatgaaatagcttaagtcaactaaagctcacctcttatgttttacctggatactgtgctttagaagtttactttctgattcatctcagcaattttgtttttttcgcttcctccctctttctctctctgtcttccttaactccttcactctttctgttcttcctttattcgtgccaggggagattgggacacagtattttccaaatatwtttatcctctcaggtcagttggagtttgtgggctaagagtatgagatttgaagttaggatarttatagtatttggatgagtgaatgaatgaatcaatagatatgtcccttcatccaaactatgctggttaggtgattggtgggcaagctggtaagttcctctgattctctgttttcttatttgtgaagtggagatcgttgctaatgtatgtggttctctgtagaattaagtagagaacacgggaaatagccagcacatggtctggcattgtgtacatgcccatttaattttggggtaattattatctccacagtccctgtccttcttggaagtcctgaaagtatttcttgaaagtcatcactcaacttcagagcatcttagataccaaaataacagatggtacagtatttgcggggcatacatctttcacttaggtgttcttttactttccttttcccgcctaagttaactttctagagggaggaaaccaagtcttcactttattttgtggttgacttttcttgcctccstctccaacacctcgctcaacaggtaatcaaataactaatttttagttgtcaggtaaaaagacatttttgtgtttaagttcttcaaaccttagcttttggttgcatcagaagacttgctttgaaattgcacaaggtaaagaagggggagctggaaggatttcaggaaggagagtttgctatttgtaattagtgcctaacagaagttggtacatttctgtagttttccgttgtcagtcactttggatgataatttttttttttgctattatttttaagtgacagattgcagtacgtattttaggacctgccacccattttgatttgaaagattatgttgtcggaatttcagacactgcaggtaaagatctaattttactaattaacaaggatttacaaatcttgtaaattactttcctcttgcaatggaaagtgcttttctctgatttattatacaaataattgcaaatccttataactgaacaaggtaaaacttttcrtgtcttttggaatctgttttctggttttgtgccttcagtaatagtcttaccttagtagacaagatgtrtaaattgtgtaaattactaagcaaaggtgaagggaaatatattttggttatttccagttagtaactgcctcttaatgaatcacattaagtgccatagtcacttctttttttcccaaattgtctttaagaaggtacatttgcaccctaagtacaaaaaagggacagtattatttttctgcttttaataaaagtaataatgtcatatttttcctgttctagaatttcaggcatcaccccctggagctgatggagagactggtattccactgtgtatcttaatatcagggaaatatctcacaggcacatcaagctgatatcacagggtttccttgattgtaaacaatagaatggattatgactgacatgagccaacacttggatttggaagggtatgatagatttttttgctcagggtctaagaatcgtaagataccaaaccttggaaggggcaggaatcaggacagtgggagctaatggcaagttggtggtggaatacattggccctaccatgttttgtttttagacatggcattcccaagactcagatccctccttgggcraggttctgatctgcatgactagggaggacagaacaactgcatggttaaggcagaggaaagttgggggactagaacacagagaaatcggggggaaggwccttgaggttaattacaactaggccttgctttctttaaggttatccagtgcagggctttgatcatagagtggattttcaaacattggagcaggaagaggctccygactctcaccaaagccctggggaatgaatgacttgttcaggaggtaggtatagcttggggttacacctggttttctttagctttgcaacagactagagaatttggttcttaagtgatattatctaaaattgggaaagaaaatctctttcagttagcagagataaaatattgacaatgctgtggaggggatgtctataaataggccttctataattgaaaaggagcaattaaagaagacacaaaaccttcagttgctgtttgtagaagtcacatacagggctacctgtgaaaggcttcacctgtttgaggattataactatcacttgaagaaacaaaacatctgaggagacaggagcaggcagcatgagtctatttctaaattttactgccaagcaycaaatacagcckctggtgtttattcggaaatgctgttgtttgaaggcatatccaaagttctgttagcctcactgcctccttgcattcaggtgctcagtttacctgaaacccctaaagagcagccactgaactcaggagcagatcaaaaccctctctaattcctttacacttgggacccaccccttgataaaggttttgggtttgctgaragtgcagtatgtcatggtggtcccctgtcccagtatgggttggggattaagataatcctgtgaatttaaatcccgactctaccacttaatagctgcgaaccggagcaagcttttaacttccctgggcctctctagatatgctgaatgaaaatctaccccctcctccttccttctgagtccttgtattattaggcatggcaatgaacccaactaaaaaactacatttcccaacttcccatgccagtagggatggtcagtgagttccaactagaagttgttttgggcttccaggaacactggaaggtgagaagaagtatgctctttttgatttttcacattttgcattttagatacgaaatgtagatgtggtggtttgagccacagcatccattttgggaccatgagggaaagcccaagggcatcgcaaagacatggctatctttggggtgctgagttctattaatacctgcagacttcttgttatatgaaagaaaattaacccttatatgtttaagcctctgatagcagcagcagaatgcagttcctgatacttaacctcaggttctgcatctgcaaaatgagcataatagtactcaccttctagggtcattctaaggattcagtgatagtgcatacacagtacttaccactgtgactggcagctactacttttctttttaaatgactgttaccattatcaaatatagggatgtgtatttatttgctagggttgtcataacaaaggaccacaaactgggaggctcagataacggacatttactgtctcacagttctggaggctggaagtctgaggtcaaggtgtcagcagggttaattccttctgaagctggaagggatggatctgtccaactttcttttctttggctcgtggatggctgtcttctgcctgtgtcactttgtgtcatcttccctttaygcatatctctgtgttcatattttctctcttttcaaggacatcagccatattcgattagggtccaacctaatacctcattttaacttgattacctctgtaaggaccctatctctaagtaaggtcacattcggagatactagatggggtttaggacttcaacataccttttttaaggggggatatgattcgacccatcacagtacatacgtaacattatcagtcaaactttagtctctcaccctttttctgattacagaaactctttataaaaaaaatcaaatacttcttcatgaaaaattgcttcccttcccaccaaaattgtcctgttgtataaatgacttttaactttcatctcttacattttaaacccatcaactaaacccagcttctggaatctaagggcttgtaatggggccatttacatttccagttagttttagggtggtaatgatcggctcttaggacgctcttcgatttgagtattcacttgggtgtgtttcaagcccgtgacttggaaatacaagggttttctgtttattattccatactctttagagtagtgttgatgtggtcatagtcatacacgtcatgggatgtttgctgctctcgatgaatttactggccattggtgccctggagtatctactacagagtgcccaagacaggctgcctggggatatttaatgtgtctaagaacactcttaagcatttcagcctccaacataagctcagtaaggtgggacttgcttaaatcatattccgtgtataaaaatttaaaaatgttgaagattttactgttgcagaacttactccatttaaacttgaaacccagtgttcctacagctgctttccttttctatgcaaatatttcaagcattgagaccattacctcctgagcaaagcagagtcatttatgcattaaataaataactttcctgtcccaacagggtttgtttgttttttttttttgggsgggcgggagagatcacttttaggcgacattatgtgtttgtaggggcttgtcttcaaataaaaggcataaytgaaatacagctgaataggaatcaagagtgtgattcaagtgtaaggtaaaattgatggcatctcttattgcttcgtagatgaattactttatggcagctttttcctgataaagcttttttaaaaactaaaaatgcattattctagtctctaattgtccatcctgacagcagcaaaaaagaaaggctgtgttttgctttttgtttcttttccctcccttagcagtgatagtagaaattgcttattgctggaaaatctgtatttgcctgctggtatgccattaaaaaagggatttggtagcctgaattccattttttctttaacgcaaaacataaggggttgcattttccatactggcagaatgtggaatgggtaggtgacttgaatgttgtcttttccacttagtattaccrttcaaaacccacgtacaccaaggaattggaatattcgaatgtgagacagaaagatgacattgyggttagcactgtctgtatccaccaaatcgtgaaccttctcagagtcatagtcccagccagggaagtaagagtgtcgctcttcactattgctgcacacatcctgctgctgggtgccaaagtggggcaggtgctcaacttcccagcagtgttaggagtaaaggctggtgggggagaaggctggttggcagattattaaatgtattttacatttgccatccagtttcattttcatggcccacatggccacctaggatatattcttagaaaaaggaatagtaactcaaatcaagatcaagcttctgatcaaatgctggggatacagcctgatgtaaaatgggacacctggatgcaatcagcaaaacccacaatgaggggaattctacactacaaatgatcctgttatatccaatttatgtatggaatggcttaaagaggcagagaaaagcctttggattaaaagagacttgagagacctgtcacccaaatgcagtgtgtggactttgaatttgaacaaatcaatgttaaaagcaaatttttttttttgaagtagggaaatttgagtactggatgttacctgatttatggaattattgtcacttttaagtacaggcaaaatagtagtgttggaattatactttttaaaagagtccgtatcttttagtgacagatgctgcattagttatagggaaattatgatgtctggaacttgctttaggataattcggttggagtaaggtgtgatttggggtaaaaaaacataaaatttgcctgatacgataattgttgagggtaagggaatggttatgtggggactcttctatctctgaatgttggaaatacaatagaaagttaaaacataatgacttacctgtgttctattctttatgatggctgctggctttatcaggcctacttcttttttaagtatttgtggggtaatgaatatttaaatatgtaacctttttacctcaaagtaatctaagtataaatatggtcactaactgcacaaccaggtctcacagaactgacaggttttatttaatgacccattttcctttatttgaactcagccccatggaataaagggaatgttttattcatcagactgttcacttttttaaattttagaatgcttttgtaggaattagcaggtgtttaattatcaatgggaggattctttatttgctgaatgcagtagaaggtcattaaaataagtttaaaatatgaaagaatcaagtagtgagagaacttggggggaaatgaataaatctattctcttgtgtcctaggtttgttaaggtcaaatgaggtgtggtttaatgttttgcagcttcattgtaaaccaagccaaaggaaaatctttctgccctttggtcaaacattcctgagtgaagagagcactggctgacatggaggagtgccaacatttttgggtcatactttagaacttaagtttagataactgagataagccaggatttatggacagacagatatatccctagtctcaacattaagccattatttccatattgcatcgtctttcatgctctaagtatatgttggagtgccgactgtggatttagctgtgtgctaggcactggggaataagacaaataagaattagatatatgtggctcttttgtttaacttgaacataaatgttttccctctttccctttgcttgtaatttttctcttttctagcaacattgccctgtcaacttcttatctattttttcatttttatatatttattttttttgagatggagtctcactctgttgcccaggctggagtgcagtggcatggtcttggctcactgcagcctctgcctcctggttcaagtgattctcctgcctcagcctcccgagtagctgggactacaggtgtgcaccaccacacccagctaatttttgttgttgttgttattgttgtattttttgtagagacagggttttaccatgttggccaggctggtcttgaacttctgacctcaggtgatccgtctgccttggcctcccaaagtgctgggattacaggcaagagccactgcacccagccctgtcaacttctaatgatataatgttggtggtgatggtaaattatttggatttggggaaaaggtgtggttaaggtgaagcagtttggaggtggggtaaggtagggggaggtgaacagctaccactcatccatctctgaccctgtgccatactgcttatttattcatccacaaatcctgcaagataagaatcacccctattttgcaaggaaggaaaggaaactgagcttgagtaacttgatcacagtctctcgactcataagcatctttgttggtaaacacccaggtctgtttaaagctgtgcttgtaacaaacataccacatatgttctccaagacggtaggtaatgtgggctgtttttcagtgaaacgtctgccatgcattttcaccatgatgttgctttttattgatttcatttgggaagtttagggagaagtaggagggacacttgggaaatagaggcatttgtgccttcaagcagttcactcggggcacctgcatgaacttccaggtgtcctaagttagatttattttttattttgagatggagtcttgctctgtcatccaggctggagtgcaatggcgcaatttcagctcactgcagcctctgcctcctgggttcaagtgattctcctgcctcagcctcctgagtagctgggattacaggcacccaccaccatgaccggctaatttttgggtttttagtagagatgaggtttcaccatgttggccaggctggtcttgaaactcctgaccttgtgatccgcctgccttggtctcctaaagtgcygagattacaggtgtaagccactgtacccggcccctgagttagatttatacctcaaatgttttctgggtaaaagagggtcctaggaaggacagacactattaggtttaattgctgtgaaattaattgctagctgttcatctgcgctgctgctttgttttaacatcaaagttgacaaagtctccacggtgtagtagagagaggtctttgtgaagaaagctccttgccagctgtgggcattgacaggaaggcactctcttcctaaaccttgtaactgatattgcttttgcggtctcaggtaagaaggagaaaaagggtaaaagtttactgtagattctttagaaagcctatggcatttttgaagtcataataaaagatagattccagtggatctcctagaggctctctgtgttaactggcattgtttaagtgtaacatgtcttcagctttaggctccttagcctttcaagggyccttctgtcaagctgatgggctaccatgccagaaatgaagtccgatattaaaatgtttgttcaacagaaggtggatggagagcagcattttcaagtaatgggcaataaatcatggaattggagaagttactcaaattttggtaatgtgcccaaagaccctggccatggccttatgactgagacatgcatataagtggtggttcttggccttagggtgctaggaattggttgattggatgtgtgctttaaatagatgatattattggttcaaaataaaatgatggggtgagaactgtaaatgcctcctagaccatattctgggtcttttttatggagttgtagatagagcagattttgagataagtattcatttagttaaaggtgttgtcatgaaattccttctcaaggagttgacttgagctaacttgcatgttaacaaataccactgttctggctttccaccatcctgtatgaatatggaagttacataraaataaaacatttaagttttcttagcgtttaaagcactaaactgtaacatatctggttaatactttagtattgtgtgctttcctattaatatgacttttttcccaagtaaaagatgttttctcctgtcttcctctctgatcagggaaaagaaaacagtttctgtttttctttggagagctcttcaggggatctttttaaggattgactcaactttaggaatttttcagttgagctgacattcattgcaatgtgtttgtggtttagcatggttcaaagtatttatcatctcaagtctctttgaccacaagggtagaaagaaatattcgcacacttgccccaaagtgcaagtgtgcacttaagtagattgtcaactacttaaaaaatgtatttttagcggggcgcggtggctcatgcctgtaatcccagcactttgggaggcagaggcgggcagatcatgaggtcaggagttcgagaccagcctggccaatatggtaaaaccgtgtctctactaaaaatacaaaaattagccaggcgttgtggcacgcgcctgtagtcccagctactcgggagggtgaggaagaaaaatygcttgaacccgggaggtggaggttacagtgagccaagattgtgcgactgcactccagcctgggtgacagagcgagacgctgtctcaaaaaaaagaaaaaagaaaaaaaaagtttttttttttaaagacaaatgaaaattcaaatcttcagactattsgaagcagggaattgttatcagaagtgaggaagcagagctgaccattaaagttttttactactatcttgaaattgtatggtaagaaaaaaaaaatgggtagcaaccttttgccaggtgtgacaatttctacctgatctgttaaatttagtacagtagtccacccttatctgcggttttgctttctgtggtttcagttatctgcagttgcctgcattctgaaaataggtgaatatagtatgatagtatattttgagagagagagaccaaaactatattcacataacttttattactgtttgctgctatacctgttctatcttagtggttattgttagtctcttactgtgcctaatttataaattaaactttatcatggatatagttgtatagaaaaaccacagtgtatatagagctcagctccatccatggtttcaggcatccactaggggtctcagaatgtatccccctcagataaggagtgggtctgctttatattattttccaaaaattgcgtttgttatataaaaatccatgttgccaaagtttttaagctctgtgttttcaaaagtagtttaaatactataaaagtgcttattctactcagtcattggggagagtatttctggatcagtagagaaaagggaaattgcaagtacatgaaaagcttccccttattttttttgtgatgtaggcactggaggtacagatataaacaagatgtggaacctcccttcaaggaattcataatccagtgacaaagagggaaatgtaaataatcaattgctgtaaaatgatatagatgctctgattgtagcctggattggaggcagtgggagccacatatagggagtgatcaattctgcaaaggtaagatttcggtcaaraatctatagtcagctgggtgccgtggctcacacctataatcctaacactttgggaggctgaggtgggcagattgcttgaacccaggagttcaagaccagccttggcaacatggctaaacctcatctgtacaaaaaataccaaaaaaattagctgggtatggtggcgtgtgyctgtagtcctagctactttgcaggctgaggcaggaggatcacctgagcctggggaggtcaaggctgcagtgagccgtgattgtgccattgcactccagtctgggtgacagagtgagaccctgttacacacgcacatacacacacacacacacaaatctatagtctagaggaagttataaggcacataggtgtaatgcttataattgataggaagtgatgagtatgaaagsaggttgacagataaagtgctctttgtttctagagaaagaaatcacttctgttctaggatattagggaaggcctcagtgaggaggatgataattttgctatatgttcagcagccattttcagatgagatcaggcacgttcagggtggcatggccatagacacagcagccattgtcagtttgcaaagagctttcaagtacatcatctgctagttatttggaaaccctgggaggaagttgtgataatttagataatgacccagagaggtagggcaacataccaagggccacccagcaagtgatgatgtaagcatgtgtttaagttgagcatttctgaccaattatttcacaaagaactagagtcattacatcactttccttcatccccttcatccccctcccctccctgcccatggcatcacattacatgtaggataaagctttcactctggaccatgttctgcaagattccacatgatccagcttctgtctttcytccaggactagccttcttgcttaccttgcatgccggctgtttccagaatttatgaaacttttttccaccccagggttcttacacatgmtgttcagttacacagaaagagtcatccccaccatccttcttcttgatttggcgcattgttagaatgtcacctccttagggagacttccctgatctttgtatctaaagcacatcccatcctcccatgagcctgcatctctcttctctgttttatgtttgttatggcacttagcactatcagaagttgtccttattgttcatttgtatgttgtcttgtattcccaactggagtgtgagtttcatgatgggagtggcagggattctttkttcactactgtttcccccagcacttgagatataggaagcacttggtaagcatttgttaatcaaataaaggaacctgtagtagcttagggtacaattacaagtggttttccaagagccagaaatgaaagtcattgggatgagttatagatgcagcttatggattggaaatttggaatgtatttgggacaaaatgatgtgaaacattttaatttaatttttggattgttcattgctaatgtataaaaatacgattgattttttgtatatttatcttgtatccttcaaccttgatgaactcgtttatgatctctgatagtattttttgtggattccttaagattttctgtatacargattatgtcatttgcaaatagaaatagttttacttattcttttccaatctggatgccttttatttctttttcttgcctaattgctctggctagaacctcagtgtagaagtgaggtggcctccaaaatagaagtggtgagatcagacatctttatcttgtaccttatcttaggaggaaaaatatatagtcttttactattgagtatgatgttagctgtgagtttctaatagataccctttttcaggttgaggaagttctctgttattcctagtttgtcgagtggttttttttttttggtgttgctgttttgttctttttatgaaagggtctcagtctgtcacccaggctggagtgcagtggtgtgatctcagctcactgcaacctccacctcctgggttgaagygattctcatgcctcagtctcccaagtagctgggattacagcagtgtgccaccatgtctggctaattttttttatttttagtagagatggggtttcgccatattggccaggctgttcttgaacgcctggcctcaagagatctgtgtgccatatgatctatatacattaatttcttactgaagcaaaaatacccaaagtgccaggattacaggtgtgagccaccaaactgcctgttttttgagacagagtctcctactgtcatctgggctggagtgcagtggtgcgatctcggctcactgcagcctccgcctcccaggttcaagcgattcttcttgcctcagcctcccaagtagctgggatacaggtgcctaccaccacgcccggctaatttttttgtatttttagtagagacggggtttcagtatgttggccaggctggtctcgaactcctgacctcacgatctgccactttgacctccgaaagtgttgggattacaggcgcgtgagccaccgtgcccggctgtgtgtgtgtgttttttttttwaaccatgaagttgtgttggattttatcaaatgctttttctgtggaaacctaaacttttaggctacagttctttttaaagcaggtagcaggacagaacttcttgaccaccactcagcagaggtttgaaagtttcccctcttctcctgtgaggtcactaagcatttgttacagagttaaccgagaagaatgcctgtgcttatcctctgggaacaactgtaatgatgggatgtttctctataagtctgagaaataaactgctggaatgtgatgccatatctgatatgctgtgtttgttttgccagtgtaatactgtcacaacactgttgagtgagctgatttcaagctgttgatatagttcagaccttggcagttctctaatctccttgacacttcagtgtttgattgcattcgtttgccctgcaaatagtcgacagtgtaagtgatctcaaagtgagaatatatctaaagtctgtatttgtaatagacaaggtttgaaggaaagctgagaccttgtwaaattcacatatggacttcctgagcrtgcaataaagacttaacttctacttgatggagcctgtcaaacagccatattacaggcatgatttggttgcatgggacttctattcttaatgttaaaataaaatccaataaaatgagttggygaaaatcaagctgtcatggagttgctaaaaatcttgttccaatgaaatgctatgagaaaggccttatcattatgctgtttagtttttaccaattaccctataaagtattaatttatatatatattatatatataaataataattattattagagacagagtctcactcttatcacccaggttggagtgcagcggcatgatctcagctcactgcaaccttggcctcccaggttcaagtgatcctcctatctcagctttctgagtagctgggactataggcatgcaccaccacgcctggctaatttttgtatttttttgtagaggtggggtttcaccatgttacctaggctggtttcaaactcttgagctcaagctttggcctcccaaagtgctgggattacacatgtgagccactgcacttagcctatattattaatactattattattgttgacttctttttacaaaacagaaagcttgagtcttaggctgattgcttccctaaggcttagatggcctatggatttgattccaggtagcctatctccacattttgtactcttgaacattttctaatttatttactaattcctcagtcacgtaaatgtcatccatgaaaaatattagagttttggtatctcagagatggttccttagagctctcagccctaaatggaaacacatctttttgatagtgtgttttattttccaaatcccaagaatctgtgaaattagtagtgttcttgaccaacagttagatagcctctgcttgaatgcttctaataactggagagctcaccacttcatggtgacaacatttttcattcttgcataaattcttcctaaatttgagctatcctgaaggtcagtttagctttcctatcgtctaaagtactgtatattgctgtctgaaaacacacagacaactaaatgctccagttgctttttttcccttttggtgacagctttattgagatagaattcatatagtatacagtttactcatttaaagtattttgcatatattcaaagagttgtataatgatcttattttagaacatttttattatacccgaaagaaaccttatacccattagcagttacctattttcgttaaacacctccagccctaagcatctactaattactatcttataaattcgcctattctggacatttcatttaataggtggccttttgtgtctgacttctttcacttagcaaaatattttcaaggttcatctatcttgttgtrtcagtactttttttgttgtatttttagtagagactgggtttcaccatgttggtcaggctggtctcgaactcccggcctcaagtgatctgcctgccttggcttcccaaagtgctgggattacaggcgtgagccaccacgcccagccttgttgtatcaatacttcatttattttatggacaaataaaagtccactctatggatataccacattttgtttatactctcatttctttatgggtatttgggtagtttccacttttgactatcatgaatagtgctgatctaaacatttgtttcaaatgctttttttttgtatgaaacactgctctgtctgctcctgcactgtgatgattttttgattaatctcatgtagtattttacttggtaaaatctcatactgttggtattagtctggttccgccttgctggaagtttgaaattttgattctttgattgatcatatgatttgttcatttcaaccttgggtactatgccaattggttaaatctccattctctgtcctcatccatgtcagtgatcagtatactgattgctgagtggtgtggcctctctgccacatagcttattgctgtggaggaaagagagtcttctcttagccattgttctgtgtggagttggcggactaacacatttttatattcatatgcaatattttcaattctaaaaatccttatgtttgtaccagaactaagatgtcctggcattatggaattattcatgtcagttgcctatctctggtcaggtagttagttgtgacatccagcagctcagactacaatttgaattctggctcttgtcccacttattatcagaatgacctttggcaaatgacttgaaggttaacttgggtaattttctcatctggataatgcggatagtagaaggacttaacctcataaggtttttgagaggactgagtgaagcagtccccacaatacaccatcatgtgctgggcatgttggtaagggctggatttcaaggatgaaaacagaggccagagaactttctgtggctttctgaatgtcaaaactgagactgtgcagatcaagcagaacgctttctgttccttccaaggcttgttcccttcaggtttcagtttcagacggaagcgaagttgtttgtgatgccggagcacacacctgcgggaactgtagacttcttaggagtccaccggggttgcgtcgcattgcttccacgcctctgtcctcaccagtgttgccaactgtggatttgtgtgtgtgtgtttatcgttgttggccatgcaccagaaacagagatatcagtcacatttaaactctgctgcccaggaaactcctgcctacaaacccagcccagccctttgagaacctcaccgaccaagtgagtgatatgttgagagatgagcatagccatcttaccattcatgtctgtgaattattatttattcagactggwtctcgttaagagaactgtgtgtaatcttagcatgataatcggattccacttatcacttggaactgtgactcacttttggaattttaaggacgtaattacaaaaaaaattcttggttatcttttaaaaaggagtctgttgtccttagacttgttaactcttcaactgctgttttccaaatcgtggtacaaagttattatttgcaggtattcccaagtggccttataaaaaccaaaaaggcttcttgctaattctcttcagatgctgatatagaaatgacactgatttttttctttttagtatttaagagcacccactagaaggatatttaatatttgtatgtagttttttttttcctgttatgttaagcagaatttcaggaccttgctgtagagcagcatctctccatttaagtaatgtgtagaccccttttcaaaggggaaagcaccttgcaagaaccctgtgaattgtaccaaacccaacaaacataaggtaaacctaaggtttacatgcaagtctcttttgattgccagttatcagggttcttgcctggcttgttgttcataaatgggaatattttatttttagattatcatagaattgaaaaaaaaaatcttcccaagtagctgggactacaggcacacaccaccatgcctggctagtttttttttttttttttttttttttttggggtagagggatttccctatgttgaacaggctagtcttgaactcctagcctcaagtgatctgcctgccttgacctcccaaagtgctgggattacaggcgtgagccaccgtgcccagccttgccatgcctactttttaataaggttgttttttgcttgttcagttgtttaaattccttatagattctggatattagatattggtcagatgcatatttgcaaatattgtctcccattctgaaggttgtctgtttactctgctgatatttttcttttgctgtgcagagccctttagtttaattaggtccagttgtctgtatttgtttttattgcaattgcttttgaggacttagtcataaattcttttccaaggctgatgtttataatggtgtttcctaggttttcttctaggattcttatagttcctgatcttacatttaaatctttaatccatcttaattttcatatgtggtgaaaggkaggtgttcactttcattccgctgcatatggctagccagttatcccagtatcattaattgaatagataatcctttccctattgtttatttttgtggactttgttgaagatcagatggctatcaatgtatggctttatttctgggttctccattctgttccattggtgtatgtgttggtttttgtaatagtaccatgctgttttcgtcactgtagccttatagcatagtttaaaattaagtaatgtgatgcatctaactgtgttctttttgcttaagattgctttggctattcgggatcttttttggttccatatgaattttagaatagtttttgttttaattttgtgaaaaatgatattggtagtttgataggaatagtgttaaatctgtacattgctttgggcaatatggttgttttaacgatattgattcttccaatccatgagcatgggaggtttttccatttgtttgtgtcatttgtgatttttttcagcagtatttcgtacttcttgtagcaatctttcacctgcttgattagatgtattcctaggtattttattcttttttgtggctattgtaaatgtgattgcgttcttgatttggctgtcagcttgaacattattggtctatagaaatgctactggtttttatacattaattttgtatctcgaaacttcatactgaagttgtttatcagttccaggagcgtttgtctttagggttttctagttatacagtcatatcagtgaagagagatagtttgacttcttttcctatttggatgccttttctttctttctcttacctgattgttctggctaggactttcagtactatattgaataggagtgttgaaagtgggtgtccctgtctttttcctattctgtttttcattcaataaaaactcaacacatactaagtatggagtggtatatacctttgaaagcattacagacactacgtttctctttaactgggtttgcattccactggagactttcactgctttgcctcttgctttaaactcttaccagccagatattttcctttcttgatctaccctcttaagagtcctgcccattgtccatgattgacagcttggtttcctgattgagtgctttatgtgaacatgaaaattcatagcatccttaagggagaaatgtagttgatgggcaaagaacagacaacaatcagtcttttcccaaaatgaaagccgccctctggagagatcagagtaggtcctggggtatacacctggggccatttccaacactaaaatgggctttctctccagtgtatatgtgttgatcctcctcctcctcctcctcttctttctcctgatgaacacaacttgtagaacataaaccaaggatcaggctctataccaggtgctttttgcacattaccatatttaatccccgtaagaccccaaaagggaggtactcttatcccatttaacagatgaagcaaatgtcttaaaggaaagatgttagctgttttaaaagccttgtggctagcaagggtctgagctgtctgatcagagtctaatggttgccattaagcagtcttcacccttttcatgatgcaaaatggactttcaggtttaaagaaacgaagtctaacacaaactgcagttatttaaaaggcaatgtagtaatttaatcaagatccacttgcttttggatatttcacgtttctacttctggtttcttcttggatcactttctgaatataatggatctggagtacagggccacagcctttagagtttcttttctcttccctcagtgttttaagtgggaaggtgtttgcccatcagaagagaaactgttggattgcatggtgccccttgctgtttgaggtgcctctgaggaacttggtgtggagataggaggagatcaggagaagattcttcgagcttcggctagaagatgtccaggcaggttatcttctaactacatgcaactagaggcatatttacagagaataatctgaagcttgactctttgatcatcaactccttggagtagcctgttagctcttaaatactctcagttctagtgaaacaaataaaattcctacctccccctccaccgttccttcctcctcctctctccagatttcctccccctccctccctgaaatatatatagaatacccaccatcaagcattgttcttggctctggggatgcagcagtgaatggaaacagatgaagtccctgtccttatgggatgtttctattggggaacaaagtggaaatctcgggagggcaagacgcccagcacatggttatcctgtggactgcaggaatagtgagtagtttgttaagcaataattatttttattaacttgggggagagaaagttttcacatgtgtatttctccttgccttctctccatgccacccattttactgatatgtttttaaggaagaatcaccgagttagttctgactctcatttaggtaaatgtttccaattcatttaaggttatcggcttttgtgttttgtcccactacagatgggcttgcggttctgtttaaaagatgggtcatcattacatatatagaaacctaatccaggtttagtagtgtcaacagatgtcttcatgaaatctgattttaaaaaatcaatttctgtggttgatttggaaggagtgggcccaaatctagaagcacggacatgggctatcatttcagtgccttttagaaaaattgcaaagcaggaagtaaaccttgcttgctgaggtttaaggatggatgggtctaattttgttttgcatttatatttaatggcctgggtgcctttcctgtgggctggtgcacatttagctaatgaatgccttctgaggagaccttgttggttatatggagggcaccccccagcctcctcatctggaagcccagagagaaacctggtgccgttgcccgcaaggccgctgcagggctcacctgcagagttgtttttgtgttgcccactcgcctggattgttagtttgtaaaaatcaaaggactaaggcagaagccctgatgctgaccccgagttattaaattggttcctctggccatttttctcagccacagagctgcccactagccacgggccctgaccccgggctgtggcgtatgcctctctctccttggggccgtcagccttgcagtttgtaaagccatcattcagttgagttcaggctgttggttctatttttctcaagtacagtttgttattttgctctgctttgctgctcatatgcgaggacctttcttggccagcctcttgagatcttctgttctggtgatagatgcttgattcaggtttggagagcagcttagtgtcctcagataattctgggaaagcaactgaagagtgatctggttctacaagctggtgactggacccacaatacccagaagaggtctgcattttgcccctggcaccgcagagtgaaagggaggccagagttctctgcagactccacctgttctccttactgccctttgtagtgaatggacattgactcaagtttgtctatctacactctttggggagccccttaaaacccggatttgacttggaaatgaagcttttggttatggcttctgatcatgctatatgtrgtagaagcttagtgtctgtatttttaaaattcagactggcttttaatactgggtaactaagtcatagatgaggggaagttgatggagtgatggaaatagacaattgccattttgcagcccatcaatgaattgatggatctgggcatgagacatcgacacttggtaatatcctccagagacaataagctgttgtttgcccctgacagtagaatactttacctccaaggaagtagtcttataaaaacaaatacagctgatctgttcaagtaacaatttacagtaactacagaggacacgaaaacatggtaaaacaatgttgttagggataccattggcctattccagactgaccaaaggtctgctttctttaacaaataaattacaagaaaggaaaaaatgatggaatggaaaacctacagattaaagaatttgagacatatccatgaaagtctgtagtctcagctacctgggcggctgaaaagggaagattgcttgaccccacaagttcatttctagcctgggaaacatagcaagaccccatctggggagagagagagagagaaagagagagagagagagacagagacagacagacagagacagacataccaactgatctccatatgtaccttatttagatcccaattcaaatgaattaactagtaaaatctgggcatttggagatttgaaccctgattggaaatggggcaaaattaggggagagttgttaaatttttctaggtccaataataactttgtgtttttattttaaaagcacctattggctgggcgcggtggctcatgcctstaatgccagcactttgggaggccgaggcggtgaatcacttgaggtcaggagttcgagaccagcctggccaacatgatgaaacccccatctctactaaaaatacaaaaattagctgggaatggtggcgcacgcctgtaatcccagacaggagaattgctctaaccagggaggtagaggttgcaggtgagctgaaattgcaccagtgcactccagcctgggtaacagaatgagactctgtctcaaaaaaaaaaacaaaaaagcacccactgtaacacagtgaatgtatatagaggacagtcagcaaatgcttattgaatggtcagtttgatgatataatatttaagtttaattggattcttatagatgaactaggatacccttttcattctgagttgaccatttgcaccttgtaggaaggaacaggtgaggcttccaagtttgtcctccttcctgctctgtggaaccaaatccattatgtacacagcccctaccctaacagagacgatcacaatcacatttaaattatacagtgcacctacagagtttcagcagatgtgtgaatattaagttattaataactaattgggtgctaattatgtgccctggagttcttggagtgataaagaagtgtcacctactgtgtcaggcctctgtcttttcagctttggaaaatcatttttggcagatgtgccaaagttaactttggagctttaggttttgaatatcatttctcacaagtcttattttatttttttatgccttgtgaaaacttactgtgaaactgatgtgacttcccataagtaaaaattgcatgtacygttttccaaagagggggtggcctgtgtgtgatgatagtgtttcatctctcgggagatggaagaactaacattaatcccaggggagaatttaaagctgctcaagggaattcagaagtgattctgaagcccagtgggtttttggtatattttgggagataactggtttggaagggctttgaacttggatcttgcaagtcttagctccatcactaaggatacgcatctcgtatttgtgcacacacgcccccactgccccctttttgttccatctctatccgaaataggactagtttggcttttgttaactggaagaaatcattgagttagaaagcctggataccaggttaggatactaggaatgtgatccatggtttctaagatttatagaatcctgttaaatttagaagaagggttttaatgagataatcattgaaaggctacactctcccctttctgtctctagttgcttgtaagctttagattgctggaactttgtgcctcctatttggaacaggcaatacactcatttgtcttaaagtcaaatccaacaagaaaagaaggtgttgctttatggtcgacataacccatttgctgctggaaagttgttaggacattagagctgcttggtttgctttgtcttttaaaattagcttcataaatgcacacaattgaagaggctcctgatcttggatattgcttttccttctcccactaagaacattaaaaaaatctcagtatttccaacccagggttaaaaatataatataaaaggtagaagggaaaactgaagatgaaagtaaacaaatagaaggccagagttaccaaatattgacaatgattaacacctgtttgttactggtcaagctggccaaaaacccagtgtttgcatttagccacagaaaataaaagctctcccagttgggttgtgattaatagctttgtccacaccccgcattccttttctatgctgtgtgtttgcccacctgttgtttggaactcctttctaggttttggccttaactgatagatgattcctggtgggatccagagactgtctgaggttcaggtttccagcctcccttgcagctagtgtgtgggcatgtgacccgggctccaccaatcacatgcatctgtcccagactttggatttactgctagttttgccaacacagacagaagaaaagacattttgccagttgctacaacatcctgttgacaagaatagcagtggtggtagagaagcctcgttgccttaacggggctagttcctgagctccattatctagcccacgggttggcaaattttttctctaaagggcctgatagtagatgctttagatcctatggaccatacaatctttgttggaattattgatctttgttgtggtgttgtgaaagcagccatagacaatatgtgagcaaatgagcatggatgtgttccagcaaaactttatgtacaataacaggcagttgcctgatttgactgtagtttgccaataccagatctagcctaaccagtgatcctgggagctgagctacccaaaactttcagtaaattctgtttcttagatcaggtagacttggtttattttccttgccactagggtattcattcctatttccagacttcataatctaacttactatgtgcagaggccataaaatcttacctgctttatacagacacaaataaggactcctccattcagagagagtaactcttttggataaaatatggtttgtttttgattctctgcagtagatcatctttttttatttttttgagatggggtctcactctgtcacccaggctggagtgcagtggcgcagtcttggctcactgccacctccacctcctgaactgaagcaatcctcccacctcagcctccagagtagctgggaccatgggtcccaccacgccaccacgcttggctaattttgtgtatttttggtagagaagaggttttgccatgttgtccaggctggtctcgaacttctgagctcaagtgataacgcctgccttggcctcccaaagtcctgggatcaaaggcatgagccaccgctccyggccagatcatctaattcttaattgaactgccttctttgtccaaaactcttctggaattacacatctagaaatgctcccattcaaaacmttattcccctagaggagttctttgtaccctttccccagcctcccccaatgatgcattctatatacttatagtgtaatatcaaaaccaagaaactgacattatcaattcacagactttattcagatttcaccagtttaacatgcacttatttgtatttactcagtggtgtttgtggtgtgtatgtgtatgtatagttttatgcatttttttcayatgtgtagatttgtgtgaccagcatcacaatctagatacaggacagttccatcactgcaaagatctcatatgctaccccttgatagccacccccacatccctaacctctagcaattactaacccattgttatttcgagaatgtcattatataaaggaaatcatacggtacataaccttttggtgctggcttgctttactcagtgtagctccccagacccatccaagttgtttgttcctttttattcctgagcagtattccatggtagggatgtggcagtttgtttatccgttcatctgttgaagaacatctgggcttttcctagtttggggctattacaaataaagctgcttatgaacatttgtgtacatagtttttgagtgaacctaagtttttatttctctgagataaatgctcaagggtgccattgctgggtcgtatagtaagtacatatttagttttatgggaaactgccagactattctcctttactaagcacgtgataactggaattggcagtgtttgaacagctcttcctgtctttcattttaccgtctttcacaccattatctggattaatttttaaacaaaagaggaattgcagttttcttacatgccagatattatactaagcaccatacacatactatctaatttaagcctcataacaactccccaaaggagggtcaataccattgtttctctaaagaaggaaactgagccacatggtatgtgcgattaatgagctagatgatcctgtaattgttcaggttcatccagctcattaaaagttatcaattggccgggcacggtgrctcacgcctgtaatcccagcactttgggaggccgaggcgggcggatcaygaagtcaggagatcgagaccatcctggctaacacagtgaaaccccgtctccactaaaaaatacaaaaaaattagccgggcgtggtggcaggcacctgtagtcccagctacttgggaggctgaggcagaagaatggtgtgaacctgggaggcggarcttgcagtgagctgagatcacaccactgcactccagcctgggtgacagagtgagactccgtctcaaaaaaaaaaaaaaaaaaaaaagagttagcaattcaaactctgaccttggagctggtgctgcttttctgaaaccactgaatgtttggtgcccttgatgccttgagatgttcccttacgaagtgtcctgattgtgattgcggcctgtgaggcccgttatggcttgtctatctactgacactcccttgtacccatccgtgaatcctctgtcctcttgggttttatttttctgtcttgcttttgatatgcctgaagcccaagacaggctgcaacttcatgataagtggaggcttcatgtttgattaaaccagtcctatgcattgtcacctgagaatatcctgacagtggaattagtaaaggagactactgcagggtgttgtggacccccrtggtgatgaagacactctgagattaaaataacatattaggagattcgttaacatagttgtccattcgttacccaggcaatccttgtttcattcataaggtctcatgactgcatcttagttggacttagcagcacctaacttctgcggattccctggcatccctccaggaccccattctttcctgccttgaatgccttcctgtgtttcacacataggcaccaaggatccaggtggaagacacctagcttgctcctaccaggctacacattttcacccgaggggaaatgaaaactgggcagcaaaagagaggttttcttttggaattacacatcttgaaatacctcagttcctctgtcctgagacaaaggcatttcattttttgttggcagctaaatgcagggtgtttgagtggggtgaccccaggctgatgcaccaagggaacgtctaatgcctgcacttcccaggctttctgctgcagaacacacactcatttggctgccatctgtaatacagtcagagagagagggcagacatttttctattaggttctattaccttgtattggaagaataatggcatgttgcttgaatgtttcccaagagaatgttttctgtgctccgtgtatatttcaaactccaaataagaaaagtaatgagggttgggggctgctggtgaggcaatctccactttaaagattctgatctttgttgaagcaattatttatttacatgaaaaaataatgccttttccttgagctgtctcaggaaatccaaaagtgaagaagcaaatagacgtttcatatagtatagcagtgtcaaagaacagtcatatgtgagtttattaccaaggttaaaaaacctagtgttaactttgggtttgtctaagtttgtttttcattgttacacgagtatgccggagactggttaatttattttacttcctccctccctccctcccttttcccttttcrcttccctccctcccttctttccctccctccttccttcctttttctattttcttttaagagatgaggtcttacagtattgcctaggctggtcctgaactcctgggctcaagtgatcctcccacctcagcctgctaaagtactaggattacaggcatgagcccctgtgcctggctttggtaatttataaacaatataaatttatttctcacagttctggaggctgggaagtccaagatttaggtgccagcaggttcagctgtctggtgagggtttttctctgcttccaaggtggcaccttattgatgcatcctctaaggaagatatgctgtgacctctcatgcagaagtggaaaaacaagtgaaccaaacactatctgaagactcttttatatggttcttaatctcattaacaagggaggagccatcatggcctaattgcctcgtaaagatcccgattcttaataccatcacattgacaacacctacgttttggaggagacatgcaggcttcaaatcacagcagggctaaatcagcataatatgacaacttggatttattgtgttgagtataatgcaaggcactttgcttatattacattggctcctcttagaaataggttgtcgtatagatgcacagactgacacttaaagttttagttacttgctcaagatcatgtggctgatgacagggcttgaaaytggtaaagccttggtttggggtttgaatcctgccttatgtccctgagctcattatttcaacagacttgctataatctgctggtggaaagcagaccatcaagaacatcttttacaaatggtagcctgaaggtcctaataaacagggcactgagttttactgctaaacctaataaggggagtctctggtttctctcgatttctccttgtccttaattcttccaccttttcttcccagaaggaaaaataaaacccataagcaccagggattaaaaagcctggtactttttttcccctgtacaaatgcagtgatacatattgaatgtgtgaaaaccagagctgtacacggctgctgagaaattatcttttaatacataagggttacaaaaccaaatcaaggaagccaagggtgggggcaccatgtaccttgatcctaaaaatgttgaatgccagcgaggtattacagaatctaccattgccactcacctaggaacaccagtgggaatgtgtagtacaagatttttgtggaatgagactcatgttcgaagaacacagtgacgagttccgcacaaaactgttgagaagcagccaaaaaagagctcataagagattgagtcccggccaggagaagggaaacttggcacctgattttattaggatgcaatagttatccaaccattggatgtgcctgcggttttcacagggaagaccgtagacctcaggatgataactgagtaagaaagaagttttgtgtttgagcccatgtgtttctaaccagagtgctcttttccatggaataaatgtttcctaacactagtgtgaagatttaatcaaatacacacttcctcatcaaacgcacagtcaacttttatcttaaaatttattaatgtgatggttttcattttcaaatgtaagcattttcaaacacttaattgtttaactctcgatttgcaaaatgagttttttggtgaaatgtgtcatttgagggtcttttaccactgtttggttttatagcttgcttttcttgtttactttatgatgtaaactaatttttactaccaataaaagttttaggaatcctatttacatgtgaacaatgattcagcaatttgaacctatattttttgctgtggagttgtctagtaaaagtttatatgactctgctgactctaatggctccgataaattacacatttatctgtgtgtatgtttatatttttttcctcattgcctacacttctagaaccctgttcatcaacctcaattacacgatgtatttggacactctttctcttttttttttttttaaaggaaaaacataatttctatatactaccagatgggtgtgttggctgtaagataaaaatcccaaaatacttaagagaccatctggtatcttggtagggtttagttgattaagttcttgtgtattgatttcagtctgagcagaggtaatcttatccctttggatctctacttaaagaaaaaagttgtcgttgacattttgtcccattgttaataatcttttttttttttaagtttcacaagaaaatactagtgatagatgatagcagccattgatttatatgctcacacagttgctcatgactagtggttgtttatcctgaacgggcctgatgaagccttagggctagacttagttcatgagacacagatttctttagaagatgataatgggtccatgtgggaattgacctggattcattggtgttgagcttgaagctaagcaatttccgtgcaccatgttggaagttttctgggtgttactttgtaggccaccagtgaatactgcacctctggtgtaccttggagagtgtcagaagctttatatatattgatccatgtaagtcatgtaagaatcaaatagccaggtgtggtggctcacgcctggaatcccagcactttgggaggccgaggtaggtggatcacttgaggtcaggaatttaagaccagcctggccaacctggcgaaaccccgtctctactaaaaatacaaaacttagccgggcatggtgacacacacctgtagtcccagttattcgggaggctgaggcaggagaatcacttgaacctgggaggctgaggttgtagtgagtagagatcacaccactgcactccagcctgggctacacagcgagacttcatctcaatatatatataaaagtaggccaggcgcagtagcttatgcctgtaatcccagcattttgggaggctgaggcaggtgggtcacgagatcaggagttcaagaccagcctggccaagatggtaaaaccccatctctactaaaaatacagaaattagcagggtatggtggtggatgcctgtaatcccagctacttgagaggctgaggcagagaattgcttgaacctgggaggcggaggttgcaccgagcccagatcgccactgcactccaacctgggagacagagcgagactccgtctcaaagtaagtaaataaaaaataaaatgaagaatcaaataaatagtgctctattcctcattctgcagatgcggagtgtgttagccattgacagggctgatcttcaagtttacctctgcctgactctgaaattagaatttcctctacggtgcaatctattttccctgatggccaggacacttgttgagctctttctttgggtcatggactgkgctagggttaagggatattcagtggagcaaatgttccccttctctgcccttctagaaccttgttcctctagttacaatattttaatattgttgttaataatgtttcttttcttatttatatttaagatacatcctcaggctcttcattttaaacagggattctcaaccttagcactagtggtatttttgggccccgatagttctgtgttgctggagctcttctgtgcattgtaggatgtgtagtagtattcctggcctccrctcactggatgccactagcatcctcctaagttggaacatccaggggtagtcaaatgccttctggcaagtgggggattctcccctaatagagaaccattcttctaatgtaactgccagctatttgtcactgggtgaagggtcagaagyctgtttggcagctgcagaatctttgtatcaaagtgctatggagtggagatttacactacaaccaccagatatcatgggggtagaaattatgccaaacaacagatttgtattcattgcagaacattttataagtacatataagataagggaaaagtaattttttttaaaagtacttataagccaaaagaagagacaatttaaaaaatcatctcacaatgtagagatgaatgtgacttaatgtcactacatcctgatagttttttttttctatacatattacacataggaaagacgtattgtacatatagggttagtcaagacatcctgtctgtgactgatgttatgcaatctactttttcattttatattgtgaacatttccccatttctttaaattatccccctttttttttccagcatggttcataatgggtggcatatttgtctcctgttccttgtcatttttagcagctgcaatagtgatcctccataaatgggccagtgtctacttttctgtcattttaatgttggacattttatttgttttcatttttttttttgttctaaataatgcttttagtcctcacgtatttatgtacatgagactgtatgccaggcacccctgtttcaggtaccttggatagaacagtgaacaaggctgatccctgtcctcatggatcttacagtccagctgcgtatgtgtagctaaatcattgcatatgtctttgttttgttaggattcgtcgtgccctgccattttctcagatgtgttgtcccctgccctttcaactttctttgctcatcagggtaacctcttcctgtataagggcccagcctctatgaaagggaggctctagaatctgctcgcctgtgagattagaattcaccttggcccacactgttcccagttatctagtgaaatcagcatgaatcagaatctactagaagcagcatgtgtgcaggttgttaagcggggagcggggggggggcgcggggaactgtaagggaacatgtaaggctaattaaggtacatcatctgttaggtgtcttttttgtcctgtttttcatggatggctccaggggaagcccagtgccacatctgagaggcatagagggaacatgagatacatgcccttccagggcactttgactttgacaaattacctaatctcttcggacctcagtttactcttgtgccttatagtgttgtggtgagaaatgaatcgtgtgtgaatagcatttaccatggagtctgggatgtgggagtcattcaagagaatggggctgctcttgtgctttaaccaacacctgcccsccaccccctgcacccatatgctagataattgatgtgcgttctcaagtcttcatagcacatttaggagatataggtggaattttgttagtttttgcttcatatgctttgaggctctgttgttaggtgaatatatatttatgatatcattcttttttctttctttctttttttgagacagggtctcactctgtcccccaggccagagtgcagtggtgcagtctcagctgactgcagcctccgcctcccaggctcaagcaattctcatacctcagcctcctgagtagatgtgactagaggcatgtgccaccatgctcagctagttttttgtatttttagtagagatgaggtttcgtcatgttgtccaggctggtcttgaactcctgagctcaggcagtccgcccgcctcagcctcccaaagtgctgggattacaggcgtgagccaccatgcctggcctataatataattctatcctgctttcttgtatgcagcccagggcttaatgggttgaccttctatgctgctgacaaaggaaggctacctgtgctttttcttttttttttttttttttgagacaaagtctcactctgtcgcccaggctggagtgcagtggtgcaatctcggctcactgcaacctctgcctcccgggttcaagagattcttgtgcctcagcctcctgagtagctaggattttaggtgcccaccaccatgcccagctactttttgtattttttttttagtagagacggggtttcaccatgttggccaggctggtctcaaactcctgacctcaggtgatccacccacctcggcttcccaaagtgctgggattacaggcgtgagccaccgcacccggccacctgcgctttatcagcttattgaggtgtgcggcaggagtcctggttgcctggtgagtcatcctgcaggtggaatggttgagtcgccgagtcccctgccagattgtccagagttgtacaagggcacagtgctgcctctcaatgacaggaaataggtatgatttcctctctcttctttgtccttatttcatctctgattattgtcttcccagcatttaaccacatttgcaagttacgtttttcacttatttgttgacctgttcatgatattcattaatcctgtagattaagatcttcagggattgttatcagtttcacttattcttttatcatatggtcccaggatactgcctggcacatagtagatgttcagaaatatggactaaatgagtattataattgacacatctcagtcaagaaggagtggcagttatactcagttgtaactttttcttgaagatatgtatcttcaagttacttgtactaatgggtggttgcatattttggctcttttactttgtatttttttagaaacagggtcttactttgtcacccagcttggagtgtggtggcaggatcacggctcaccacagctcactcctggctcactcctgggctcaagtgatcctcctgcctcagccttccctgtagccaggacaacaggcatatgccatcatgcctggctaatttttaaattttttttgtagatataggatctcccaatgttgcctagactggtcttgaactcctggtctcaagccattctcctgtcttggccaaccaattgtgaaactgtgtctggcctgtttaactcttaagtgtagatgtaatttacttcatgaaagagtcagactcagtggcttatacctgtaatcctagccctttgtgggaagctgaggtgggaggattgcttcaggccctgagtttgataccaacgtgggcaacatagcaagaccccccccccctcgaccatctctaaagaaaataaaatgaaaaaataagctgggcatagtggtgagctcctgtagtcccacttctcaggaggctgaggagggaggatcagttgaacccaggagtttgaagctgcagttagctatgattgtaccactgtattccagactgggcaacagagcctgaccctgtctcttaaaaaaataaataaataagaaaaacaagaaagggcttctttccttctgagtgtgtgagcatccctcatttgatgcagaaggtgaggtgacacagaagtggtctctgtctcagggattagcaaatttagtagggaaatgcctccatagcccccaatttacatatgaatagttaaaaactgaccgtttcataaaataagccctaaccaggaatgcattttaagggaatactcttgtgatgagtggatttccagagcaaagaagagacacagtctgagttaccagtgccaattacttggtaccactgcaaatcattcccctttggcaacattatttttaaaattaacttttaggaatttcttctccaagcgtattcttggttcggcattctaacagttcatttacctgattgcatttgatgggtctgttgggattctggaatgtcaattttactttttaggagataggttgcctgggtcatgtccaacattcttgtagattgaagatattttccttagcttcttgttctttgctttctggactcacatcctttagttgttttcgatttggggctactataaaaaatgtttttacttattctccagatattttcttccagccatatgccgggcccctttgtttcaggcacccaggatagagtggtgaacaaatccctgcctgcacagagctgacattctagaacctgtgtaggggagagaagattcctttcccttacacatcaaaaagttcatggctgaggcccccataacagattaacaagagaaaagcaagcatatttattgaatatcagttttacgtgtcacaggagttttcagaaatgaagacccaaagcaacggggaaaactgtatttttatggacagtggtgccaaagtatgattggaggacaaaggggtattattgtctaccggtaataaactgtgggggtggaggggagccagcaaggcttgttttgttcaatttcttcttggtgtctcacagaaataaggacgttcctttcctctgggcatgtggaggacctctctagaatgagggtgagactatgacctactttcaggggaaggtcagttaagttttataaccagtttcagggggagaagggatgagagaggaccagagagaccatcctgcttttgatgttctcccaaaggcaaggtgctccattttgaggccaggagtttggtactagcttgggcaacatagcaagagcccccgtctctacacaaaataaaataaaaaaataagctgggcatgatggtgagctcctgtagtcccactactcaggaggctgaggagggaggatcagttgaacccaggaggtgttctcaactctggcacatgcttgtagctgaattattgatgatgcctttgatttgttttcttgggattcattgtgccctagtgtctcctgtatgtgccgtccctcatgcctycaactttctttgctcaaaatgaaaccaattgatgataaatgaaaggatcagtaggctttaaagcagttatttacaactgagcatttagagttcccacscttaaaaagtgggagctgttcccatggctgctgagagtgctgcggaagctggttctctttgtccttaagttgatcratagcaggcatcagcggggaagatgctttgtactttgcttgttaaacagagggctgctaagcagctgtggcagtgtgaccctggttgtgctgctgtgggtgacatgagtgtgcatgtggacagtggttatggtgcttccctacacactgggcacccaccctatggacagacacactccatgaaaatgtttgggaagtataagagctccaggccatgggatgaaatgggaaggacctaactctgatttctagatttggaattgaatctgcatgtactgttcaggtcattgttctggcacatatttgacggtttggttgtcttcaagctcaggggctgcgaaagttgccagaataggaatgttctggcctgatgcaagcaggcacccggtgcctgtggattcaggactggtcacactgcagctggacattatgaattcagatgtccctgatgagacggtgtcctaggacagtggctaggtgaggtctcaggatctcaggtacaaggttagaggaggcaacgtggagtcacagtggagagcctggttggtcccatagccagatagctacaggttcaggtaccagctctgccctcatctattttttgtgaccttgggaaagttagataacaatttgagctcctttttctatcttgaaaatagggatctaatgtctaacttagctccctggtgttttattctccccatctcatccacatcacacttttattttcaagtcttgttttctttctgtcatttattcccgagataagtgtatgcttgttttgttgtttattttcccagctaggatacaagttctttgcgagttaaggatttgattggtcttgttcactgctctgtctcagcacccagcacctactaggtgaagtatttatagaatgaaaggatgagtttgctagacactcatggccatgatctagtgctcccaggtccgtattttttggccaaagccagaaaaagaccatcttcaagtagaaacatagttatacgcctgtaaaaatttgacacattatagattctggccaccatgcccttggaacttcacttctgaatctgtgttcagaccaggaatgtagcactggttctcatggcttgctttggaggaagtctttggaaatttttgctgatagccttctacctaggagcatgagttcggctgttttctcctgcccctgcccctgcccctgcccctgttcccctttttggacagtgcccaagacctagcagacacaccttggggcccctctagcctgaaagcctttggtaatccctgcttttaagggccttttgccatggcctgatgaacatcagacaggatgctgatggttttattcttgtagctccatagccgtcagcctgaatagatgttctcagggcttcatataggcatatacaatgtatgttttctttcatggacaaaggcactgatggtgcaagtccaaacagtgctgctcagttgaggattttcttgttcaattttcaggagctcttgactgactgcattctgcttcactggagaagaagatagtttgatgaggctgtgtacacttcttaaaagtgaaaaagcctttgcaggtttgtccagacagtggggtgaccaggaaggagagtcagaagagaaggtaggggtctggatcctgattttgagtgttcatttcccaaaaaatcttaggaagataaacactttcttggtaacctttgagtgtcatgttccttctctgaagagtgtattagattccatgtggtatacccagtagattgcattttgagtgtcattgatgattaatggatagagactgcttagaccactgtatggagaaggattctgaagycatgtctgggtgcagtgggagagtgtcatgatacattgattattacttttcataaccgatttacctaaaccaaataatactagtttttaaattcctggatgtgatacacaatttcctttaaaaataaatttaattagaagaaatgaatggttttttttaaataaggaaaactagagtttttcagggggaatgtggctatggtggaaactttgaacatagtatgagaaagaatgaaattctggccrggcgcggtggctcacacctgtaatctcagcactttgggaggccagggcaggcggatcacgaggtsaggagatagagaccatcctggccaacatggtgaaaccctgtctctactaaaaatacaaaaattagctgggcctggtggtttgtgcctgtagtcccagctactcgggaggctgaggcaggagaatcgcttgaacctgggaggtagaggttgtagtgaggtcagatcatgccactgcactccagcctggcgacacagtgagactccgtctcaaaaaacaaacaaaaatgaaaaaagcacaaagaatgaaattctggaaacactaaggagatgaatgtttacctacctgacagaattgttttgggagttttaatgcaggtggcagcttgctgtgacttctaaaggcagtacagaagtatcacagtgtggttaaacttctttttttgaccaggaggtaaacctgaactcaaagtctcccaaagccctctctgaacaagaaaatagaatagtggtccagagtttggatactgaggctggactgtctgggtttgagccccctctcgcctctgttcacatagttagcgagtgatatatgcatttaacttccctgagcctcagtttctcatttgttaaaggcagtacctcatggtgttggtatcaggattaaaagaccatttcagaggaagcttctagaacagcacgtggttcagtataacacggcgtctacgggttgacaatgataatgatgattggatattaaaaaaacctgactggatgcgttggctcacgcctgtaatcccagcactttgggagactaaggtgggctgatacctgaggtcgggagttcgagaccagcctggccaacatgttgaaaccccatctctactaaaaacagaaaaattagctgggcgtggtggtgcacaccttgtaatcccagctactcaggaggctgaggcatgagaatcgcttgaacccgggaggcggaggttgcagtgagcccggattgtgccacttgcactccagcctgggccatagagtgagactccatctcaaaaaacaaaaccttacacaatttaatacattaaacaggtttggacactttttccccccctaattaaaaattttttttttttctttaagagacaagagtcttgctcagttgtccaggctgagtgcagtggcatgctcctagcctactgcagcctcaaactcctgggctcaagcaatcctttcgcctcagcctcccgagtagctaggactacaagtgcatgccactagcccaggctcccctcacttaaaaaaaatgggtgcttggccttacaaattgctgagattactctgtcatcttactatttttataaaagtttcctttttttttttaaatttttaagagagaagtgatttctgagtgaaggaatagcaaaccttgactgtggtgaatatcttatttctcctttagtgtctatatgcccgtttttatgctgcgtatatcttatttatctggcttcctaggcagtttagaatatgtaaagcatttatgccactgaatgttttttagaattatagcatctttagtgaatgactgtacctacgctgagccattttatcatgctataaataccaaaaaacactagaaattaaagaacaagtttatttcatttttgtatataaattctattccttttatttttaacttggataaagagctttgtttgtttgtttcttaatcacttctcttttctttgtagtgagtaaagaggagatatcaatttgtgtgtagatattagcattcttatataacagactcagccctagacacataaaataccagcacctactagctggtgttgaaatgtgtggcaaagagaataatgattttgatttacaaatacttacctgtcaagaaacaccaccaccacccaatcccttactgtttcttttcagaaattaataatttaaattttaataagcaccaggcttaatgcctcatcaagtattttttttctttattatttatacacgttggtgtagctagcgtgttgactagcactggttagcacactaacaaatagaaaccaacactatactcaccttctaggttctaggtttatagttaattaacccaagttctcctgaagaccagatttcttcttgtcttggaaggggttagaaggtaatagtcatttgaacatatgtccacaaaatcttttttcagaaactgaggtttaattgtcctcctattgactrtgagctagacttcatgtctcctgatgaacataataaggttgaagtgatagtgactttagagacaatatctctaaagagactttctgtcttggataactttgaggaaagccacctgccatgttgtgaggacactcaagcagccctgtggaggggcctgtgttgtgaggaatggaggcctcccactgatagccatataagtaagcctggaagtggatcctctatcccagattaaatattcagctgactgcagtgcagccaacacttgactgtaacctcatgagagaacctgagccagaagcaagccaactaaactgctcttacatccatgccccacagagcctatgagatgataaatgtttgttgttagaagccattacrttgtgggataatttgttacacagtaatagatcactaatgcacaataatggtgggggtcagatacacaggaacaaactgaatccataagaagatgatggtccttggcatgcccttggaatggggtccaatgatgttgcagaactaggtaaggcctttctaggggcagaaaagggaatgttttggggttagatttggtacttagcatcaacaaggaagatctgttccagtagcattttaaaaaggcctctcaactaagacttattgatggtgatggtgcatatgtctgtcggtctgcggaaatgcaggtgagcaagggaatgcagaacagatgcagagtatacacataggcgtctgatgcaggttcaagtcgagtagcttccgataygactgttttctttagttttcacaaccattgaaaagagcaggccaggtatggtggctcacacctgtaatctcagcactttggaaggctgaagtgggtggatcacttgagcacaggaatttgagacaagcctgggcaacatggcgaaactgtctctaccaaaaatacaagaatcagctagtctcataacccggtctcaaaataaataaaaaataaaattaaaaataaaagagcaatgtcgttggcatcccattcatgtttgggaatggaatctgactttgccacttggaagattgtaatctccatgaaggtagggacatgtctgtattatttactcccaaatgcctggtgtcacagaacgtggaaggttctcagtaggtatttgttgaaataataaatgaatatcattgtataattttgagcagatgatacaatctttttaagcctcaatatcctgctctgtacagtggggataaataacccctaacttgcaatgttattgtaaggcttggagatagtgtattcaaagcagtagtccccagcctttttggcatcagggaccagttttgtggaagacaatttttccatggaccgggggttggggggatggttttgggatgagtcaagtgcattacatttattatgcgctatatttctattattactatattgcaatatataatgaaataattatacagttcaccaaactgtagaatcagtgggagccctgagcttgctttcctgcaactaagcagtcccatctgagggtaatgggagacagtgacagatcatcaggcattagagcctcataaggagcgggcaacctagatccctcacgtgcacagcccataatagaatttttgctcctatgagaatctaatgctaccactgatctgacaggcggcagagctcaggcagtaatgctctcttgccctccactcacctcctgttgtgcagctcggttcctgacagggcacggactggctgtggtctgtgtcctgggggttggggacccctgatttaaagcacttacacagtaggcaggcatgtatttctcagaatcctcagaatccattcttgttatgatggtcagagaacgaatgtgaagttttgatcatgtactttctgttttggcagaattagccttggtaattcagttccttaagttgtgagtgatgaattcaagaagtgaactgttggattttgttccacatctggattgtattaagtggattattgccaagttcccactctacatgctccttgtagtcaagctagtgtcacgcccctcgcatttttaagaaggtaacattacagttgtgagtcatagttacccagcaggaagccacattcctgggactcaactgatggggtggctgagcccagagctcttggtctgatgggccatcactccttgtcttataatcctcagtccaagagcatgacagaattatttctttctgtcactaagattgttgcagtaaagtaacctagtataaatctggatattctgtaaaaacaattcacttctacctttgtgctgtaaataattatgagcattacttttggcatttaaaaatgcattgtaaaggcctggcgtggttcacacatgtaatcccagcactttgggaagccaaggctggtaggtcactttgagcccaagagttccagaccagcccaggcaacatggtgaaaaccccacctctacagaagatacaaaaattagtcaggtgtggttgtacgcgcctgtaatcccagctactagggaggctggggtgggaggctcccttgagcctgggaggcggaggttgcggtgagccgagatcgcgccattgcactccagcctgggcgacagagccagatcctgtttcaaaataaataaataaataaaaataaaaaaaataaaaaagcatttaggaagatattgagtagtaggaagtttttgtctgaagggttatgtgaaatttaaggaactggacatcccctgttttggttcagaatttttcttggaaccactagcaggtggagttttctgataaatcttactgtctctatcagtgtcacccctgtttgaataggaaccctcacaagaggatccatgtttatgtcagattttattctgtcccattttgtgtagctgggctgtgattcaaggtgaaattcttaggaaaggaaatcttgtgtagtaggtaggggctaatcttcaccacacaagctcctgcctttctgccattcagaagtagagacctagaagagataagaaatggggagctaagaaatacattgctggccttctgcagtactcgcctatcagtattttcactgtctcttcctggaagtatcgttttaaatctattgcacaaagtcagacaaataggtttatttgagtcaatgatttttttatagcgatatggcaatgttttatggaggctcagagttatcttgcaagtctgggccaagttgtaacttgaaagaaaacccaaagctaagatggtgaattgtaaataaatacacacacacacacacacacacacacacacacacaggcacaaatatattgaagactttgtttttctaggctgggttctggtaaaagggttcatgcttgtaattcctgcactttgggaggctgaggcgggaagatcattagattgctggagtttaagaccaggctaggcaacctagtgagaccttatctgtattaaaaaaagaaaagaaaattaactgggtgtggtggcatgcacctgtagtcccaactacaggggatgctgaggtgggaggatcgcttgagcccaggagtttgaggttgcagtgaactatggtcatgctactgtactccagtctgggcaacagaatgataccccatctcttaaaggaaaagattttgtttttctaaaaatgaattatggatatgaaactcttttagttggaattttatgtatgaatttgagaggtccagaaaatgaaataaaawtagacttatattggaaaggattagaattctagctcttaacgcctttttactttttttttttttttggccaagtaaaatggctaattatactgggaactagaaacaggtggctgtgtatcttagtaaataaagaacgatgttaacctctccagaatgctggtgactattgagtttggccagaaaatcctataaaggagaaagagttgcagagtgtaataaactcccagatgctcgataaaaacctctgttcctcttatgccggctggtgaagatcaagggcgccgcagcagagctgctgaaggctccttactggtgtgaaggtgatgagatttctcttctgttatctgtctgaattacttctgggcttgacagagatgggaactctcatttgayagcarttcacagactttggatatcttatttcccttaagttaaacttaccagtcttcatttgccaaataatttccccttctgggaagggtgtgtggcaaatctgacaagcttgtgttcagttctctgctgttactatgaggctaggggacttggagcaggcagcctagcctctctgtgccatcttttcttgcatctagcaatggaagaaaggaaaaccagcctttgtagggttgtgatgaargtgaaatgagatgataaacaccaggtacctggcaggtggttttactgtcgctggttttctcaaaacctaaggcagagttgctgaaactcagcactattgacattttgggctggataattatttgttattatccaaaggttattacccagcatctgggaggaccatcctgttcatcgtagggtgtttagtaacatctatcctagatgccagtagcacactcatcctctttgtaataccagagatgtctcaagagtaatttgtttctgaccactgacagaagyctacttaagaaaagctgacagctgatgtcaggtgttttctttgttcaaaaatggtgtagaacagtacttggagtgaatgggtgacttcaatttagtaattgtttttacatttagtaaagaaattatgtaatggtagtgtctcctctcccttacccccccaattcatttgaattaataatttaaaaagtacttttaaaacttagacccagccatctgttccttcctgttgccttacagcagcagtaattgctttaggatgggcttggaaacaagagcggaaatggtctccagtgaccccaaatcataacagaactcgaatcctaagaaaaaccacaagtggcttatgaataagctgaaaacttaaatgcctcctcaacaatttaaatttggattgcatagcttatggatttggtgggacattctaacctcgatgtatctttaacattttctgcttttaagatgcaaaggcgttaacatagggatggagagaaaacttccttctaagttttcctagaaagtctggcacctttgacatagctataacagaaagaaaaatatatatatgtatttgrtactggttctagataatgccattaattagatttaaaatgatgcttatagcaagcatatgtacaacgtaatatgttccagctacgactctaagcacttttcccattttaattcacttgcttctcagaacagttctatgagggaggctctattaggcctgactcatgctcggcattttgtacacgaggaaactaaagcaaggcaaagtcgactgcccagaattaccggctaataaatgtcagtcttgcctggtgctgcacacctgcagtcccaggtacttaggaggctgaggtgggaggatctcttgagcccaggagtttgaatctaactgggaaacatagtgagactttgtctctttaaacaaaatttttttaattaaaaaaaaaaaaaaagtcagtctggctactagtcttttaagtccattctgctgattctaagacttgatccacaagaccagggattggcaaaccatggcccatgggcaaacatctggcctactgcctatttttttgtaaataaagttttattggtcaaggtgtaggggtgggaaaaaagttttattggaatagagcccctgctatttgttgacttattgtctatggctgttttcttgctacaacagtagaaatgagtgkttgcaacagagaccatatggcttgccaagcctaaaatatttactgtctggctgttagcagagtgagtctgcctacccatacagaagaccattctcatccatatgtatagtccagaaaggtaggaacaaatttttaaaaatcttaattccatatacttycaaataagattgagttaaaactcatacattgaaggtccaagtatttggtgccattctccagtgttatgatgaatgtgaaatcatttacaggacacccctctatcaggcatttgggggaagagaaaggaacagataaacatgtgaaaaatgggagagtgtgtgaactctctatagtactctagaaagcccggctttaactctgcaaaatttgaaaatagcaatcttaaactttctgtttttctcgctgcttttctgcaacagcttcagaatagaaactgacaggcccattttagtagaaagcaaatggcagtgtgtgggtggcgccttataacacagcaactcaaggttaggtsgggggagaccaagaattgagtttcttttgttaaatcagaaattatgcaaattttacaaaaagtattagaggaaatgtgtaaggctttaattggttttatgggtttgtcgcttttttttaaaaaaggttactttgtgaacattaccctctgctgaacatgtagacacttcctgaagtttaatgagatctcagagtagaatcacaacaaatgtgactctcagatattttcaagagatggtattatcttgggctgaaagtatgttacactaaggctgtcatttcttaggaggatttactctaccacacaagctcctctatctgaaattatgatgagccccaacatagagctttttgcttatactaaattcagagaatacttagtatttgctaaatcagtggtggcctactttttaaagctcatttattacactgaactttagataatatagaaatgctttctaattacagttttgtcccctggtaaaactaacactgtgcattgcgtttgtattattgacattaccttctagggccttgagtgaaggatgctgagctgcgctgctctctaggattggttattttaaactttgatttttgcttgagagtggactaaggtagtgtagttaaataaaaagtatgagcagaagtgtttgtttcaggcaagattttttcagggcctcatttccagtggggttgatggatgatttttgtggcttaragcttgagacattatgagttgttcaccgagacccagaatcaggtcagaggactgactccaaatactgtaatgtgcttggatgctggtaccggtatcaagaggctcagaggaacattggatgtgtccctagtaatgacagcacagtcacagctggtctgtggcttaacagtgtctgcaggggcatccattccyatccctcttactccttcttacttctcttcctagactttactgtctctgttaattacagttccatttcagatagagagttaattgatttaagtttatgactggacccccgtgcctgcagtgtattgttgaatgaatggatgttttgattttttcttctcctttgaagcaaggaatttactgcttggaactatgctgcacaggtttttcttaacgttctgtaggatacacattactttttctactatgtgtcttttattgctgcaaaagtcagttgtacttgagacagtttggcactgagaggggaatgtggcatatcttggcactgtggayagctggttgggtgttgatgtggtgacagggaggagggaagggctcacagaccagacacgtgctgcctttgaatgcaggtggtgatcagtgtgcttagtcatgtagggctgctcttcgtggaagaggtagcttggtagggtggttgagtttcagtactggagtcggcagaactagacttctgtccccaccctggctcactagctgtttgacattggacaccttgattcaatccctttgaacattagtctccttgtctctttgatggggataaatatctgcttcacacatagccctgtgggaagatgtgaaaagcccaactctgggtgtgttaggggcagataaatgctgagtgttagctttcctttagccgaatctgaactgattgaattgcattgggactcagtttgtagtcagtgacttatgttcaaaaacttgggaagacccaggagggggttgacttatcccgaaaaatcaggttctttttgaaaatgtgttaattctttcaggccagcaaggtgtcatctaagaatgtctgccagtaactagttcccagggagtcttaaagatgtcactgtagctttcagacatacctgagttactcttaagagcaccttgccttgtaggaatccattttgtgatatttgtttaaattatgtcacagcgcattgcagacttgtaatctgttttcaaaatggtattgtctgcgcccttattgatcagcgcgacatcttttacttgcttatctctgctttccatatggtcatactccaaagctagacctagagcagacccactaactcattaacctctctgacacgaaatagaaaccttctagaaggggaccagctatgggaggcagagttcttaaaatctctcgcagtcccccggcattttcctgagcctccggttgtaggtattagactgggcgcgagttttcacaacacggggaatttgtcatggttgagtctgctgtcgtttgaaatactgcttagttctttaagatataattaagtagaatcgcagaaaagagaccttcgttggcattttttgtttgtgttgtgactatcaaaatccctgctctccggaggcttgccctgacttggggtggggagtgtgacgtagagacactgcgaagccggagcgatcaggttaggtgaggccatgcttaagttggattcgttgaaaatatgattcaatttgagaacatggtagtgcccatttccaagctgtcacagagtccaggagatggggaataaaaaatcttcggcatctctcggggaagattattttgtttgaggtcttaggacttctcctgatactgtatgaactttctttttttttttttttttttaattgatcattcttgggtgtttctcgcagagggggatttggcagggtcacaggacaatagtggagggaaggtcagcagataaacaagtgaacaaaggtctctggttttcctaggcagaggaccctgcggccttctgcagtgtttgtgtccctgggtacttgagactagggagtggtgatgactcrtaaggagcatgctgccttcaagcatctgtttaacaaagcacatcttgcaccgcccttaatccattcaaccctgagtggatatagcacatgtttcagagagcacagggttgggggtaaggtcacagatcaacaggatcccaaggcagaagaatttttcttagtacagaacaaaatgaaaagtctcccatgtctacctctttctacacagacacggcaaccatccgatttctcaatcttttccccacctttcccccctttctattccacaaaaccgccattgtcatcatggcccgttctcaatgagctgttgggtacacctcgcagacggggtggtggccgggcagaggggctcctcacttcccagtaggggcggccgggcagaggcgcccctcacctcctggacggggcggctggccgggcggggggctgacccccccacctccctcccggatggggcggctggccgggcagaggggctcctcacttcccagtaggggcggccgggcagaggcgcccctcacctcccgcccggacgaggtggctgctgggcggagatgctcctcacttcccagacggggtggctgctgggcggaggggctcctcacttctcagacggggcggctgccgggcggaggggctcctcacttctcggacggggcggttgccaggcagagggtctcctcacttctcagacggggcggctgggcagagacgctcctcacatcccggacggggcagcagggcagaggtgctccccacatctcagacgatgggcggccgggcagagatgctcctcacttcccagatgtgatggcggccgggaagaggcgctcctcacttcctagatgggatggcggccgggcagagacgctcctcactttccagactgggcagccaggcagaggggctcctcacatcccagacgatgggcggccaggcggagacgctcctcacttcccagacggggtggcggccgggcagaggctgcaatctcggcactttgggaggccaaggcaggctgctgggaggtggaggttgtagcgagccgagatcacgccactgcactccagcctgggcaccattgagcactgagtgaatgagactccgtctgcaatcccggcacctcgggaggccgaggctggcggatcactcgcggttaggagctggagaccagcccggccaacacagcgaaaccccgtctccaccaaaaaaataagaaaaccagtcaggcatggcggcgccgcctgcaattgcaggcactcggcaggctgaggcaggagaatcaggcagggaggttgcagtgagccgagatggcagcagtaccgtccagcttcggctcggcatcagagggagaccgtggaaagagagggagagggagactgtggggagagggagagggagagggagagggagaagagggagagggagagagggagagagagggagagagggggagagagagggagagagagagggagagggagagggctcttaagggtccatcatgttttggagtctaaaagttgggaccmggtgtgggggcacaacacctgcaatcctagcaccttgggaggccaaggcaggaggattcttgattggcccaggagtttgagaccagcctgtgtgacatggtgagactgtctctgcaaaatataaaaaattagctgggtgtggtggtgcgtgcccgtagtcctagctactcggagagactgaggtggagtgtatcactcgagcctgggaagtcgaggctgtagtaagtggcgatcgtggcacctgcactccarcctaggcaacagagcgatactctgtctcaaaataaaatggaagaaaaaagataaaacaaataaataacaagctataagttgtccctgcatgtaaaacaaaaattgttsctgcatgtgaatcacagtctttgcgctttctggaaagtaatagaaatttctgtggatgagccacttggcaaaggttatttctaaaactctgtgttagagatttttggtaaataacaaagagcctgaatggtcccatgggataaaacaccagctcaagactttacaaagtggggctctcattgaggtagttctcagtctgcaaaatgaagatgatacaccttagatggtatatatttcaatgctattattattgagagccagtttggcattaggcatcacactgagtacaaatttatttctacatgttcttcttttaaaatatggaattcttttattattgtttgtactagtttattattactgtttgtataaatctatgcaagtacaagtgcaattgtgttacatgcatagattatggagtgatcaacttgggacttttagggtatccaccacccgagtaatgtaccttatacccagtaagtaatttcttatcatctaaccccctttctgactattgaactctgagcaacacttgactggattgggaggattggagtaagaagaatgtacattccttatgttaagatgtggtaggaaatagaaacttggctttgtccataaaaacgtgtgagttcatgtccttttcaggaacatggatgaagctggaaaccctcattctcagcaaactcaggaacagaaaaccaaacactgcttgttgtcataagtgggagttgaacaaagagaaaacatggacacagggaggggaacatcacacactggcgtctttgtggggtgggtggggtaggggagggatagcattaggagaaatacctaacgtagatgacgggttgatgggtgcagcaaaccaccatggcacgtgtatacctatgtaacaaacctgcacgttctgcacatgtatcccagaacaagtataataataataaaaaaaaaaaagaaacatggctttgcatgagaaaagcctattgaatgtctcagagatggacatgttaatgttgccttgagtagaaagatctggatactgatctccagctccccgctctttcagttttggattctactgttacctaatgtgtttaaagccatattggttagcagggagtagtgatcccagctactcaggaggctgaggtgggaggattgcttgaacccaggaggtggaggctgcagtcagctgagatcgccccactgccctccagcctgggcgatagagtgagactccatctcaaaaaaaaaaaaaaaaaaaaaaagccatattagtactctataaatactccattaaaaaaaggtgggaggtaggagacgattccccagttgtccaaaaaattcgatygatgtgctgctgacttctgtttggtttagcagatgtttgttgagcagctgtttgttgaattggttgaaaatgaattaaaaataattttatcttgacctttctctttgtaactttaacatcacctcatgaggtagctggaaaagtcctggaatgtctttcaaactctgggtgggaattactgtttacaagttgtcagccagtgtcactaggtgataattcccctctgtgtgagtgtcatggttacagtatgcttttttgcctctaaaagaacaattatattcaagaaatttcctagtgcatttaaaaacagctgggtgaaagtcattttaaatccccaaatccaacacattcgttcttttgtgcatttaattaagcagaagttaaaataaattagaacaggagacattcagtgctgattgttgaatcaacaaagcaagaaacagcctagcattaccctaccacagatgtctgtcactcagtgctgttgccctataaatttccatcaactcttaccattttttgaataacaatttcttttctagtaaaaattggcatatgatgtatagcaagcaatattctttatgcaaatgatatttccatatatctctaattttttccccttaatgatacatttatgttggtggcttggataacttttccggaggatggaggatgtgagatgggttaggctagaatggtaaggtttaggaaaatatagaaaaataagatttagcagtaaatttgggtattattagtggaagtcatggttgaggttgtttcatttatgatactaaattattttaaggacatgttaagtttaatttgtctttataatgcaagtaatatatggttcatgatagaaaaagttgattaaaaacatatcagccagaaactgagtcccgtatttttctcacccacaggtatcactgttagcatttctaggtaaacagtcttttttccccctattatgtatgtacttttggctatcttttaataacaggattatgcttcctaggcagttgtatgtcttttttctgccatttartagaatatcataattgatatggtatttgatgttggcttctaaataaccaaggggagaggtgaggcctatggctaatgtttcagctgaaacaaggttagccctaagttgaggatagtttttgcagatgagtaatgagggtttattatactgttgcttttgcatacattttgaattatctttcctaaatttttttaaagtgttcagtaagccataaacatctccccagatctacacattcacaccaatgccattcttaagaggcatgtgtcattccgtggtagcatrgatcatattaataattgaaccagtatcctattgttagatacgtctgttctcagttttttcgaccattcttggaaatagaggaaaatttgtccagtcatttatttaagaaggcatttgtaagttaaatttttatttatttttcactacccaagaaggaatctggagttacagtaacagaagatactggctagtatttcgccttagttaacaaaacaatcatgaaaaatctttgtttagaaagttactaaagtctaggcgggcacagtggctcacgcctgtaatcccagcactttgggaggctgaggtgggcagatcacgaggtcaggagatcgagaccatcctggctaacacggtgaaaccccgtctctactaaaaatacaaaataytagctgggtgtggtggcgggcacgtgaagtcccagctactcgggaggctgaggcaggagaatggcgtgaacctgggaggcagagcttgcagtgagctgagattgcaccactgcactccagcctgggcgacagagccagactccatctcaaaaaaaaaaaaaaaaaaaaaaaargaaaattactaaagtctgtgaaattagtacattttctgaatacttcactgtaattccagtgaatattttactttcacacacacacaaacacacacacaatttagtgtatcaagtaatttttattgcccgatgtcttggcgccttgatatattttaacgtgttgcggttgcatgtgactcttccaaagacatctatcgggaaatggatagttaatgcatggtgtgtatctctctgttgtttatttaccataagttactaattcccatttctcagctgagagctattataggccttcctctcatcagggatagttggagccagataggatagagattgggtaactgttggaatgtggaccaccaatttcttttattggcttccatagctagttagatggagactcctgacctgagtgaggagtattatctgtcctgtgagcctccagttagcctgggtaaaaacaatacattaagaatcactacctcttcttagccargcatggtggctcaggcctgtaatcccagcactttgggaggctgaggcgggtggatcacaaggttaggagtttgagaccaacctggccaatatggtgaaaccccatctctactaaaaatataaaaattagctgggcatggtggcgggcgcctgtagtcccagcyactcgagaggctgaggcaggagaatcrcttgaacccaggaggcagaggttgcagtgagcccagatcgcaccactgcactccagcgtgggtgacagagcgagactccgtctcaaaaaaaaaaaaaaaaaaaagaatcactacctcttcttatgtatgtttagtgtgggacaggtgctgtgttatacctgrcacctaccttaaacaactgaatctttatgaaggccatcagaggcagtctctcttattcttcccactttacatgtgaggaaacgaggcctagacagtgagagaaactaacttgttcagttaaagttgcacagctagatatagattttttggacatgttaattaaccctttcagtggcttggatcacgatcccaataaatcagtgatgaatttttggtagatgtatatttacttattaattataatgtgtgcatataaaagccatagatctaggcctgtgattaaaacctgcccattgcttatgtgtctaaaagttccttttctctctgtgctgcaatagctaaattttgccgattttctattttctgttcttactttgatttggaacaaaccaagcttcaaatgcacagggtcccagagtggtagagtggcttgcttatttgatatattttttaagctagtgatttctggaaatcggcagcccctcttgatgtggcacacctagaccataagtcagttataaagagtccttaggagtgttgggccgtggatgggaggggaagggaagtgactggtasagtttcaaaaggtagcttgtgtacascccttcctcatgaattaaaatttatgaaagctgtttgggaaattcgatacccagaggtgcagacaccacatttggtaacacaacatgctgtgtgcagaactggggcagagtcctgatgttgggcagatgaggatgttttatcatcattagacaaacagtgccgtgaatgaggggctgtggctgggatcatccagctcagctcgtgctgtttccagtctcataagcaaaccaaaggcatgcgtgtggctgccctcccgcaatccaaaggaagatggaagatgaatggaaaatgactgtcgttctaaaagacacttgaaaactaacagctgggaaaactgttctgaatacttgaaggggtagcccgacgggtttaaaaaaatgaaggaagcgatagatattcatgtgttgtccagggaagaaatagtcaacatgtgttttacaatgtctggcgtagttgtctagtctttacaagtagaggtgtctgaatacacagcaggggagtcargaattcggaggagtcgggtggggctggaattgacgggaacaacctgatggtatctccccacattcccttcttatttggaaagaagtgcagtccattgtagctgtaccctctgtctttgcatctttgatttctccagctcggagcatccccagacaagatggcctcatccctggtaaaaagttccctggccgagagatcaacgtgaatttcccatcctggcttccaggcgtctccgcttggcatctcacatttctagaaaaacagcacccaacctacttcccagacgtgtcataatcatgtcccattttgatacttattatacaaataaccccaaacacgtgtactctttctattggttgtttgtctaaaactttatttttgttctccaaaagtaaatgcccattgtaatacccaatagtctctttgaatttgcatcccccatacctaagttttgggaggcctcccaatgctcacccctcattagtatctctgtattatgtgcaatttttttttccttgaaagcatttctgcaataatggctttttttccccccgttaagtgacgacagtcatcctaagttaagtttatttgactaggagagggaagaatattcacaaagggcactggtctcacgtgattgagagactggtagaaacatggcaagattgggccacagtcaaatcagagtctggaaagcttgctgcctcagggatggctgtacatacaaactcccaaatgatacattaattgattttgattatatgactccaaagcttgagcatttcaaactgttttcaaactaatggccatcrcatttggcaaggagcccaactgcgcattggkttcattataaaaggagatcttgacagcctgtcaggaggacagaatgcatgctagggttttgagaagttgctcagtttcagaggacttggtggtgtttttcattaaaaggtaccagaaatttagcagcccgaccaagagccaggcttataagtcacrgaatgaccctggtcagtacatgcagaaccttaacagtatgatcttaagatatctcattagattccagtgaataaggccaggtaccgtggctcacgtctgtaatcccagcactttgggaggtcaaagctggtggatcacttgagtccaggagtttgagaacagccaccacagtggaaccctgtctctactaagaatacaaaaaattagctgggtgtggtggtgcacgcctgtaatcccagctactcaggaagctgaggcacgagaattacttgaacccgggaggtagaagttgcagtgagctgagatcatgccgttgcactgcagcctgggcgacgagcgaaactctgtctcaaaaaaccaaaaaaacaraaaagcaaaaaaaccccacaatccagtgagtaagacctcagccggcctgaggttcacagggtttaaatggaatgcagtgggaagtaaagagtgatcccaaggagaagtaaaaatcttgacaccttactctcttcrgcttgtcccacttttcttcaactgccccgctactggaacattttctctttctcaatttcgattgtccccttaagcaatttactaattagacattaaaacttcctattctctcaatcccaaagcaaaactgatgagcagagcaaaccagagcagttgggccagaacagaacaaagacgtacctgatgcagggaattgaagccagacccaaaacgggcaacccaataggatggccatctgccccattaatgccagcttgtccaagtgtaattattaacagtgccccctttcactctccaaagagtccctgtccagacagttaattgtgaagtcgccttcagatggctggcggtaaggaaagtagagtgagggaagcagggtaggtggaggtgtgaaagggagagggcctcatctcagggtggctggacctgcaccagcatcggcctgcatgaatgtgctcctactcttgcccaggctgagtatcaagagaagcaagaaatctagataaaaatccaaatccagaaacatcagcgttttgaggttaacatgttggcaattattcagctttatgaaaaaaaaaaaaaaaaacacaaaaaaacagcatgggagcctggcaaaatatgtgggtgacccttggctacttttgaatgaagtttttcattctgtccttcaaaaaaaaaaatcatacaaaaaaaataggagatcaagggggaaaaaaaaaagagggcatggaaaaaccagcctctggtataggctttcagggtatattggtgagcaaacttttcctagagctgtttctggttatcaggtgtggtacaggttgcagggaggtggggatggggatgactagggtcacagcaggcaataactagggttattggcacccggttggtgtttggtgcctgctgtgtaacttgctgggtgttgggaacctgtatatggcatatgccatgtgcacagtgggatgtgtttaaaatgtgggagacaggagctgtatggaaatcattattttcaaatgcggtcatggcttttaggttgtgaatttttgttcctttccaaaaccggtttagatgagcagctttgctttttagtgagattgagttaatcttatatctttatgttctaaaaaaaaaaaaaaaaaaaaaaagaagaagaaagtaacaatgtccaaacttccctggagccatttctgtctctgtgaaataggcaatttaaggtccatcccatcctaaaagcttttagcttgtgaaaagcttcttttcttgcttttaaaaccttcactctgcgtttagaataaatggcattcctggatctgttaaataggcagttaataatgccacagaaactacccaccacacacccaaccacaaaacttgctcagaggcaggatgtgtattggaatattctgtaatgatccaatgctgaaacattacaatcagccttgaccctgcaatctgcatttttaattgcagccttcatttacagtggggtattgatctgctttcagtttgtcctgaaggttgactggatctcgtaatctattcatgtcagactgcctgctaggaccagcatgaattcagctcttcagaggaagcattgtcatacagagaggactcggccgtttgtttcaccttgatatatttcccaatatatgcttcattctctggggtagtttttattcctcttctatgaaatgtggattataaggactcatgccccatggaatttctatagggtttagatgagataatacatgtaaagtatttgatatgggcatgtaggaagcaccaaataaacagtagccattatgatttttcttgctctggatttaacttttttaagctcctgaattttggattagtaatgttgttgaccatggaggaaaattgaaaaaagatgttggcttcattttcttgatgactgaaaagtaaactagtggccgggcgcagtggctcactcctgtaatcccagcactttgggagactgaagctggtggatcacttaaggtcaagagatcgagaccagcctggccaacatagtgaaaacttttcgctactaaaaatacaaaaattagccaggcgtggggtgcacacctgtaatcccaactatatgggaggctgaggcaggagaatcacttgaacctggaaggcagaggttgcagtgagccgagattgtgtgactgcacttgggcctgggccacagagcaagactcctgtctcaaaaaaaaaaaaaaaaaaaaaagtgaactggtaatgagaaatgaattttggaaataatggtgaactgcaaacatggactataagttagaccatattatatcaatgttaaattctctgaatttgataattctactatgattatatacgagaatgtctttgtcttaagaaattcactcgagtatttggggtccaaggggcatgatatcttcaagctattctcaaatggttgaggaatatatatgtgcatagagacttatatagcagatgctgttaaatgttgacagtaatgggtatgggtgatggggacataggcatttgttgtaaagttaaacataaaaaagtttttaataaagtgggccagtgaggaaaaaggtagctggtaacttcattctgtgttttttcactaggtcagaactactggttcatttatcatttctgtccaaaggtggattttttccaattagtttctctatcctgttcttctttcccacccctcaattcttgattcctggggatggttatttgaaaagaacttccttgcccagctttcagtgaccctgctgttttgtttccaactcccagtcataatcctttgttcatgacattataatcatcaccacaagtggctaattgtgatgtcacaaatggaggattatgactcaaatgaggaataaacagcagtggcggattaattcctaagcaacgaagaagattctgttttgtgcaaatgccccagggtaataaaatttaaaaccagaaaaaggcaaggggaagacaaagctgaacatatgtgatctattagctaaattgtccttaagtggaaagcttttctttctctctttcttccttccttaattttccacgtggtatgaatagctcctctatggtagataaatcgatttggttttaggcctaacaaagctcaaggtgtcttgctgactaattacagggatgtcacacctgggctgaaaagtgagtcattatggaatctttgaggtgtttttattttccataaagttgaattgctcttttcagtcagcattgcaaaagtcaggctataaagatcagcacaatggccgaagacagctgggctgataattgacggcagtcccaacctggaaactctgggtaaggccagcagagccgaatggcgtcagtcactcaggacagttttctgaatgggtgatatgtaaatgaggcagtggtaacagctgttgctgtggattggcctagaaatagtagtcaattctctgtggagggtcaattttcgattctaagtcaaggatgtgtttttttcccttttaggaaatatgtggttcccatactattcagttaaccaagcagccaaatccctctctacacttaacagctccctcatccttggggttacttggccgtctcaggaacactcttgagtttgtggccttttctaaaaccatggttgcagtagccaaactaaactggaaatccctttgaattgttttccttttcatgggacatagtgttcctttcttccgtttgatatatttcgttctctgtcgtgcttgagctctctctcgacttatgacttcaccgtcacttgaatattggaagccttcttgaaaaacattggtgaaagacttgaggctacagtttggcatcagcagcagagcaaataaaaccacactttaaaaacttggtaaatttagttatgaaggagacctcccattcgagtctaggcgtttaataatagcctgtatgcacaaagtagaaattatgtgattatcgtcttggggctgtgattagaatgtgttgctatatattggtaacatttagaaatgtgtaacttcatcccagctccatggtaccgtagrgcaagcatgacataaacatggtcttgcagttgtacactggtttgagattccctggagactaaacagctatgagggagtcatgcttccgtttgccactgttgtctcctttgtctcgtataggctatcagagatgtttcctggacttttaagagtagctccaacagaagttttgccttctgagtagtaaggtggtcacaacttgtcctgtttcccctatgggagtgtatatgctggtggtgrtggtgggggatctcacctttgtttccacatcagtatgctgctgccagctcccctccaggctgtgctgtcgggacacatctgtgtgcctgtatgtggctcattagggagcgggttgcctgttcttttgaggtgagcatacattttgatttttcttttggcatcttttggtttggaacatttacagccctttttaaaaatatagtcatttctgtgtgggttttctcygagccagtatttgccacactccagtgatattgagagaaacaaagggaacacgtccaagcccagaggggctctgtcttaacatctgacaggagcttctaagcccagtgtggttgttactgtgggaagtcgggaagtccattacccaaggctgtgggaaacacaggtcataaaagcgggggcctctgatcctggggcatttacagcttagtttgggagccaaaactggaccatgtgaaacagcttagaacaattgcagaaccaagaattagcaaatgtggattaatgtagattaaaacttgcctgtgagattccaaggtacttggaaatctgagttttacagttgactgggaaaggcttcctggagtagttgagtttgggaaccaggttttaaatgaaccaatatggggtggtgaagatgatcgtgatatctgtcaccagagacacctctgtgtgaatcccttccctgccattgactgaccttgggacaaattatttaacccaagtctagtctcctggagatgagcctttgtttctctctccccatctccctccctctctctgttactcctcctcccgctctccttctttcttttcccgctcctccgcctctctcattctctttcttaagtacaagactgcctacctccctcatctggtggttatgaggattaaacgagatagtacatttaaaaaattgggcaatgtgcttgcacttactatgttgagaatttggaattatcagtggaggcaggaagagttcaagacaaggaaactggcctgtgcaaacaggcgcactgatggagaaggaagacatcaaatgccttatcgtggagggcaagttagtttggttagaaaggaagtctgaccagggaggagaagagggttggttaaaattaagagtgtccttgatggtcccaatagggatctgactacctcagggatgcagatactgagttagcagtgcaaggaattcattgggggttagtgcctgtagcagaagtaaagggaagaagcaggattggacagggagaatctcagaatgtgctgcagatctgccatagtggacagaaacaggcagaccccagtagtacccctgactccttgcagcccttggctggggaagagctttgccttgacacaaaagctgcttggaacctgaaggttctttgcagctgagtagcaagttstttgctgaagggagctccaagttgtacccctgctagggctagctagagatacctccactatctgtgttggggtccctattctgtcttacttctgtcacatgtagtttatttcctacacagcattttatcatcaactataataaaaaggtaatgaaaatgtatcctgttagtctctgcccctagagtgtggcctttgtcagtgtaattgactgctggcacattgaggagcacaggagagggcatttcctggcaacctggcatataatggtgtcagatttcttattgccgtgttctcttttgagcttggaaagattagttaccgcttgttggggtatgagtgggagcgccgtgcttctgaacatttgcaaagcatctgccaggaccctgcaccgtgaggagcacttggtgctcgttacctcattcccgtggtcttgcgtggggagggacttgtttacatttgttttagtaccgagatgcatgcatgtccacttgatgggtaaggaaactgagtgttagagaacttaaatattaaggttctctaggaccacttacctcaggagtggcagagatgggacctcagctctttctgcccactaagcctgtcaacttaatggctctgctgtcatgtgacagatagagctggagctagggaatgaatgcaaagagaatttggcccatactagccctctgatacttaccattgttctctgtgccagggttcatgttagaactggcctgtgccgtgagtagttggtgagactgggggaaatgagtggtcttagacgtcactattggggactttaaatgagcacagcttctgtgaaggcgactgggccatgtccatcacagttagatttgcctatacccttggatcaggaaactctgcccccaggtgtgtgccccacagatgtacttggccacagtgcaaaatgactcatgtcaaggttattccttgcatcagtgtttggattttgaaaggattggaaataacctgacagcccattaataggggctgttttaataaattatactatgctaaataatggcatatgtgcagatgttacaatcagagaagcattgccctatgaacagatacatatgtttgtctgtatatcgaaatctctatttccctagatagccttgttaatcaggtgggggaaaagcagggcgtacaacggtatttagttaaagctactttttttatgggacacatacaggattatctttagcatcatggtattaatggttggtgttgtcttgagaggtatggggaagaggtgagataaggagtccatgtttttatactttgactttgatttatagaatatatacatacattatcagttcagaaaattaaatttaataaagacatccccaaaaccagccaaccaaaaatgcatcaaccgttgaccactgggactagcaaagagatcaggtagagcttaccagttagacaatacctaccctgaaatgaaaccaagtatctgttcacttccagctgacaggaaaagacgtaggaaatcttcaccagatttgaaggaaatgtttggaatggtttgacttaaacatcttattatctggcttatttggaattttctttagggggccttcagtgacacctcaagttggtccttagccatccaccctggtgggtgcccatagattcagataagcagtggagagcatgtgtgctgcactagcsctgttcagggtaatagccagcatgtattcatacaacactggttaatgattcttcccggcagtcctactagggactccacctttgtcaaggccgtaaatggactttggggctgtacattaagagacctggcctgacttgatctggctaaacatggctttgggaccctcttgaagtttccagttgatattttttattcttttcaaaccaaatcactgcagtgaaaagaaaacaaaaaaaggagtttttaaatttatacaaaagtatgaaaaagaatgagaagttaggaaagtgtgaattatattttaagtaaggctttgtggctttgytgatcatggaaatctttttattaacacattagacaaattctttacatgccagtttgcattcacttaaacatttgtgggggtggtgtgtaaaatgtgcagcaatacctgctcctttttgggaaatccatttgttaaatagccctcagaatatgacagttttatagtaggattatgacttttttttgtttccatgtctgctaaaaaggctaacagaataggacaatttaatcacatgccattatgttcataggggtttgggaagctcagacatgtttctagaaaaggaatcgcgtacccagcttttccaagtttcttagcaaaattcgataattacttgatttggagatgtccccattcagccccttcttctgagggcatctggccttcctgagtgtggctgacatcactttcatgaccttggctctgttgaggtggttgtcagggaaggtgtgttgccagaactgtcctgtcactcttcgacagagagagacagagagacatttcctggactaatccatgtttccagccagatttatattatttacagggtattaggcaaggaccaggatttagccaggtgttgccctggagaattgtttcggacctcaagtcaaaaaaaggctgcatgctgactagcggaggaaacagctccccacgggccagcctagactctgtatcctggcatttgtcatcccagctggagttttttgaggcatcggagctagaataaagcaggagctcatcagaggctctcttttctcagtcgcctccatctttccagagactcagaggccaccagctgtggcagcaggtctcaagctttgtcggtgattagttgcacggcggggaaggctcttcgcattttcctctgttctggggctctctggtggattggagcaggcaaatcgggctcctcactgagcaggatgcaggcaagtcagagtgaaagaaaggagccagtatccccaccacccgctagtgttttccataccaaaggacttaacgcttatgtttgcaaaattcratagtcagtacccttgtcagctgctgctttaaattctgtgtcctttgcctgtttctgggtcattgcctagtaaatggtaaacattgccatatcccagcttcctttttctgggttgccttgtgtgagccttgtcagtagaagaagcttagatagggcggcttgaccttggctgacttgccatattcttgaactgtcctgccctgcttctcaatgcatcagggaaaatatcctaacatgtctggcgtgccctttaacttgacagagagggcagaggctgaggaagtttggtggtacgactgcacttggttaagcagccagtgctggcgaaacaggccttacttagcccaggcattctgactgccatttgaggactgtttttactgtaataatccatcactctggactttatgctctaggaatgaaaattgtatttactattggcctaagaaaaacatattgcaattcatatttgaagctgcttagcaaagatccctaacaccagccagaagtgatttggctattggaattacctgttttggagagtgattcctataactgcttccctatcatcatctgtaatggttgaagctatgtgtatacattcacacgtttacacacaaaacaagataatttctttactgggtcttagcaaaaagtctagaagaattttcaataaaactggatgcatatttatgattgtctgacttaaaatgtagactgtgtggcatgtatgaatttcactttggagggaacagagtcttgagcaagcacctcaaataaatacataggccattactctctgctatggcagctgaaactaagaaacagtgagagggctatgtggctgcttatgtgggaagatttaatttctgttgtaggatgctgaggaccttggaaattgaggcactgaagctgaagtggcaagggcaagtgtgaattgcatcagatctttttctctcagggtaatttcttcatatcccaggtaaggtagcatttggatttctagtctttatatttattggtggtgagtaattctccccaaaaatggagggggagaaactagtatgcaaatgatgacaaaatagaagaaatctatctcattttgcagtgttcttatcccatcataaaaattagttgatcagataaattgaagttttaacctgattccatttatttcctactagacgcattttggaaatctcagtttgtgttctgaagattttctagctagaaagttttagtggggttagaaatagtgttcctctcaattgcttctgaatgaaagcatactccattggaaggaccatcagcaagggccatacattctaacaagtctcattgtttttcccatgctattcttcagcttcctttttctttggacactgtctcaaccatcccctgggtttggtgatgccagacttccttctggcattatccgcaaccgacaatggactttacttgttacgacaatatcaccagctttcattgcatgcggcagatggcctggaatgcagtttgtcactatcacttcttggaaatgcagaggcctcctggttcttcaaggccactaagcccaggaagggagcaagtgtgagatggcaaagaccccctaaggaacagcatcagatccctttctgggtgtttgttgcagggtggctcacttgctgcttttctccaggataaatggcaattgcttgatgcttgatagggacgtattaaatacaacggctgtctcaggaccctgtctgccttgtttttcatcacctggacgtctgatacatgcaaagtggaggaattactgcaaagagtggaagacaggttaaacaaacattcaccacaactaactgtttaagcttaagtcactaaaacactcattgtgtttttgctctgaaggtccatgaagggatagattcgtccatcctccttctccgtcatcacacatcaaggccaggattgtgccatttatggattccacatcctaagagaaaactgttcactcagatggtttctggtagtgactcctcttctctttgaaatgcccttcaaagtatttagccagaaacaaagctttttggtttttgggcttgtgtcaggcttttgctagagagtgatttttttttttcaaggaaattaatagatgatacagtcaatgctagacaattttagatctcagagctgtcttccttgaaaggtacattactgtttcttttacatctctgagatgagactgctcagagaatgattgattttggggtgaattgctatgtttttacatagacaaaataaaaccacagaatccttcaatagaggaaataaaatatggcacgccatcaatgtggaatattaggcaccctcaagtgtaagtctatgtatatatgacatggaaaaatgtttaagatgtggttgggtgactttaaaacaagttgcagtttgggcacagtgcctcatgcctttagtcccagcactttgagaggctgaagtgggaggattgcttgaacccaggagtttgagaccaccctgggcaacatagagagaccccatctctacaaaaataattagctgggtgtggtggcacatacctgtagtcccatctactctggaggctgatacaagaggatcgcttaagcccaggacataaaggctacagtgagttgtgatcacaccactgcactccagcctgggagacagagggagaccctgtctcaaacaaacaaaaaacaagttgcagaacaatgtgcaaaatggagtgtgatcctatttgtgcttcatatatatgaggatcaggaccatcctaaatatgtatgtatatctctgtgtgtgtctgtgtaattgcttagaaaaatgactaaaatggtatgaatcaaactgtgttccttcaggcaacactagggggaagtggacagagggtgaccattgcgttttgtgtacatctgtgtattgtcctgatctcatacaatgagaaatatttatacactatggataaacaaattttggaaaatatcccagcaacgttagtaatgcaacagtgctttccctggggccaccattttggttctcaccaagaacagatggtagcatcaagtatttcagtaaaattttaatatcataaaaagcatatggggctttcctaaggtctgagaggcacagtataatcatgttaaataaagaggacttacatttaaaccttggattcattaacaatttattgctgggaggataaaaaggggatgtttacatcacacacgggtcgaagacaaatacattttcggttgcagagagtatataaggcaagtagaatgaagaatgagtatttcatgatacattttttacttttattaatttttgagtacattccagtgctaagcagtgaatagtatatgatacataatgaattttcttctgctcctacgcagagttttctccttaaggattcagctgcccttcaataggtgtggtgttagttaatggtttgatgaagagttttatgttgcacgtaagttgcaaatagcattccttttgtttggatgcccagtagaattggacaaaccagagttcaaatctccatggcacaacttagtagcaatacatccttgcattcaactttgagctggggtttttcagctataaaatgtaaataataaaattacttaactccatagagttgatgtattaaatgaaatagtgtacaaaattgatgtaagttacaggttgtggcacatgttgtttggtagatattagctgctattactacattttacagtttggaaattttcatgcgcgtccgtgtgaagagaccaccaaacaggctttgtgtgagcagcaaggctgtttatttcacctgggtacaggcgggctgagtccgaaaagagagtcagcgaggcgaggtaggggtggggccgttttataggatttgggtaggtaaaggaaaaacgggggttgttctctggcaggcaagagtgggggtcacaaggtgctcagtaggggagcttttgagccaggatgagccaggagaaggaatttcacaagataatgtcatcagttaaggcaggaacaggccattttcatttcttttgtggtggaatgtcatcagttaaggcaggaaccggccatctggatgtgtacgtgcaggtcacaggggatatgatggcttagcttgggctcataggcctgacagaaatgagcagaattgaaagattcatgacaaaagttggctacttctgtacatgcacctattaagctttttttggtatgttgtacattttcttcttcagggtcttcccagccctattagtaacagttgtttttatagcaattggataagatatgaaactaagaactttattattaattggttgctattccttggaataaaaatgaaaaaaagattaacaatggaagaatattaaaagtacaatttgcccattcattatatcagatgtctcagttttatggtgaggtaggcatcatattaaggtacaactatttagcgagatgtataaatgattaatatatgagaaattatgaatttaatacccgtccaaaacttgttagaataaatgatttttatgttcccattaggttttgtgatgggaaataatatattttatgtaagagaaaattcagatgcttctacttattacccatgaggtgtccgtgaacttggcacgatattccttttttctaatatattctgaactctcatggttaaatgcataggtaatgtgtcataattgaatacatgttcttatcaatagtgtctgtcagccagtttccagtagattcagcagacattttctgcctattagggggctggacttggtgctgaggagtacccagggagggttaagttcttgcccttgaaaggtgtgctcagatactccagtaagaggcaggcataatctgctgcagaataaaggtgcacaaggtgtgtgtgttcagggctggggagggagaagatgaagacgtattgaaatctgactccaggcttgtgtgtggagaggaattaagagaagcaaggctttaggccgggtgcagcggctcacgcctataattgcagcatgtttggaggctgaggtgggcagattgcctgagctcaggagttcgagaccatcctgggcaacacagtgaaaccccgtctctactaaaaatataaaaaaattagccaggcatggcagcgggcgcttgtagtcccagctactcgggaggctgaggcaggagaatcgcttgaacccaggaggcagaggttacagtgagccgagatcacgatactgcactccagcctgggtgacacagtgagactccatctccaaaaaaaaaaaaaaaaaagagagagagagagagagggaagcaaggctttaaaaagtaggtgatgttaatgagttgagtaggggatgaaccagctgggcttgaggatctaccatgccatttcagagacagggaacagcattttgaatacagggaagaatgcatgctaagacgtgggtgcaaaaatgccaattaattctttagggaatgactaactctctaacagagacagaactggaataaggtagacaggcaagaggccagttcatgaagggccttgggtcttttaaagacattaagaaaaagatttttaaaaagtcccttacatagttaaaaccacagtgaggtaacactatctcatgttgattggcgaagatcaaaatgtttgataaaataccaaactggtatgggtatgaataaaagtactctattacctacctactcctagactgcaactgtgtcagtacgaacatgcatctggttgagaacctgtcggtttccacagaaagtaaaaatacgcatactttctgactcagtgatcccacttctgagaaattatcccatggaaaaactgcatatctctaccaaggtttatgtactaagatagttattgcagcaacgattggaatagcatgaaacttaaaacatcctagatatccataattagggaatttcaaattgtgatatatttgtgcagtggggcacgatgtagccatttataagaaaggaagctctgcatgtattgatttagaatgattttccatctatatactgagtgaaaagaggctatgtgcagaatttgtacggtgttctgtttaagattgtgggagtgaggaacatgctattcattctcattctctctctctcactctcaccctcactctctctcattcactcacacatactgtctttggaaggatatggaagaactgttaccaaaagtagcttctggggaggagacctacttttcactgcgtactcttttgaactgtttggctttttttctttttctttttttttttgagacagagttttgctcttgtcatccaggctggagtgcaatggcgcgatagtggctcactgcaacctccgcctcccgggttcaagtgattctcctgcctcagcctcctgagtagctgggattacaggcgcctgctaccacgcccagttaatttttgtatttttaggagagacaggatttcaccatgttgccaaggctggtctcgaactcccgacctcgggtgatccacccaccttggccttccaaagtgctgggattacaagtgtgagccaccgcgcctggcgtgtttggctttttattgcaaggtcctccattttttcaaaatttggaaataggagttcctgcattggcttgaggctcctgatgtcttaagagcattgaaatgggtggaccaccattggttagggttatgggtagggtcctgaaaggcttaatgtagtagtttctaggtctcaattttctctctatgagaacaagttccgttgactaaaggatttctgttccctttctacctctgatatccagtcccttgcagggtccaacttcatacacctcggcattttaggaattaattcgggattttacagtttggcttgatttgattttattttgttttttgatttttgactattcacaagatttttaaaaatgtcatacatttccgttgaagatatgatgagttctacagctagtatgacatgttccaggttgcagtggtgtagttcaagttttatgtttgtttggttttaattttattgtttttgccaagtgaacaatagttcgaatcaaggatgctaattatatgatgtacagaattaatcaattttgagattaaaacactactgtatactatatactaaatatacattaatgttaataaatacatccctagttcaaaaatgttagaatgagtgaatgagtatgttggcaagagggatggagtgagatagggatttaaggatgtgttttgacaacattctgtggcacagtcaacatgaggttgagctgattgggatgtaactacatgttcttaaaatgaagactttgagggtgttgttatgagaacaaaccaaaaatgcrgttcttccatgcacttgtagtaccccaaaattcccccaatgcttgtatgtttgtgctattttgttgttgttgcaaattgatacgagtacatatctattaaaaaattctagccaggccgggcgcggtgactcacgcctataatcctagcactgtgagtggctgaggtgcgtggttcgcctgaggccaggagttcgagaccggtctgaccaacatggggaaaccctgtctctactaaaaatacaaaaattagccaggtgtggtggcaggcgcctgtaatcccagctacttgggaggctgaggcaagagaattgcttgaacccaggaggcgaaggttgcattgagctgagatcacaccattgcactccatcctgggcgacaagagtgggattccgtctcaaaaacaaacaaacaaacaaattctagccacatgcttatttgcaatgtgagcccacatttggttttataatcctttctcactgatggactgatggactacatgaatacactttcttttgtattcatactggctgggtacttcagtgggtaggtgcatggaggagcaggtaaccggatctgagaattagtctttgccggggaagcgactagagccctagcttttttcaatggagaaatcccttttctggctttagccagtgtagggtagactgccacaaggagctatgataacttaccatacgtatttttcatgcttcaatctggtgatggttgatcttcgagtcagactggggtttaaatattgccttctccactgataacggtcttgtgacctgaaagtcttttaaactttctgagctttaaatttttcctctactcagtggggatgatgacagagtctctctcctggagttagttattgggaagattgattttgatggaattcaggacatactactccaaaatatggcaccttggaatttgagaaaacagcagaagcagaaaggtcacttttaccttccctgacccttctcccctgaggcaggttataaaacctaggagggccactctctggctttctcctgcttttcttcactgaagtaggtcctaagaccctcattccagaggcgcctccctctaccctgagaaaagaggcatccttatcactgaggtcagagagatgctgttggggctcagagaacaatactccgaagtctcatacttcggcatgctgagtacttttgaattaaagaaaattggaagggcttcacaactgccccagaagcaaggatttgggaactttctgttgtactcccttcgtcccccagggtctctctggaattccccatatctgacttagaaagcttcttacaaaataaatgcaatggtcttagaagtctcattaaataaccaggcacgattaaccatcagagaagagaaaagactaaaagtagtcaccatgcccagacatgtttttcatcttttcttctgaaggcagctttgagggattacctggaagactttatctgcataataagataacctttggtaacagtgcagttctgctccttaccttccagtattcagtcccattcagtttccaaagaatcacttataagctattgtctgtcctttgggctcattcattcccccctaaaaatcatttattgctccttcaaaattgcccacagccccccacttccctttcccctatgaaaagggtagttacgcctcaaccatttggcccttctttgagtctcatattttgcatgactcctgtacttatgcctgttattctgtctgttgtcagtttgagcacacataaacattcagagggagagggaaaattctttttatccctacaacaccaagaagaatttgaacaaacagtccttgctaatttcccctgcgtttattcccattagaccatattcttttatcctgtaattgtatttctccgtgactcttcattcttcatcaaacataggcataaaaatacataaggttacctatttcttagagtcttcatttccaaatgaagcttcccgtgtcacataaaacttacattaaataaatatctatgcttttctcttgttaatctgccttttgttataggggcctcaaccatgaacttaggttgggaaggaaagagatttctttttccctacaatttgatataaagtctccatggcacataagagatagtcagttaatgttgcttatcatcatcatcatttttttctggaaagggccacatagaacatgttttargctttgcaggtcataccttgtctgtcaaaactattcaacactgcccttgtagcaggcaagcagacatagataatgcataagtgaatgggtgtggctttgttccaataaaactttatttacataaacaggcaggctggatttggcctgaagatagtatgtgaaccactgtagctgtgtgtgtcaatacagccttacttacaaaaccaggcaggatagatttggcccatgggacatagttggctaatccttacgtagcagtggttctgaaaccttttaatttcagatctcctttatactcttaagaattattgaataggacctgaaagaggttttgtttatgtggatcatatctgtggatatttactgttctaaaaattttaactgacaaattaaaaaaacttaattcattttaaataactaatacaaccatagcatgttaacataaataacacatttttataaaagaatatatgtggcacatatacaccatggaatactatgcagccataaaaaatgatgagttcatgtcctttgtagggacatggatgaaactggaaaccatcattctcagcaaactatcgcaaggacaaaaaaccaaacactgcatgctctcactcataggtgggaaattgaacaatgagaacacatggacacaggaaggggaacatcacacaccagggactgctgtggggtggggggagcggggagggatagcattaggagatacacctaatgttaaatcacgagttaatgggtgcagcacagcaacatggcacatgtatacatatgtaacaaacctgcatgttgtgcacatgtaccctaaaacttaaagtgtaataataacaaaattaaaaaaaattatttttcagatgagatcgggcgcgttcagggtggtatggccgtaggaaaaaaaaaattatttttcaaaacaaattttagttggaagagtggcattgctttatacttttgcaaatctttttaatgtctgcctcagcagaagacagctggattctcctaactgcttttgcattcaatctgttgtgatattataagtcatattgtctcctgaaaactcccttgcacctcctgaaagtatcttggggacccacaggggtctttggaccacagtttgagaatctatgtcctacagacatcattaagggaaattaagtattaccttgtaaatggcagctgcttttacctattattgagagtttctttgtcatctttttttctgagctaaaagtgaacatttcagtgtctgttccttccccctgctgtagaaggcatatttagtcatgtggtaggtgtttatgaaagcaggtttgctttattttctgaaatgattgtcaccttggcttgaattgtctgctgctgcatcacaatagagttttactactgtggagaaacaaaagccaggagatagtctgaattcattggagtaaaagggaacaaaagaagctagcttcagagcaggaaaatgcctgtgatgacaaagaagcctaaaagaatgatttgcataaarctgaaacmcttgaaaagcttcaagataataaggttaaatacaaaaggagactcaacctcagagtggctgcttttgaaataagttttctagagggttttcaagaacaaatatttcctacttaagttttgagggcccttcaagtttaggtcagtgatatctgggattctgggttcttggcagtggtgagggggtctgtgtggtcctcttggaattgatccttatatagtaaatgggtggctctgaaaatctgaggaggtttcatgcccaaagtctccttattcttctctgtaccccctaaggattgccatatgctgctaaaacttggcttttcaaccaagaaataagtcaactctcacattgctagaacgatgctgtgggatcctcatatgaacctatatatgtgagatttttctcataaaggcaaaattatttcatccagatctgttttcttctttgatacctgcaagtaaatagattgggggataaagctgcaaataagctgagaatgttccacagtaagatttctcacagtcctgactagatagaaatgaatattaaagtaattcagcacagtactaaaagcttgtacctaattgccttttctttatatttagcttaactttaaaggaaatttataactaaattgggctcagtgaattccctggttgcctacttttattacccattataacatatttctgtttaatttacctcttccagccgtgatacttcagtgaagatatgagtatgtatttggaagatggtgaagtgaacttgactgttttgggaggctcaactccagggcttctcaaaaacaacagcaatgtcaaggaaacaattttagccttgttccagaatattcacattttgggttttctcttctgaatgtagaaggaaaaattcccctatttttttcacactcatgttcagctctgtcattttcattctgggtatacatccctttcccatttattacatctgttacttttatactacacaggaaatacatgtaaaacatcctacccactctgatagaaacaaatgtgcatccctgtcattaaagctacacctgtaagctttgcccctatccgggtcaaaaggccctatcatgtaaggaatcccagcaactagcaaggaagtgaagacagtctaggagggaaagactcctggttttctggaaacctatgcagtgggagctttaatagttgccctcaatctccctgccctccttgcttgcccctttgttctgtttaaggctagctgcatatttcttcttgtgttttcacggagtagtccaccatcacaccatatgggctttttcctgtggtgattaattaggttgcatgctgagctctctgattctttggggactgtgtttcctcatggtcttgtcagaacatgcagaatagctgtgtgatacttctcacatttgcacccactgctaacaaggtatctgacaactcctcaatatcatgttggatgcaaggcacaggatgctgctgggctagtgctgtttaattttcagatctctggtagctatgagtttgaggaggctcgggtcacattttcttatttatgtttcatctctactttcatatgattataatagtaatatttgaaaactttttgcataaaggcagaagaggaaaaaacccatatttagtgactaatttttctacagtataataatgaaaagaagtgagtgcagaaacatttctaacaattgttataataatgatggtgatagaaataattgaaggctgggcacagtggctcacacctgtgatcccagtagtttgggaggccaaggtgggtggatcccttgagcccaagagttcaggaccagcctggcaacatggcgaaacctcacctctactaaaaataaaaaaattatccaggtgtcgtgtcacgtgactgtcatctgagctactcaggaagctgaggtgggaggatcagttgagcccccaggaggtcgagactgaagggagtgccactgtactcagcctgggtgacagagccaagccctgtctaaaaaagagagagagagggaagagaaagaggaaggagagggaggaaggaggaaggaaggaaagaaaaaaggaaaaaagtagcctgtgtgctttcttttctttattttttgagacagggtctcactctgttgcccaggctggagtgcagtggcgcgatctcggctcactgcaacctcagccttctgggttcaagtgattctcctgcctcagcctctggggtagctaggagtataggcgagcaccaccacacctggataatgtttgtatttttaggagagacagggttttgccatgttggccaggctgttcttgaactgctggcctcaagtgatctacccacctcggcctcccaaagtgctgggattacaggcgtgagccaccgcgtctggccatgaatagtagcctgtgtgctttgatgcatcctgctaagactttacccatccttaccttttaaaatattgaccctaacatgctgagaataggaactgttactttcttcattttagagaagaggattttgaggcccaggaaataaagtaactgactgtaagtccctcttakggagagttacatttttacaaaacttttcattaaacaattaaaaaaatttagtttgagttaaaacgtttatacacacgtgtacacacacacacaggcacagtaaattgtacaaatctgaagtatgtggctcagtgtgtttctataggtgtgttactgctttcacctgagtggctgccttgcagatcaagatggaatactttctagcattccaggcacatctgtcatttttcccaaccccccaccaggtaaccactattgtatttccactcaccatacagatagatttgcccacataacttagggaactcttttgggtctgtctgcttttgctcaacataatgtctatgaaattcacacgtgatgttgtgcggtacttactctttagttattgattatacaactatacaacagtttgccagttttcttcttgttagaccttttgagttctttctagttttaggctttcatgagtaaagctgtaaagagcaatcttgtaaatgcctgttggtgcacatttgyatgcagttccctctggtgcctaccataagggataaggttaaatgtaattcatacggtgggtgcagaatttgcatttgaaccttgattctctataggcagagccttggctcgttaccactaccctctgctgctgcctgtaattttaaagcctgtatttctccccaggtaaggaagttgaatcttttttttttttttccccctgtatgaaagttcagtggactggcactttaagatggttcttagcagcttgtgtttgccccacttatataggtgccacaccattaaactgcctatcattttccgactgatgcctttctggaaaatagataaaggacatcagaagaatgcatcttatcagtattgatttagccgaaagggttgtaaagaaatcagttacagtaatgtcaaatttcataagattggttttgagagagtagctgtgtcaactaggctgacattttttctcttttggctttatttcgtagtatgggcattaatggtggagtgatccagatttggaaaccaaaaatggtatttctaaggcattccacagggctgggggagttgatgctgtatcttttcatgctcccttggtgctaactggctgtatggccttgggaaggccacttagtttctcctgcctcgctcatttgtaaagtggggggcataggattgtatcagtgaaacttcaccttttcttggtaatctgatggatgaccctctcctttgaaaaacaaacacaaatctgtgtaaatttcaaacccatttcatatgggcttgttgatacctgttagctcgtgatttcttaattataaaggaaattcccaattctattattaatgaaagttcagctctctgcattttggagaagtcttttattataccaggtttattgttctggacggcaatatatagcattgtagctaaaatgaaaatgatactccatggtctacctgcaacaaaagtgagctggatatactattgatcacactttaaataacttatctttgtggactgccactctgggcagccttgtgctgtgagggtagagaggtaaacaagtcatactccagctctacccccataggatttacagtagggataggatctgatttggtgaattactatggagaggagaggcacaaattggttgtctgcaaggccaggtagtatataaggagaggcacaaattggttgtctgggaggccaagttctggaggtagacggccaggtttttgtgggccagttactaaaaactgtacttcagtttgtccagctgtaaaaagggtatagtaactgtacctaccatttaggattgttggagctttaaatgagtccatgcagggtttcttggcttgggcactattggacactttgggccagataattgctgtgcattgtagggtgttaagcatttgtaaaatggggagcataggattacatcaaggattcttcaccttttcttggtaatctgttggatgaccctcttctttgaaaaacaaatacaaatttgtgtcagtttggcctctgttcactagatagctccagtgtggtaataaaaaatgtctccaggtattgccagatgtcccctggaggggcaaaatcaccccccacccaccccaccttgactttgagagccactagtcttatgttaaattctcttctaaatgctatggtaaaaacacctggtggctgttgccttaaagaaaaactcctctgagaaagccataattccctgcctagtgccccactgatggaaacaaaaatagaaagctaacaaagccctggtagcaaaggtctgtttgttcccattcccctgcttactgaattattgatatactttctgagatgaactgcatttgttcagataggattaatagccaccaccttcctgaagaacagtagcttctgcctggcccccgcccctggcccttgcaatttgacagtttctgctacctgctcatttgcagctcagcttccctggcttcctgcaagtaggtccttgctgagagcagacctgttaaatcatgttaaagccaggcagctcctgggagaaccccagcctgctagaggtgtgaacacaggtgctggacagtgagcttagctgcctgggataaaaaaacacatgcactgaagagctttgggtggctgagccccaggtatttgcttatcacctgttaatgaccacataccccataggcatccaccacgaaggggctcttggggcacctgagagttgaaattaagttagtgaagatgcctgcgctgggtgtgaggaacaagtggaaattacagttctgaaaaggcacttggaaagcagggagcagaataccagtatctgatgggttttgtttgttgggagagggagttggagggtgggagaatgggtagattctgattcttcttttattctccattatttgctcaaggctgctattttgtcaggggtttcaggctttggattttgtggaccagtttaaaactggaggcctgctgtaaagtagctaaataacttttaagtttgtccaatagagatgtttaaagaaaaaaaaaatactatttactgtcgccatcaccgcatcaaagaaaggatgctttgtcaccaaaggagtaggaggtgtataactgtrcaataaagaagagtcattgatgttaaatgaatcaggtgttatgggccttattcttggttattttaccaggacccgggaacgatgtcatcataggctggtccatttgtttcactgcacatagtagggattaaatgcttattactgcttagatgactgaattaatgaacagtggtaccccgtattcatcattcttggggaggactgatgcttgagcagaggccgtgaggtgccctcttcaatggcacccatcttcaattcttcctttttatcttttgcttttgacctttcctgaagtggctgaagattgtagcaatacacaagcatactccgatttcccctaagatgttgtgcctcccatctgcttcttgtttcatattgttctgttttcatgtgccctaagggacagttatgttgtataaagagcaagtcccccaagtgtcctccccacttcgggtctgcagaaaaatgattgattatgaggaakgtgatttcagtaatgcaggcaggattaaatgcttgccatctatcgacactttgcagtgccttaaagagagcttttaaaattttgggctatcactaaaaaaagaaaaacccagaaataccctgggggggaaaaaaaaaagaacctgggaaaatgtacagaatacaactgggagccgtcccattgagtaagtgcccaatgtgagctgcatctgcaacttaaagcaacactctgacctatttctcttactaataattggaacatatatagtgagataatatctgtaaaggaagctgtatttttttttttataacatgtataaagctaacagcccaaattccttgctttggagaattgcagaaatgacattaactcattttctttctttgatttttatctgaatgtgcaagtaattttttttttttttttttcgagatgaagtctcgctcttgtcccccaggctgaaatgcaatggcacaatcttggctcactgccacctccgcctccggggttcaagcgattctcttgcctcagcctcccgagtagctggaattacaggcgctaccaygcccagctaatttttgtatttttagtagagatggggtttcaccatgttggccaggctggtctcgaactcctgacctcaggtgatccacccgcctcagcctcccaaagtgttgggattacaggggtgagccactgtgcccggccagtattattattattattatttttaactagaaagcaatatatgaatacattgaagtttgaaaaaacttaaaaatacatgaaacatgcttaacctacccctcctagttccagtttcctctcagagataactgctgtgaattttatacatttactgtgcatttacatatggggaaatacctaattttcatgttccatgaatggtattttcatattattagcctattcttttttctacttaatatctcttagaagtctatacaggtcattccatagatagtgtctttattgttgttataataactgctgcatagttttccatagtataaatatttcatagtttatggagtatgtagctgttcatggttgtgttctattacaaataatgctgaagtgaaaaaagtagcatatgcatcctcatgcatatatgcgtttttacctatgattaaatgcacagaagtttagttagtatttgtattcatcagtgttctccagagaaatagaaccaacgggatctatatggagagaaagatttattataacaaattggctcatcggattatggggggtgacaagttccaagatctgcctgttggccagctggagacccaggagagccaatggtgtagatctagttcaaggccagcaggctgaagacccaggaagagctgattttttttctatttcagtccaaaggcaagaaacaaatgtggccctagctttaaggcagtcaggcaggaggaattacctcttgttagcagggaaggttagactttgtattctgttcaggccttcagctgattaggtgatcccacccacattagggagggcaatgtgctttttactcagtctatcaattcaaatgttaatctcatccaaaacaccctccagggcatacccagaataatgaattgaccaaatatctgggcaccttggcccagtcaagttgacacataaactttaccgtcatagtatttaaggatatttttattttttaatgcstattttattattatttttgagacagggtctccctttgttgcctaggctggagtgcagtggtgtgaacatggttcattgcagccttgacctccctgtttcaagcaattcttctccctcagcctcccgagtacctgggactacaggtgcacaccactgtgaccagataatttttgtattttttgtagagatagggtttcaccatgttgctcaggctggtcttgaaatcttgagctgaagggatccacccaccctggcctcccaaaatgctgggattacaggcgtgagccaccacacccagtagttttttttttattttttagggatatttgcctccccggaacgctgtgtcactttgtgctgctcmtactaacaaagtatgaaaggactgtcctttctgcacatctcagccaactggtgatctaagctcattaaaaaaatattgagtcactatgtcagggcaactttgaatagttggtcttctgtactagtgaagagggcatgatgttttagagtcatgatggaagcagtgacctgcctccaggagtgtctcaggagcatgaggacactgggcacctttctcacagcccaactgggggatcattagctcaccaaaacttcttatatcttccctaatgaactgggctctctgcaaatcttttttttttttttttttttttttttttgagacagagtctcgctctcttgctctgtcaccctgactggagtgcagtggcgcaatctgggcaagctgtgccccctgggttcatgccattcttctgcctcagcctcctgagtagctgggactacaggcgcctgccaccacgcccagctaatttttttgtaattttttagtagagatggggtttcactgtgttagccaggatggtctcgatctcctgacctcatgatccgcccgcctcggcctcccaaggtgctggaattacaggcatgagccaccgcgcctggctttctgcaaatcttaaattgagcaatgcataaacttttatttctgaatggaagataccagtctggattcctgaaaaatattttggaaacttatatttcatgtgactgtgaaggtggtttagagcctttcaggggcgcacttgccctaaaccaaaatcaaacaggttaatttttaaaatgtcacaaggtttggccggtttggattctaagtctgttggaaggaagcaaacactggtagtaagattacagtaaaaacaatgcagctagctgcaggtatgttaatttcagcactatgcatgtctatgctggatcattttgtgctttaatcctttttgtgtttcatccttcccacagtcccactgagtcagaggtattgttgtctccattttgcagatgaggccactgaggtagagcttgcctactggggatacagctgataagagtgtaagccagctaatgcgtgtgacatgtcagcctgacccaaaactcttggccatatatggcttattggctttgaatggttttcatatttttaaacagttgcattttattttttattttatttatttattttttttgaaatggggtctcgctctgtcacccaggctggagtgcagtggcgcaatctcagtttactgcaacgtccacctcctagattcaagtggttctcctgcctcacccttccgaatagctgggattacaggcatgcaccaccacagctggctaatttttgtatttttagtagagagggcgttttgccatgttggccaggctggtctcaaacttatgacctcaggtgatctgccctccttggcctctgaaagtgttaggattacaggtgtgagccaccgttccccgccttaaatggttgcattttaaatggttccataaatacctacctaatcttgactttacttcttgcctaagatacttactatctagccgtgtatggaaaaattttgcaatgcctcctcttgactattactccttcatttcccaagactgaaaagaagccttttcactgtgcaaattaaccactgtgccagtggttctcaaatttcactgtgcaagagaaccactgtgccagtggttctcaaattttagtagggccctgaatcacctggacggcttgatgcaacatagattgctgggccttattcccaaggtctgggttggagcctgagaattggcrtttctaggtgctgctgatgctgctgttcctgggaccacactagaagtaacattgagctagaagggtgaaccagtacttccgggtgtttgccaagttactgtgagagtgtctcactccagttattggtagtagtagcatcccctttgagtttgagccataggtttgttgcctgacaaaatcatgcactaagcacggaaaacttttgttttgatgatgaagaaatttaaagtatgatggaagtggctgtctgaaaatggaaacagctagtatgaaagaacttcagctttttctgcttacatgttttaatcttaaatgtggttagatctatatttaaatctcttccttatttaaatgatgataattagcatcaattattgatatttcactatgtgccaggctttgtgctagaccyctttccatgtcgaatcccatgtagtgcgtacaatagttctatgaggttagataatagtagccccattttaaaagtaagtaaaygaaggcttagatataagaggaaacttctcttagtctcttgactagtaagtggccccagatsattccaagcttgtccaacccgtggcccagggcagcatgtaccccaggatggctttgaatgaggcccaacacaaattcgtaaactttcttaaaacattatgagtttttttgcatttttttttttaaagctcattagctattgttagtgttagtgtattttatgtgtggcccaagacacagtccttctttttccagtgtggccgagggaagctaaaagattggatacctctgatttagacccttgttcatatagttttctctttactttctttttattattattattatacttcaagttctgggatacatgtgcagaaagtgcaggtttattacataggtatgcatgtgccatggtggtttgctgcacccatcaacccatcatctacattaggtatttatcctaatgctatccctcccctagccccccgcccccagagaggccctggtgtgtgatgttcccctccctgtgtccatgtcttctcactgttcaactcccacttatgactcagaacatgcagtgtttggttttctgttcctttgttagtttgctgagaatgatggtttccagctttatccatgtccctgcaacggacataaactcatccttttttatggctgcatagtattccatggtgtatgtgtgccactttttctttatccagtctgtcattgatagacatttgggttggttccaagtctttgctatggtgaatagtgccgcaatagacatatgtgtgcatgtgtctttatagtagaatgatttatcatcttttgggtatatacccagtaatgggattgctgggtcagatggtatttctggttctagatccttgagttatcacaacactgtcttctacaatggttgaactaattcacactcccaccaacagtgtaaagtgttcctatttctccatatcctctccagcatctgttgtttcctgactttttaatgatcgccattctaactggtttgaaatggtatctcattgtggttttgatttgcatttctctaatgaccagtgatgatgagctttctttcatgttttttggctgcataaatgtcttcttttgagaagtgtctgttcatatccttcgcccactttttaaagagcttctgcacagcaaaagaaactatcagaatgaacaggcaacatacagaatgggagaaaatttttgcaatgtgtacatctgacaaagggctgatatccagaatctacaaggaacttaaacwaatttacaagttttctctttacttgcgtatcattcagctttcaccttcccccatggctaccacatgaatttacatttgtctgtctctaaaacattagaaaagttttactctggaaaaagatatggcccatcagatacaaagttagtgatgttattatagtctttttttttttttttttgagacggagtttcactcttgttgcccaggctggagtgcaatggtgtgatctcggctcactgcaacatctgcctcctgggttcaaacgattctcctgcctcagcctcccargtagctgggattataggcacctgctaccaygcmcagttaatttttgtatttttagtagagacggggtttcgccatgttggccaggctggtgtcgaactcctgaccttaggtgacccgcctgccttggcctcccaaagtgctaggattacaggtgtgagccaccgcgcccggcctgttattatagtctttaaaaaattgtcctttaactgccatcgattatttttacaaatttgaattatgtaaaatttttatatagaaaaaatatatgagacatttaacagatgctaatatcttgtcacagcggcttaagactttttttttttaaagagagaacactggagaattggcaagttcctaaacatccatatccctttcttccccattgatattgtttggctctgtatctccacccaaatctcatctggaatataattcccaygtgtcgaaggagggacctggtgggaggtgattggatcacgggggaggtttccctcatgctgttctcgtgatagtgagggagttctcatgagatctgatggtttaacagtggcagcttcccctgtgctctctcttctcctgctgccttgtgaagaagatgcctgcttccccttcmccttccaccatgattgtaagtttcctgaggcctccccagccgtgcggtactgagtcaattaaacctcctctctttataaattacccagtctcaggtgatatctttatagcacggtgagaatggactaatacatctatctcaaaggaatatcttcttttgcttatgcatacttttatctagagcaaaactacaaaaacatgcatgaaaggtcatatatagcagcttctgcatatgacattgtaatcaatggtatgttgacattttttgwgtcagtacacagtgggaggtgacaagattaagagaatgarctctcttgatgttcatggaggggtaggttgtaggcatggtattagtaacataccaacttcaggaatttttatctggcatcccaagtaccccctttcatcagccatgttttgttgttgtttgttttattcattttttcctagtttctcctaaatgcatgtctttgggttcagagttatagggtcttatcagggttttgacagattatctgaaacatcaaatatgtttttttttttttttgagacggagtgtcactctgttaccaggctggagtgcagtggcacgatctcggctcactgcaacctccagctccctggttcaagtgattttcctgcctcagcttcctgagtagctgggattacaggcacgtgagaccacgctcagctaatttttttttttttttttgtatttttagtagagacggggtttcaccatgttggccaggattgtctcaaactcctgacctcgtgatccacccgcctcggcttcccaaagtgctgggattacaggcatgagccactgcacccgggctgaaacatcaaataattttaagcctctgtatgtgttgtaacctcctttgttaggcaaggggattatagtagagaatgaggcagataaaatacccttccccttccccatggaccttaaattcaggttattccaatttttattagccctcccccaaatttaatataatatgatttttctaaaggtaatgcttgttaaatacagtcccagattttacgtgctggccgcagcattcagcagttaacatcatcctgtgtgtggcaggcagcgtgtcccaatttttggtttgtagaaggtggtcaccttatctattatgtggcaatgaggcatccacactcttattagatggcctgcacaagttatgtgcccatttccatttgttaatagacattgtgctaattgcatgggtgatttaaatgttaaaaaggcattaaagcatttgttgtaataattaacaaagagattgctaggttacaaatgaacgataatgccgtattttaaaaatacagcattacatatctgtgcaaagtgatatatgttatgaaacattaatatccaaatgagagatttgaactgaatgatctccaaaatcctttctaatatgtcttttctggctttctaaaatatgagctctatgactattaatatattttgtgagatgtcaactgtgccatatttctgcaaacctcaaggagaggccacagcctatctttagtcttatgcaagtatattaactgaaccttgcatggtggactagaggttgctgattgtcttctattatttctccataatagaagccctgtttttctaggtgggcccatagctgcraggaataaagaccagccttcaccctcccttgtagttagccatggtttaagtgtgcaacttctaggacatttcctcagtggaagacggtcatgtccttagtctgttcttcctccctgatagctggaatgtgaatacaatggctggatcttaagcagccatgatgggaccacgagattggtactatgtgccgaagatgggagagccacaagatagaagcagtctggcagctgtagatactcagatgtacagagtatttcttgcagaaaagtctgctactgagggaaggagttaggggctgagattcaatccaggctctttctcaagttgtgttcttagagaaaggtggggccttttactttccacaaaaggatcatatgtttgctaaaccatatacttgcagggctccttccaccaggagggctgcctttctgtcatttgttcagaggcgccacgtgagccttgatactgtgaaatgtcccaccatcccagacttccctacctctgaactgtattaatggtagagagaagttacaagttacaagaagtatcttgttttagctactcctgttttgatattttccattactggtacctgagtctaatcctgataaatatatcactgtctttttctttgcaagagtcactttggattttttgttcacaaacagcaatcaaatttgagtaactcagttgaagtgttttggaagkttacagaagctcccagaatagagaggcaaagtgaagaaacattgctggtcatgggcaaggaattccagaggctgggaagtgagtgctagaggacagcatacttaaagccgggatggtctggtcataggtacagcttctgctacagagagaatcatctcctgcttgctttttttttctttgttttttttttttcttccttaaggagcttatttttttgtttgtttgtttttgagtcagggttgtcctgtctttttccaggctggagtgtagtggcatgatcatggctcactgtagcctccacctcccagacttaagccatcctcccacttcagcctccctagtagctgggactacaggtgtgtgccaccacatctggctgatttttgtattttttctgtagagaccaggtttcgccatgttgcccaggctggtcttgaactcctgggctcaagatgtccacctgccttggtctcccaaagtgctgagattactggtgtgagccaccgcgtctggccctcaggaaggtgtctgtccatttggcaaggcccagatcgtatgtcttgccccctcactctactgggttgggtggaggaaggccctgggttcttggccaccagttcctggagcaggagtgagtgcagctgggttgactgcctaactgcctgcagtggagggggcacagatttccaaaaaagaaatgaagctgctgggaggatgagggatgaattctgagcaaccaaaatagagaaaacaggaaagaagtaaaagacaacgatgatgacacatgatcacacgcctctgtggtctccagattagaaatggaatagggtacatactagtttaccaccaatggcttttttttttttggtccttaaatctctaccatccaagaagtgagtgctaactctgtatttattagtccctggatagataagcagagtcagtactcactgctttgtgtagagtactctcctagacataagaggagcataatgacatactggatggagagggtctcctgtggtgagggtgctgggaacactgaaatgcatccagaatcacagggaagcttcagaaatggctctaagctctcagctcactgccaccgccacgcccctttcctttataactctttagggaatggtttgtttgcttttttccccagaattggggatcacgtcacaactctgaggttcctctaacgtcatcttgaactctgcagaagtgtgtttcttcctctgaagtgctattttgtggtaatttaatgtatttttttcatgaataatttwcccatagagtcctaatatcttaagacagtgaattttgttgtttatcaaagatgtatctcaactaggagacagaaatcaatttcttattacaaagcaaagacaaaacacaagatcatctaccctgtgggataacaatctgttttggaagcattttggattattaatatttaagtcaggaacacatggataaagaaattattgtccctttttataaagaaagtggtatatttattactcatcttatgtgtccccattgcgtactctttttttctctcattatcttttcttattgttgggttatgaagtgtcctgaagtcacagcattttagggctaaaatacaaactgtacttaaactacctggtaaaaatacttgcttactttttaaataaaaactcccagctgggcatgttggctcacgcctgtaatcctagcactttggaaggccgaggtgggtgggtcacgaggtcaggagttcaagaccagcctggccaagatggtgaaaccccatctctactaaaaactacaaaaattagctgggtgcggtggcaggcacgcgtaatcccagctactcaggaggctgaggcaggagaatcacttgaacctgggcggcagaggttgcagtgagccaaaatcgtgccactgcactccagcctgggcaacacagtgagactccatgtcaacaaaaaataaaaaataaaaattcccagggacataggcttcataaccaattatggtgacttgtttctttgtcttaaactctagtagtatttattgcaaaagatatattgatgctcttgtttaattgttatatagctgtttcatggattcacgtgttgtaaaagatttttatgtttttgaagtcaaatagtccatacaggccatttttttctgccttgtgtggttagtctctgaatgcccacaggaaagaaaaatagtagcaataatagtaatggttacaatttattcatgcttcctatatgcaatgcatcatcctgaccctaaccctttgaggtacatattgttattattcccattttacagatgaggaaactaaggactgagtttttatagccaaaggcaatagacccagaacttgagaggtctctgcctcaaaatcactcttgtattttcccacaatgagtaaattgatacacatacactttttttacttgaaggagaactagtaggtgttactataaagaatgatttgtgggccaggagtggtggctcatgcctgtaatcccagcactttgggaggccgaggcaagcggatcatgaggtcaagagatcgagaccatcctggtcaacattgtgaagccccgtctctactaaaaatacaaaaaaaattagctgggcgtggtggtttgtgcctatagtcccagctacttgggaggctgaggcaggagaatcatttgaacctgggagttgcagattgcagtgagctgagtttgagccactgcactccagcctggcgacagagccagaccctgtctttaaaaataaaaataaaaataaataccaaaagatttgtgttttattgtaggtattagaacatattaagctactgtttcacccagacatatagctttgtaaaaactaagactcgactgggtatggtggctcacacctataatcccagcactttggaggccaaggtgggtggatcacttgaggtcaggagattgagaccagcctggccaacatggtgaaaccctgtctctactaaaaataaaaaaattagccgggcatggtggtgcgggcacctgtagtcccagctacttgggaggctgaggcaggagagttgcttgactgggtggtggaggttgcagggagccaagatcatgccactgcactgtagcatgggtgactgagcaagaccctgtctaaaacaaaacaaaacaaaacaaaaaaacaaaaaccaaaaaaaaaaaaaaaacgcagactcagagaaccaagacagatttggaaacttcattcagggaagaatttgttagatcattgacattgctttagttttaaaaattcattttatattcttagctaattttcattttaacaagctgtgatggtccatagaaatgaatggaaaaatgccaggttgattgaaactgtatgctggagaaggtgtggatccactttaacacatacttggcttcagcgggttaaaagactacacaatcatgtgacattgtgacattgtgatgtgaccatccgttagttttaaaatctgagactgttttatattagttatgggagtgagcagaaagcacagaaggaggtttttgcctgtgtctctgttgctttgaaacaaaatcaggaaaaaccgtatctccaaaagcagcctgtgtgccatcttctgtgctactgtaacttagtaacttttttaaagcaattagaaaccagggacttgaagtggcccagagactcataagacaggctgatgatttcgctggatagaattggactttgcagaaaggttttgataacctttttggcctggtgccctgccctcatctagtcctttcccatttgtaatagaagcatgaarttcaatgctattgacttcccaggagtcattgaattgccacacacacagtgaatttggagtttggttcttaagttgaaaggggataaacaatcgacattgaatttgtacctcttatagctttgttgacttaatggattgtccccaacaatccatcaagaatggtacatataccagccatcacctggctcactaaaagccagtagaaattcccaaacctcattttaggcaaggatttccacttctcctcttgtaaaagctttcccaaacagcaaggattccagacatgagacattgtattgctttgcctgctgtgaaactgtacgatcttacaatggagagagaagaatggcaattggatatgaattgtagaaatttgggagaaggaatttgttcgttgacttgtattttctatgaagatgtaatcgaggaaaggccctgggcttaatttttttaattaacagagaagactgcaggtgttctcaagtatttatcaagcccctgcgccttgggcctctaactgggagttgtggggatgactggtgtcgaggtcttttcttgctaaagtgtgtggggagtgcatactcaggggatgtgcccctcctctctgtcctttgtagtgactcttggctctcccgggtctccccactgccagttttcctctgtgatacagccttcggtggtgtctttgtcagcaggcttggcagtggcagagaaagggaacagggagaaggtggaataaacctaactggtggctggccctttcctattatggttccttaccctcccttttccgttttctcaatccttcatcctgtttcttcctcccagaagttatgttaatcaattctgaagtctctctgaattgaggccatgtgtggttggggtttggaaaagcagggcttacagttaggttgagtctgatcatcactcactcactctgctctagcgaccctggacttcttgctgttcctcacacttcccagacacccttgtgcctcactgttttgtaattgctctcccctttcctggaacgttcttttctgagacccaacttgctcttgactgcttctgtgagtctttgctcaaatgtcacattttcctaaggcctttgctggccgctcttgctcactttacagtgcagtcctgacttgtcctatgtcctctccctactttttttctcctgggcaccatttgtcattctatatgttttactttatcttgttmattatttatccctcctccgtcctgcttagggggtaaacaccatgatgacaagggaattttttttttttttgagacacattcttgttctgtcccccaggctggagctggagtgcagtggcaggatcttggctcaccactgcctccacctcctgggttcaagcaattctcctgcctcagcctcccgagtagctgggattacaggcatgcaccaccacgtccagctaatttttgtatttttaggagaggtggggtttcaccatgttgaccagtctgcttttgaattcctgacttcaagtgatccacctgcctcggcctcccaaagtgtggggattacaggtgtgagccaccactcccggccaacgggaatttttaaactcgtatttaattgtaacatgcatgtggaaaaatgcatgcattatagtgaaccgctcaatgaataatcacaatatctgaacacagccatgtaaccaactcccagatgaaaaaacagtatcactcccgaaggtctccccatgctcccctcttcccacttcaagggctactaccgtcctgacttctgatatcatagatgaggtttggatggcaagaacttctgtcagtttatttcactgctgtatgtgcaggatatggcaggtgcaaagtacacattgattgagtacattaaaataatactggaagagagacctgtatttctgatgtagctagatttctaaagctgacctccattgatggattaatccccgccaatggaaaatgcagttagaggctttagaaatattatccagtggcaaaacactggccattataacttagacgattagatttgtcacttgtttctgctgcgttggccttgattatgtaagtattttagctgtgatgtctttaagtccactcttcttgcttgtaattttaatttattgtctgttctatttgctggcacttaatcagacatctctctggtgattgtcttacaggattatttaacttcttcttgcctttcaactgcattgtaaatttaaccaagcataataaatttgcaccaaattttacccttcagtgttgattcttccctagctggaattactgtacatttctgtttctggtcactggccactctctggtactacttgagaattgattactgttccaggtgggtgactacattagaattgcaacctgaactattttagcgctttaagtaatatagtatcatcagttttgattgtgctgttaaccatttgatatttgatgatgagttcaaggatacagtggcttcctagaagtttgggttacaggtgcctccagtagagatgtttacaaactcaaagatgtaccattcactacagagacactatgcaattgagtacagttattgggcctttatcctggaagatggtagagatgtgtctagagaagggagtaccttttctaacttgcacaaagtcacatcagccaactgatggggtttgaccatctgtaagatggaatattatacaataatttaacaagaagaacattatatttttggattagctttgtgtcctgtttttcatatttaacaccatgtcctgcatattttcctaagtcaaaaagttcctggagaacttttttttcccttaaaatccatagaggtcatcccctggctagggctgccatgtaagcaaaatccatgtgtcacctgggatgctctcggttcaagtaagggaagacccaactcagaacaatgagaaaataaagaaataagttagtataaatactggagatccagaagtagtgtatttccagacaatcagcgaccagtgaacttcactggaacctcatattgtttctgactttctgctctgtcatctgtggatcagatttagctttagagtggttctccttagtatggcaagatgcagcaacatgaagtgttgcatcgagaccaggagaaaaaggagtagaccaattcgggcccttgagcttgtcttaatctgtgttgtgctgctgtaacagattaccacagactgagtaatttataaggcacagaaatttattgtcttatggttttggaggctgggaagtcaaagatggaggggctggcgtctggtgagggctttcttgctctgtccttccatagcgaaaggtggaagagcaaagagagagggcaaaacaaatacacacacacacacacacacacatgcacaaaagagggccaaactagtctgtttataatgaactctctcccttcataatccattcatgaggctgatgcccccgtgggccaaatacgttcattaggctctacctctcaacaccactgcattagggatcaagtttctaaaagctgaactttgggggatacattcaaattatagcaaagtttgcagttgagctgaagggaaatttggacactaaattgattttgatgtagcagaggaagcagtctggataagggtggggatcagatacaggatggggcatccagcccacttgctagaattagaattgggcttttggaactctgtttatgcataagtcttcctgcaaggcttatatttaaagcaactatataaaatatgaaagtcagtatcaaatttctagtcctgttttcctttaatttcagtactataacttcaaagtgaaattgtaatttttgttaggaaatgagtaacggtgaattttatgttatgtctgtttattttggttaaatttttaaactgccttttaaaattttccttcagacggggtgtactatctggcacacaggatgcctaatacatagttattcaatcatggaaatgtattttctgttcttaagaactttataaaggtgccaactgatgttggagttctgaaagtaatgttttaatttgaatgatttgagagatacaagtggaacttaaaaaattatttgtcgagtgggtttctcggggtgagcagaggtcgatgataaatttagaggagttggttttgtgacccaaccctaggttagaactatgcagtattcagtctaagtcaaatatttaggactattctgatttcctgtctcctttattttcaagaaatgtctttgttgtagaattcatataatccatcctttaattggtacattgttcaaaggcctggtaatgtgtggtaataaacttttgttttatttcccagtattttattggatgattgacaggaagttacagatttaaagtcatggtgacttttctatttttttttctttttactgtcacaacagcattaattttcatggcctgatkatctgttgagatatctttctaagaagttgctaagttttatctgccctcatcttcctccatccctcccccttggtattaccattataaataggatacatgtgcacatttttggtgaaacaagaaaagggaaacccccatggtttcattgtctttaaatatatattttctcatgttacgaggtccttgtttctatcaaaaagggttggatagaaagtaaaaatgatggctactgttagattatctttagaagagatatatattattaaaaataccattaacttttaattttgaaataattgtagattcacaggaaggtgccaagatagtacagagcggtcccatataccccctttttttgttttctctagtggttccatcttacaggattacagtacaatatcaaaaccaggagtttgatattrgcacaatatatgtttgtaggtcgtggacattttatctcatatatggtgtaaccactgctgaagtccagatactggatgattcccatgtcacaaagatttccctcattctacccctttataattgcaaacatcctttcctctactatctccaaatggtggcatccactaatctgtcttacatctctctcatttcgtcattttgagaatattgggctgggccctgtggctcatgcctataatcccagcactttgggaggctgaggcgggtggatcacttgaggtcaagagtttgagaccagtctgaccaatatggtgaaaccttgtctctactaaaaatacgaaaattagcctgggtgtggcagttggcgtctgtaaccccagctacttgggaggctgaggcactggagggggaggttgcagtgagctgagatcatgccactgtactccagcctgggtgacagagtgagactcccatctccaaaaaaaaaaaaaaagtagttatatacatagaatcatataatatgtatatagtgtgtgactttcatagtgcccctgatctccatccaagtcattgtgtgcaccaatagtttgcttggccttattgtaaagtagtattctgtggcatggatgcaccacagttggtttaatctttcaccttttgagggagattttggttgttttcacttcctagctgctacaaagtcaaatattaacagtgcgtacacgtttttggatgatcataagttttcacttccctgggatagtcaccccagaatacagttgctggggtgtatggtaaatgtatatttaagttttttttactgccaggctcttccagagtacctttcccactctacactcccaccagcaatgcataagagatccagtttttttgcatccaccccagcagcttttggtattaccactatttttttattttagcgattctgataggtatgcagttatatctcagtgtggtcccaattttcattttcctggtggctaatgataccgaatatcctttcatgtgctcatttgctgtcctgtctttgtgtcttttgcccactttcttattggatttctttttactgttgagttttgagagttctacacacactctagatagtagatatttgcaaaccccatcagatatgtggtttgcaaatattttttatcagtatagagcctgttcccacgtcctctcaccaaggctctttatagcacaaacattcttactttgaatgaaatcgaattgattgatttcttctctctggccgatgctttggttgtcatatctgaaaactcttcaccaagcaccaggtacagaagattttctcttctccttttttaccacttacgagtttcatactttacatttaaatgtacaatccattttgagttaatttttgtgtaagttgtgagatttacgttgagatacgcttttttttgggacagaatcttgctctgtcacccaggctggagtacagtggcgtgatctgggctcactgcaacctccacctcctgagttcaagtgatttctggctaatttttgtatttttagtagagacaggattttcaccatgttggccaggctgatctggagctcctgacctcaagcgatctacctacctcagcctcccaaagtgtgagatacactttgtattttattttttaaattttttgcctgtggatgtccaattgctccagcaccatttgttgaaaagactatccttcctccattgaaytgcctttgcacctttgtcaaaaatcagttggccgtactctgtgggtctccttctgggttctctattctgttccattgatctttatgcctgaatctcagcctataccacatagtcttgataactttagatatagaacaagtcttgaatttggatagagtgattctacccactctattyttctctttttgaagatttgattccctgcctacctccaccactacccccaccttttttttttttttttggcttggaatggctactgtgttcattgcaaatgaccacagcactccctgagaaatcttccctttcatgtggcacatttaatcctgagggccagttctaacggtttggtaatgtcttatcatctgttttattcctttctggattccaattttaagtcagatcgagagaacaaggcctggcccagcaggagagttctctgatccttcggtcctatctgacttgggtatgataggtatgtggtatcaacaaagctgggtttttgcctcactggtatcaaataaggcactgctgagtgttagttggagaagagccagaagcttatgactggctgggatgagtggtagagaacaggccttccccacatatttaatctaacctctctagtttaaatatttccagtggatcatcatactctatgaccttgtgacataaatctgcacagagcggcagttcttatcttcagacttcagtcaagtttcattactgtggtttatgtgtagtggctttgttttggggcttccgcttatactgctgtctgcttgtttaccatctctttcaagcgaaagggtcttttgatttatgacttggtgggatccttttcagcattgatagagagatgtatgggttaatggttgaaaatayayaggatttggttgttagagtatatctagagaaattgagctactttgagggaaatataatatcaaatctcacttgtactgataatttgtataatggaaatatactgccattaaatggataacacaaaaaaattgctaaatataattgtaagtaggcactttcctacctaggacatataagataaccacaaagccattttataatccattaaacactgctgatagaattatatcttctccaatgcatgccccctaaattgcctgtttcgatgcctgaagttttgccattaaggattattattattgtatttttgcatccctagaaattttctttgttggattgacagttcccttgagtttatgatttgttaagctgttccaacttattaagattgaattggccgggtgcggtggctcacgcctgtaatcccagcactttgggaggccgaggcgggcggatcacgaggtcaggagatccagaccatcctggctaacgcagtgaaatcccgtctctactgaaaatacaaaaaattagccagccatggtggcgggcrtctgtaggcccagctactcgggagactgagacaggagaatggcgtgaacccgggaggcggagcttgcagtgagccgagattgtgccactgcagtccagcctgggcaacacagtgagactccgtctcaaaaaaaaaaaaaaaagattgagctattgaatttaattttgattttgattttctgtggcatttttctgagtgctgtagttttgaatgcaggaggggagaggaatagacctggagcccaagttgtttgggaaagtggtttaagtcattgtagtgtaaaatcataatttttttttttttttgagatggagtagtgcggtggagtgatctcatctcactgcaacctcagcctcccaagtagctgggattatagatgcttgccaccacacccagctaatttttttgtatttttggtagaaacagggttttggacggttggccaggctggtcttaaactcctaacctcaggtggtatgcccagctcagcctgggatttgggattatgggcatgacccacggtgcccggcccatatcaaaaagttaaaaccatggattttatacaaacaaaatgaatacatgtcaaacgcaaatcattaataaggcaaacaataatcaagtaaagttggtttaaaggacattttgaggaactgggtattcgtaagttacaaaggcatgccagaatatgattgctaggttacagccaacactggttaatgtcctacagggtaatacaactgctgcctgtttttctttctttaaactggatataaatctacaggttaatgtgtaaggtcaccaagtcttaactttaatcccagtaatatcaagtcaaacaatggtatgttctaggtaactaaataatttaaggtgagcttgttaaattcttcacctaccatgacactgaaatttcggagaatttttcttctcagcagtttgcgaagcttcttggctactgataatgcctgggttttatctactttacagttttgctttggtctggtatggaaggmtggtctacctgtttgtgaggcaaagcactttaccagctggtagctgaacsatttgtgatattttcattgtttttcttcttctctgttgacatttgccactttcagtcccatttccatctccatgtctttctttcatcttgttagagtgcatttatgcctctcaaatttgcctagcgtgctggcaaagaggaacagtctgttggagatgagtgaattacagagtcccatatgatttactttcttcactgtcttggacttggagttaggtggacatgcctctgcacacacccgtgcgaccttgagcaagtctggtgcttactttaaaaggatactgtgaggagtaaagtgttaaaataaaggatttaaagctatgcatggtggtgcacatttgtgatcccaacactttggaaggctgaggtaggagaatcacttgaggctaggagctcaagaccagcctggtcaacatagcaagaccccttcgctacaaaaaaattaaaaaattagttgggtgtggtcgtgtgtgcctgtagtcccagctactcgggaggttgaggcaagaggatcatttcagcctaggagttagaggctgcagtgatctctgattgcaccactgccctccagcctggaagacagagcaagaccttgtctcaaaaaaaacaagttaaaaaagaaaaagatttaaaaatggtgtctagcacacacacagtaagttttcaattaagatgatctagctaagagctatgtattttttttgtatcttattattttatatcttaggtgctctaacatatttgaaaacccatatgcttaaaaggaccagggagcaggcctggtggctcatgcctwtaattccaacactttgggaagctgagatgraaggcttgcttgagcccacgagttcgagcccagtctgsgcatcayagtgagacctaatctgtaccaaaaaaaaaaaaaaaaaagaaagaaagaaagaaaaaaattagctggacatggtggcatgttcctgtagtcctggttacttgagagtttgagatgggaggatcgcttgagtttgggaggttgaggctgcagtgggccgagattgcaccrttgtgctccagtctgggcggcagagagagaccctgtctcaaaaaaacaaacaaacaaacaaacaaaaaggaccagggaggctccctgtaagtagctaaaggggcttacagaattaaatacaggagcaagggtaatctgatatctggcatcccagctgaggggagaatagtgattagtaggggcagtggtgaagrggagaacatttgcactaagtgaagatggcccacaactgtgcatccgggccagttgttgccgtatgtttcaggatggcttgataccaacatttttaaagggaagagtaaagtctgattgtcctgtgttctttcccctttgtaaaggttggcaactgattgacatttaaaaaccgctatatttttgggtttcatagagtaggctatcagtttgccgtgtttgctctgggttgatttaggttactcaacaataaaggtaaatagttaatttagaccttgtaagaccttgtgaccatagcaatcattttcccagtcctctgctttcayagacaagggagtagctttgggcaaagttacatggcccgttagtgacagtacttttactttttatgaaaatgagctttacttttacacattctttgatttggggagttatatggtttaacatrctcattttttaacaattcaccatgcatttaaaacatgagcctagtgattgttagaacaaaggagggaaatacactgaaatttgaacagtggttatggttatttttattttcttgtttatgctttttatgtactctcttgcctatttaatgtactctgctcattaatgtactttgcctaatgtgcttctatagtgaatatttattgctttcattatcagaaaaagcaataaatgccattaaaaaaagaattcatcatggaaatgcctagatatgtgataatataatgattgattagtttcatggctcccaagattgttgcccataacgtggtggttcatttcgtttgctccatgaaaatgatagtgcgtcttattttgcacctgagatatgtttagatgggtcttccttaggtctgctgcgatttctttgactgaaggggtttgtgaccaccacggggcatgtaagttgctggtgccactcctgggcagcttgcctgtaagggataccgtctgtgttggcagaaccaggggcttgtcctgctgggctggagcccaccaactgttgcagctacagtgcctcagctgtcgtgcttttacactgtcattagccatgcagacctttatggctcaaaccaggccacatctgttgtgagtcctgtgaccttcaaaacccacaccaggaagaaatgcaaaacacatttttatctccaggctttctgcaaacacatcattttagagggcttatttaagaatgtttttctaaacttataaaagactttcatttttcttgtcttccattaacagcggaggttcattgttaatgatttgagcaaattagtgttgctcagaaagtagtttgttaaccacttgcatctgatcacaggagtttgttaaaaatattgtctcaagcctcacagtagtccagtggaatcatgatctgaggggtgtgtttgtccatccacattttaaaccagtgatttgggcatttagggctatatgccctaagggacactctcttttagagaggtaggcatgaagttagaaaggtgactctaagatgagtggtcatgtggtgaattgggcacctccaggagtgcctagacttcttagaaagtttgcttttgttcacttatcacattattgagaaagggagagtaaactttagggaaaggggttccaaagtcatgttacttgcagagtgtttgtggccattgaaagattgggaactggatttctaggttacaacattgattcatttggctatgcttttcagaaatagtaatgactataatgaaattgtcctattttctgtatttgctgtgggcccctttaactcagttccctctgaaaacctgttgaacactgttcyactctttctgcattattcaatgccaagccaaggtgttaggcttcctgatggatttatgagcctcacatttccattgctaaagcagtgaatagaccaaggaacgatttggctccataaaaatagtttttacccccgttgagttagcagtctcttgaatagaaaaaaggaaaagagaaaaagtagagttcccttaaattgtggggatgggataggtagagaattgaaagacagagggtttgactagttttgttcttggggacaggaacattagtagggagtatgccatgaaggagacacagaagctcactttcctttttccttttttttttttttttttgagacggagtcttgctgtgttgctaggctggagtgcagtgtcacaatctctgctcactgcaacctccgcctcccgggttcaagccattcccctgcctcagcctcccgagtagctgggactacaggcacgcaccaccacgcccagctaattttttgtattttagtagagacagggtttcaccatgttggccagaatggtctaaatctcctgacctcgtgatctgcccacctcggcctcccaaagtgctgggattacaggcgtgagccactgtgcccagtcagaagctccctttcacagtgctatgcagggctttaaagccacacatgccagacattctagatggaaatttctttttcccatttatttttccagctttttctgtagttctccactgtccagtaggaatggaacgtgaactgcataggtacttttttttttcttttttcttttttttgaagcagtctggccctgtcacccaggctagagtgcagtggtgagatctcggttcactgcaaccttcacctcccaggttcaagggattctcctgctttagccacctgaataactggtattacaggcgcccactaccatgtccagctaatttttgtattttcaatagagacgggggagttcaccatgttggccaggctggtcttgaactcttgacctcaggtgatccacctgccttggcatcccaaagttctgggattacagtggtgagccactgtgcctgacccacatagggacttttaaattttgtagcagctaccataaaaagtaaaaagaaacaggtggaattaattagaataatttatataacccagtatatctaaaatgtcattttgacatgtaatcagaattttaaaaatgttgatgagatattttgcctttttgtttcttactaagcatttgaaatcctgtattagcaggccgggcgcagtggctcatgcctgtaatcccagcactatgggaggccgaggtgggcggatcacgaggtcaggagattgagaccatcctggctaacacggtgaaaccctgtctctactaaaaatacaaaaaattagctgggcatggtggcgagcacctgtagtcccagctactcgggaggctgaggcaggggaatggcatgaacccgggaggcggagcttgcactaacacggtgaaaccccgtctctactaaaaatacaaaaaattagccgcgcatgatggcgagcacctgtagtcccagctactcgggaggctgaggcaggagaatggcatgaacccgagaggcggagcttgcagtgagccaagatcactccactgcactccagcgtgggtgacagagcgagactccgtctcaaaataaataaataaataaataaataaataaataaataaataaataaataaatcttgcattagctaggggcgacagtgtcggacagcacaatttggaagggtgcttcttatccccactgctcagttaaaatgtgaacatatgcctgcgtggaacattccctttttctgtttaaaagaaagtgaattgttttcgcagcagttagttggtgttagcataatgccttcctgtgtaggctgtagtgttagaattctctttacaagccttgtaataattttcaggaatgatcacttttattatagtatttttagtgccactagagggtttttacagtgtgaaatctcttaaaaggacagtcaaaaacatactgtgtttcttgtgggacacagggttgggcatttaagtacctagtagtgttcttgagacagattctatgaaattagaattgtccaggagaaacccaggtcaaaggtcactttgtatcagttcaaacatgttctatattggtatttcatgtttgggtctttatactctgtatattttgtgaaataactaaatcttcatgattcatttctatgttgtagcccctcacacttaattagggggtcccagtggagcttcctttccgtttctctatctgtttagagtgtctgggtgtgtattcatttctctgtcatgtgccatgtgactttggcaaggtccttaaccattctgtgcctagattgcctggtttttaaaatgggaataatgagagcatttatcccagaaagctctggtgagggttaacatgagatatttcagttgaatagatcagcacagtgcctcctggtacatggtaagtgctaaagaagcattacctatcaccagcaccattactcattttctttgtgaattttagcaactaaagcagagcaggacaaattttaggaatggatttatttctttgacattgagatggagctttaaaaagcattcctgacttcttcccaaaacataaattaaaaatctttgtttctgccacaatatctttagtctcatttccctgttccytctactgtttcatcctgggattgatcaactcttcacttttgttttgttttattttattttgagacaaagtcttgctctgtacccaggctggaatgcagtggtgtaatctcagctcactgcaacctttgcctgccaggctcaagcggtcctcacacctcagcctcccaagtagctgggattacaggtgcatatcaccatacctggctaatttttgtattttttgtagagatgggtctatcatgtttcccaagctgagctcaagtgatccgcctgcctcggctttccaaagtactgcgattacaggcatgagccaccacgcccagccaacatctgttcactttgggtaaattattttaataagaactctctggttagagcatgactgttaaagagaaacttcctaaatgcattttacaaagtgctttttctctttctcgctttttctgaaacactggttcttgaataaacctcagatatcatgtatgatttctgaaatacctaaaatctgcaggcttttttctctcctactttttggttccattatgttaaatatcaaagaatagattaaccagaatatgaatggacaggcatgcaagaaaaactggaggtttccagttgctcctaataccatctatttctctcaccttttcacttaatactcacttactgattatgcagaggtgatatttaagaacaaatccatttaataaacctttgtaagtaatatttaaaggagtgtttatttttcagaattcacccaggatttctgtgatctgcggttctttggctttggcacccggttgtcccaatttgttccagagtattttactgcatatgcgatgtctttctcgtttgctgtctataaatcaaaggaagagttcgtttcatttaattttgcctgatagggaaacccccaaagatacaaaatgactcttcaacgttagtgtatttattaaaaataaaaaaggaaactgcctttttgttctccttcctatcccaagtttgattgacygtattgcagagtcataaaaggatttatattcagagttgaaaagtctccctgaaattgatttcacctagcttcttgtatataaatagatattgagagggggggaataatactgaactgaaactttcaattttgaatgtgagctttccaaagtcatgaaactgcttttccgtctgactcttcagatggatcttatagcataattggtcagagccagaggaggtttttgaaaaagcatagccaaaaaagagaaaggaaacaaaccccacttttttaatagctgcagtttcttcatcaggaaaggactttggttaaatagctcttcttcccaaaaaggcaaaacatttttcctcatataattaatttaagaaattgcttttagagctatttaaacagacctagagataagtgctttagccatcttgatgtgctctagcgaaaatttttatgtggttagaatttttttaattaaatcacttcatttaagattgtaatagcccttttaaattattttccttgagactcgtattgtgttatttcaagttaataactcctcttcaagcaaagcaaaatgcaagatatttcttctgatgatttctttctgcaattgaagagaacaaagccagcctcattcttgctggaaaggaagcaaatctaacacctaataaaaatggagataacaaaaatgaacctgtagccctgggatattctgactagcaacattaaagtggttgcctgggcaatactaaccccaattccttgagttttttttttttttttctttgaaatgccggggacaggcctacattgattgaatcaaacaaagccgatgagaggcctgtgtttgagggggaagaaatgttcctacagacttggagtgaggaagagagcagtgtatttggaatttttctacccaaagcatatttgtccctgaatacagatgcatgattatagagccatcctgaacaggtgctaaagacaaagtctttctcattgtgcagagacaatttaccatagatttaatttattaattagcctttacttagatgtgctcacaccgacttasggaaaagttctttttagaattgttttgggaggcagagttgaggttgaggccatgctcacatccatgttaaaacaatgatttttttttttttttggagacagcatctcgctctgttgcccaggctggagcgcagtggcgtgatctcagctcactgcaacctccgcctcctgggttcaagtgattctcctgcctcagattcccgagtagctgggactacaggcgcakgccaccatgcctggctaattttttgtattttagtagagatggggtttcaccatgttacccaggctggtctcaaactcctgagctcaggcaatccgcctgcctcagcctcccaaagtgctrggattacaggtgtgagccaccgcacccggccattttttttttttttaattttttaatcatcactgacataaggttcctctgaaatccatagtagagccttctgtacctctacaagtatcatacaggcaggaagtttttttttcttgtatgattatcaagggtgtaattttatgtactatatagctaagggaaaatttagtaataatgtatattctttcttttccttattttctctgtgaatacttgtatttggcttgattctcattaactattatcttttttttyccccattgatctgtctaagcagttcattttgtgaacaatcctaattcagatgaagaagggtgaaggtgaagtttgtaaaaataatatcaaaagaaatctaaaaacacgttcattaggcatttgaccaagtaaatataaatagatgagttgaatatttgttttgctttccaaactttttcttccaggagcactccctccacagtcccctgtgcacaggtggaagtacacacttaacaatgmttcgtcttgactcaccctggggatcggagtgaggagccactgtttctgctcttgcccgcctccctccaatctgttccctgcccagcagagttgtttttacaaagcrtatattggttaaaatgttctaaaattagattacagcaatggtttatgcaagtctgtaattatactaaaaaccattatatctcaataacgctgctttaaaggaaggcatatatcagaccatattgactgccatgttggttcttcattgccttcttaagttcctttaaggtcctgaaggatcctgacttggtgcatcttcagcctcccacttctccccaacaccagctcatcaagatttaccagggtggatgccaccctttttcctgcctcaacatccttgtatgtgctgttcccctgtctttgaaccctatcatctctccctgtcaatgccctcaactaaaatgatgtttcttttctccaaatgatgtttctttccctgcctcctctctctctctaagtacattctttccctgcttgtattctctgtggctgtatcatgtgtgtttcactttattttcatgttgttcagtcattatacaagttttgctttatgtgtttattgattgccttcctcatggactggaagctccaagagggcaggaacggtgtagagtatatactgttgaatgccatggcagcatcctgtcatggagagaccaagaaaacttgcctaaatcttaccaaacttcctagaaattatctttttgataagcaggagttaggagctacttaagcagatggtgggtgttggaggtggagtacatagtttgctgaccagaagcacaaagcttggggaatagatggcgatgggctattgagtggctgaccagctagggttcaagtggtttcttcaacctggctctggaagtcagaggtctttggttttactcgggggagagttttggaatgaggtccacccccttcatgatacggtgttttaagcaaaggggtgtcatggttggagtgtcccctgtatttgatccccagacgcaggtcctagggcttgtgcattcagggtgttttctaccatctaccatgtttagggattatcttggtggatatttttgttattgtgaagcttactcatttctaagttctggaattattaatcacctgcttgctcctggcacattttgctagaggttgtggatatgctgaggtttttttgttttttttttttaagacggagtctttctctgtcgcccaggctggagtgcagtggcgcgatcttggctcactgcaagctccgcctccggggttcacgccattctcctgcctcagcctcccgagtagttgggactacaggcgcccgctaccgcacccggctaattttttttgtatttttagcagagatggggtttcaccgtggtctcgatctcctgacctcgtgatccacccgcctcggcctcccaaagtgctgggattacaggcatgagccaccgcgcccggcctatgctgaggttttaaaatgggtacccaaccacatttaaatagggcttctttgtccatttttwwatatatatatatatacatatatatatatatatatatatatgtatatatatatataaacctatttcattcaatatttcacatggaatgtgcatgtaaaaatgactcaacaatataaaaggcctatataaaaggcctatttctttcaaataccaaagttaggtgacatagtttgttttggggtttggcacaaagttactaaccatggtgctctattcgacttatacaactgacaaataactgctggatgaatctgcttttttttttttgagatggagtctcgctctgttgcccaggctggagtgcagtggtgcgatcttggctcactgcaagcttatttctcatggataaaaatgtgttaggcagtcacaattacacattttaaatgaaagataacatgaatcaagataatttattaatcaacatgtcactttcttatttgcttccttaactcaagttgtaacttaatgcttacttctttatttttattttatttttgagacaaggtcttgccctgttgcccaggctggagtgcagtggwgccatcacggctcatggcaacctcagactcctgggcacaagtgatcctcccgtctcagcctcctgaatagctggaaccaccttgcctggctaattttcatttttatttttgtagagatggggtcttgctctgttgctttttttttttttttttttgtttttttttttttggtagagatggggtcttgctttgttgcctagactggtcacaaactcctgggctcaagctctcctccctggttggccttccaaagtgatgggacttggcctatttgaaaaaaaaaaattttttttaaggctagtcaagggaagcagtgggagtggagaaagaacaaagaaatctgttcctggttgtgatcaatttgatacatatttctgcttggcttggaagtgactttcttatttatagacaataaccaaagtttgtgtagttgtaattggaagttagaaaaatcactctacattttactgttaataatattgggaacatgattttatcttagacaattgccaatagtggtggaaagactaacctagacaacttctttcttttggaattgttacatttttagttttatgaggctcatgtagaaatttttcacttgtgatgtttgtttacctttgagcaagtggagtagctattcatattaactcacagatatttttatgatgcctaaaattcaattttgtgaagtatagttgtagtgtagtrtcagttatagaggactgagagtaatatctggttcagacctatgtgttcttatgtaagtaacataccttttctgaataattgtacctaagctacaggactactggaagaattacatgagcctgtgtattgatggtaattttaatgatgctttcctcataggcaataattgacttgatttagtaaataacttatgattgggccaggccatgggtgcaaacacagatggccacagggactctttaagaaatacaaatgaacaagtgggactgggtggagaaggcagctagctggatattcatgactcttctctaaagagctacttgctattcacatagcatattgttgccatttgggaacatgacccagctctcacattttaaaaaaatgaaaatacagatattggtgttctctcctggggttttccacactggcaactaatgcaatacgcatacacccatgcatacatgtacagtgggtgaaacaaaagttcagatgggtggccgtgttcagcatggtggccaccagcatgtaatctctctgctgtttgccatttctgcyggccattaaagatataaagagatgccacaattgtaaaatggaaagtacaggtctgtggcctttgatattacaccaacactgtctgtcactgatcttcattttcctggtaatattatrgaatcaggagatttgtttccttgagaatcaaacagtagtaaaatggcctgaaagagtagtcattttatttctgtctgatatttgatgccgtgagcccaaatttttttaggaaggtgcctgtgagaaagagggaaccatggtatttttcagattttcatcacaaatgtataatgagctccattataaatcagttttataagtgtatcttttctgagatctgttggaaagtgtgtattttttaatttctgaagttttaaaactgacagagttaatggcagaggaatgactccaatgttttgtccmttttagyccttatttatttttttttaatagattctgccctttgtaactgacactatttaagagtaaaataatagaggacttcagtattttgttctctgcctggcttatagctcatttttacaatgcttttttttctgtttgtttttccctctaggatacgacattgctgtgtgattcctctttcccttgaattgcctctgagtttyagtactttattttacttaaaaaacatcatggctctatattaggtctctttattcatgtaaggtgatgaaaaaaactttttatagttgaaacagtaagtatatttgaatatgataaaatagggaatctagtgtaatataatctattgtatttgaggttagctcagtattacaaacaactagaaggaccatttataatgcagtgcttacaaaggaacacactttttcattttactttttgggacactcaccgagcacattttactacaattgattgaaatacaggcacaaaggaaatgagaggttgatcagaatatttaattacttttaacttaatttgatacttttgcccattgtaggcataaaaaaagattttcattttagactattgtgtgggatttaatgttcttaaatgctctttaaaatttagagaaaattgtgctcaatggagatttcaccatccttgagggatctttaatttgtttgttgatgtgccattaaaatagatataaacaacctacttaactgcttgtctgccattctggatatcttcgttctagatttgacaatgtgagtgcctgttgcttgtttttagttggcttatgttttggcagtatatctgggagaagaactaggactctgtatatgagaaccacccacccatcaccctaagtagttttcattttggcactggagaaccagaatttctttgttctgatgttttcaattttatatggaagctgacctattctcccaggcttctaagtcctttggaatgacctagaattggacatacagttaatgagaaatacccttatgtgttactacgctgttttgctttgatcataggatgtgcagccatattgtagatggaactytgggatgttctcatcacagacttactctgctttcacctttgcataacctttgtcatataatcacttttccctgtagragataatgacatagcagaggtcaagtcgacatggctggttcaatacagtcagatgaaccagtgttgtggatgaatgccggggttattttggaatcctttgtggccatgtatcttcttttcttggtggacacctcagacttccattsacattcatatacacaaatctatatgtaaatggaccacctttgtcaaaaacagtaagacattcattgtactctaatttcaatcatgmatttgcaatcttgtaggaaaaatattccctatggatatattatgtaacaacatttattcatattcaatatagactcagtgaccctttcatctctctgagagtaaaacttaagaaaaaacatctatgtcamgaatgctgtttcatgtggtattcagaggagccgggctctttgtatgaaaaatgtttasactgcaaattaacacagaagagttaacacagcttgcaagtctttttttccccggaagtcaatatttctgtgaaacactgagagtaaggattacacagaatcctcccgaagacacagttaaggcagatgggatacacatctgcttttttattctggaataaaaacatttattcttataaactrtgtccggtggctctgggaaattaaatgaggcacgtaggaaacagttgcgttgatatcttcagtagtaggtgactcttaggacatttttataggaaraaattgggcctttgggtctggaattttttttttttttttttttgaactggtaatagaatttattcaaatgtgccttaatataggcgctggggcttgcccatggkgctctcgatatataaggcccggacattctgccagtttttcttgagcaatgacaccaagaagttgacagccaggtgaatgttatacacaagctcatcgkctgtcatcttcacgtgaccaacagctacagccagacataacaccttcttcatttggaacttgattgkggacttcacctcacccactttggccaccatgttttcgttgtgtgtgagcagggaagggaactttcctgccttatttagacctgggccgaggattcgtggaatctgcttgatcagagactctgaggccaaaaacgcatcayacttcttggccagcttcttgaccagttttttattctttttgagttttttcagcgcctcgatgtccatgtrggggatatccacggccttagcctcgtcacartgctgctggtcccccaggacacacacacacaacttagggcggggagtggacttaagtctgacggtgcccragaagcacttgtccttctgggggtcatagttcttcaagctgatctgcaactccaccgtctccaggaacttgckgcgcttgcgctggttcyggtgcaggacttcccgcaccgcctygtacagggtgtygcgagagactgctgctcatggcttctcacgccgcgctaaccggaaaagagcgggtctggtaatatttttrtctttttytgcttcgggctggaaatgaggtaggctcagtagaagttctgagaagagacagagtttatggaaactccctgatgaaaatacctgtcactcattcagctctctgcctagcaaccaacttgacttaagattcctcctgctgagtgagacgtaagcatcattggctagttaatactattggttttgaaatctccactcttaccttgtcaaaatcgagagactcarattttcctgtatgatgggagtcactgtattcttcctttctaaacccatttcattattacactattcagactacttaaatgtgatattcctgatgctcaggtttgtcaggccatgggtgtctgtgtgtgtgtgtgtgttggttaaaatgtcattagagatgacctctttgaggaggagaatgcagcaatgtacagcatatactgctgggcttctctgtgtcttacataactgatattccartttctcgctgtgctataacatgactaaaagtcctcctaagcttttcactgaaaaacgacttcccctccataaaccatagtgggcttggtgctgtaacacttggtagaatatatgtgtgcataacaccatgtcctccctcttgttattcacatgataaccataggcagatttacacttattgtctattctgaagagtgaaactacatattttcataagcatgctccatttttaattgtgtaattaagttgctgacataagcaagtatgcaatttcacattaaggtgaggatccgtaaaggcattcatttgcataatttaattttctgcacagaagatattgaaaatcaatagcatgattcatagccataccatatcattgccacaccrcctttggttgtctgtctgagcttagaagagtacaaagagtattaaaattgattgaattttggtgtgctgactctgtatctttacttgggaaccacagactgtttctatttgcaaatcactgctccttgccaataaaatattaagttgcttaatatactctatatatactttttgactgctgttcaaataatagttttaaaagttggtttttaaaaaaaatcacagcatcgtcgattaaaatgcatttgaggagaggacttaaagtgttgtcttattttaaattatgtgagtgccagtaataatgataattagtcctcagacgcttttgttgtgcgaacatcatagagtgtacttaacaaacttagatggaatagccagcccactgcacacctagaccatatggtgtagcctaatgctgctaggctacaaacctgtacaatgtgttaccgtcctggatactgtaggtaattgtagcacagtggtaagtatctgtgtatctaaacatatccgaacacataaaaggtacagtaaaaaatactttattataatctcatgggaccagcatcatatatgcagtttttcattgactgaaattttatcatgtggcacattacttgattatgctcttacagataggggagggggagaggtcacacattactgacagagatggaacaaaagggaaaactaaatatagtcacctttaatgagtagtttatctagttaaaaaataaaatgtggtgctgaggttaaaagtcctgccctgttcatttctgaacaattgccttcctaaagaattgcttattggttactcagggccattttctttttgcttcatgtattaaatgcttgctgtttgtgataggtgggcagtggctagagagtcagtgaggttctgggtggtggttttgcctgtggcttatgtaaacaggtacataacatgcatagatacacacacattttcttaccatcactaccctctagaacacagaaaccatcagctttttgatctttcatgtgttcattcattccctcactttttttttttttttttttttgagacggagtcttgctctgttgccaggctggagtgcagtggcgtgatctcggctctctgcaagctccgcctcctgggttcaagcgattctcctgcctcagcctcccgagtagctgggactrcaggcgtgccaccatgcccagctcatttttgtatttttagtagagacgaggtttcaccatgttggccaggatggtctcgatctcttgacctcatgatccgcccaccttggcctcccaaagtgctgggattacaggcgtgagcctcgcacctggctgccattccctcactgttgatgaacacacaccatgcgctgatttccattgtgagtggtaggttgacagtagtagttcaggaatatgcctgtgccctatttccagggagcttagagcccttcatacgccatgcagcatgtactttagaagccagttttcctgcccatgctgaccttgctgtggaaaacccactttgtacctcaatactttgcgtagtgtgaggaagataagattaacctaccttcttgggatggccctgtcccttctgttacctcttgtcgtatgtagcagaaccgtaccttttacttctgtcttaagtgaattacctttagacaggcagtcctgttgctcaagtccaattccttataccacattgtgatgtatatgtgtgtctggggtgaagtccaaggcatagggttggttggttggttttaaagtagcccagggttaagagagctctagtacaacaatggccttttatggatggagaaatttatgaccaggatttcaagtgatggtttaaagcatacgatgggtgtcatttgaggatcttctttggtacaaaagacagaaaaatgtgctttagcaggtaaaactgatcccagtaaaaatagaccctcagagagggctagcttcaaatcagctttgtcgaaggtttaaatattttattttagttattttattaaaytttctttctttttcttttctttttttttttttttgagacagggtctcactctgttgcccaggctggagtggagtggcacaatcacggctcacttgagcctccctggctcacgctatcgtcccacctcagccagccaagtagctgggactacaggcgtgtgccaccacacactctaattttttttttttttttttttttttttttgagacagaatctcgctgtgtctcccaggctggagtgccgtggcgccatctcggctcactgcaagccccgcctcccaggttcacgccattctcctgcctcagctggggctacaggtgccgccacttcacccgtctaattttgtttttgtatttttagtagagacaggatttcaccgtgttagccaggatggcacacgcgctaatttttttattttttgtagagatagggtttcgccttgttacccaggctggcagagtttaaattttgtcaacagaattgattttttggtccccctggctttggttctaattttaaggtcctctgttaatcccttacttggtcctcaaccaccccccgaggcttccactttgtctaataccttcaggaaggaagaagaatctctctgactggccagtgtgcccatacctgaatgcatcactggggccacgagaatggttaaaagtgattgactggcttgaaccaaacaaggctcactcctagagctaacattggtggtggcgggttagctgtccaatgcgtgatacacagctagctggagtggggatatggttattacaaaacagatcctctacagcaaatttccactatgttgtcggacactaaaaagcactagggctgggtgcagtggctcacacctgccatcccaacactttgggaggaccaggtgagaagattgcatgagcccaggagtttaagatcagctacaaaaataaaaaatcagctgagcatagtggcatgcgctgatggtcccagctactcaagaggctaagttgggaggactgcttgaacccaggggttaaggttgcagtgaaccatgatcttgctactgcactccagcctgttcgacagagcaagaccctgtttcaaaaaaaaaacaaaaccaaaagcagtgtatgcccagtgctgagttaggtgctctgctcaccataacttgcgttatctttgtaacagtcttagaaggctggcatttttaggtccattttacagtcaaggaaattgaggctcaaccacataccctaatggaagccacatttattactaacatagcaagacagtgttttactcactgttttgatggaaagaggaaggattaatggggaataattatttgtagaatggtttggatggaaggcacctaaacctaccttgtacttgaaaaatgagtggaagcttaaattttgacatgaattttctttgaggaccaatgagcagacataaatgacatcaggtttactttttaggcttgtgttgagaatttataggattcttgtttccctctaaagggctcatctctgtggaatactattgttcaagcattacatcttttaatgctagtctttttaattgaagtgtaagcataaagtactctacaggtttcttaattttttttaatgactgtcacattgtctaaaaggctaataatatcttggcgatattattccattgactaatttggaatacagaatgcgttgtgttttcctggtcccatctttgtcttcaattgaatatacagcttcccaaaactttcttaaatttttttttttctctttgaaagcaggcttgcttttgtttaggtgcatttaaatgttatcatagtcagctggggtatattgtttgcgtgtaattccgtttcattttggattttgaggcacctgtgacatttgtcttcttatacatcagtgttttcaggtgtgggctcacaacaaaagaaatccgcatccatgaggtagctgggaagagagggctttgaacgctatagcaggcagatggaagctctccataatgggtgagagtagtatttttgctgttgcttggtggattgaaatgattttgagatttcaaatatacatcactaatcagtgtttcttttstgggcattgtgggccttggaggctttcttgtttcatatcttctggcaccacaggtgactgttagtggcccaaaggatgtggaagactggtactaatcacaaggagtctcctaggtttcagattgtcctgtgtttgggtggctggctttgatgcagggatkcttaagtctggttttctcatctactgcatacctactgggtgacctggggccagttactttgtgtctctgctccttagttcctccatctgtaaaagagatagaatgaccctggctctgtaaagatcaaatggagcccgagggtctttacacacaggttgtaaacttatacatgcagttggaaccgaagtctaccagttagttgtatgtatgaccttggtcaagttaaagttctttctgttgttgaagcttcagtttgcttatccataaaagggccccattattgggatcactgtttgtactgcttggtggtgttttgcaaatcaactaagataatgtatatgaagtgcttagtgtactgcacttcttggcacaaagtaaaggttccttgtcaacgattcctaatattaataataataatttgtctggactttcctatagttttttttttttttgtaaaataagttggttctagtcagtcatcctcaaggactatgattctacgaagtcacccaatggtgttcatttgacacccttcctgtatccagtggggtgctgcctttgtctcattgtgggtttycctctcttccagcgttgacagaaggctacgttggggccctgcacgagaatagacacggcagcgcagtgcagatccgcaggcgcaaggcttcaggcgacccrtactgggcctactctggtaagtccagttgttctaatggagatcacacaggccagttaacatcccattcaactcacttgaaagcacactttgaatcacttttatgcctgagttctgtttgctcaaatctttcgtagttcactaaaagttgaaatattcgagcctgtttttcctcaaggttataagcaccttaatttatctctaccacctgtttcctcaacctgttttcccctcaatttgcgtttatttctgaactttactgttaatgagttattgtaccaaacttgtaattttctgaaagacgtagtcttgtcttttctgttttttcaggggctgtgatttcagagagcagaaaatatatggctagtcttgagctgctaaatgtctgctaaacattacaaacatcacatatcagaatgctctattaggctctaagccaagaaatgcaactttatttttaaatcacatcttgttctttgaatatattttagctgtctactcgatggtaatctgcagtccttttcatttttatttttacttttacccttttgagctaatgaagggagagagcattgttctaactatgttgaatgttacattgcaaataattttcttacattttaaggggacaaaaatgaagaccgaaaactagggatagacttttctggattaggcttcccaaaactcccaaaatatgagaggtggattgttatttctagaagagatttttgatgctcaaaaatatatggaaaatgtattaaagctaattaaggaatgcttgagtaagatagaccactttggaaattactttggcactgaataattcaaactccttctatgaaagagcttggaggcatggagtattagtcttaataataaatctatgtattatgcaatgttgttgcatatagaactgaaagtattcttttcataatgatgctcgggtttaaatcctgaatttctcccagcaaatcctgttaaatttatgccagtgtaaaatttataggtctgatctttaattataccttatctattggctttttgcatccttttgtctattgataaatctgctgcccctgcagggagaatatcctatctgttttgttttgcagtgaacagatagtgattctgaagttttccatcacacccagtaccttgtgattagaattatctaattagaggctttttgtcaccatttctgataaatgaaggaaattggcagatgaaagccaaaattacatatatatagcatcttgccaagaaacccaaagaaaatttatcattttgtactctgtggctctgacatcagtcaggaggaggcacaaagtggcttgctatttacagttcatcagtttagaataataatgctgttagtcaggaaattggaagttatatcccattagcatgtccaattgcaaatggcagtgaagagatgaaagcccttaaacttttcccattatgtagttaagaatgaccataagtggtgccatctttgtgatggagtgattgttgatgtctttaactttggtagagttcagaagtctccattttgtatttctggaatgcattgtgtctgaatttgggtattgcctccagtagtagaaggactaatggttcaaattcaagagttggcacactttttctgaaaagatccaggtaacaaacatcaaaagccatgtcgtctttgttgcaactgcccaactctgccattgtagcttaaaagtacccactgacaattctggacagactggctgtgctctgataaaaatttacttatgaatactggaatttgaattttataattttcatgtgtcaggaaatattcttcttttgatttttttctcattcattaaaaaatatacaaaccattcttgctttgcaggctgtgcaaaaacaggtggctggttggatagggtccacaggttatatagtttgtgaacccttgttccagttgatttttttcctagaaatcagataggagagtcatttgaggaattgcttggaaggatgtggactggtttggaagactgaatgaagtcatttgttaggcataatggaaaaaataagagtaaaagaagaatagaatgggacagatatcaactgatggtataaagttcttatgcttgcaacagttcttcctgacaattcgacagtatctatggttggctcatgctgacgtggtgcagtattggttctcatgtcaagaaggcttggagttcatcacagacattccttagcatttggccaatgtgtaaacaaggccaggaagaagtaagagttggggcctgttactttgggtacatcagaccagcaccttaaaaccacagcaaatgagatgtgggactattagctgcaggcatagtcctctggatataaatgcttgaaaagtgggactgacaaaaaaaggctcattttttatgagggaagtgtttctaaatttagcaaaatgaagcaggcagttcctcaaagattgctttaatagtctagattttaatctgaggcctcaaattctctgatttgtcttatttcctcctaagataatgccatgggtgctttaggggtgcagtgtgtgagagtatgaattttgaagtcatatagacaaaccatagttcaaagcgaagttttgttaatatcttgatgatgttggaaaagtgtgacatgggaatgattaatattaatagcacttcccacataggattgttacagggattcagtgagatgatatttgtgaaaacattaacataggccgggcgcagtggctcacgcctgtaatcccagcactttgggaggccgaggtgggcggatcgcgaggtcaggagatcgagaccatcctggctaacacggtgaaatcccgtctctactaaaaatacaaaaaaaaattagccaggcgtagcggtgggcgcctgtagtcccagctgctggggaggctaaggcagcagaatggcatgaacccgggaggcggagcttgcagtgagccgagattgcgcccactgcactccagcctgggtgacatagcatgcctctgtctcagaaaaaaaaaaagaaaacgttaacatagtctctggcgtaaagtaagtagttaatattacttcttgcttatttttgagactgttattattacttttgctgcaattaatgttggttttggaatgcacaagtgtcgcgattgacagtgggtgatgactggatagttctgagagctgaacaagttagattctctcagccataattctcaaggggtgcttagttgggatttgggcatgagggttaagcagactatcctcaagttcagtggttggcaaactacaaactgcagctgtgttttgtaaaataaattctgctggaacacaagcacacccatcacattgcatattatctatggctgcttttgtgctacagttgcagaactgagtggttgtgacagagacctagaatgttactattccagtaatgttgaatatctagtaatattgaatattaaatatctagtaatggtgaaaagcctagaatattactgtatctggcctcttatagaaaaagtttgctggccgggtgcggtggctcatgcctctgatcccagcactttgggaggccgaggcgggcagatcacgaggtcaggagttcgagacctgccaacatggtgaaaccccatttctactaaaaatacaaaaattagctgggtgtggtggcgggcacctataatcccagctactcgggaggctgagggaagagaattgtttgaacctgggaggtggaggttgcagtragctgaaatcgtgccactgtatattccagcctgggtgatagagcaagactgtctcaaaaaaaaaaaaaaaaraaaaaaaaaaaaaagaaaatatttgccaactcctgcttatagtaatatagcctgggtttttagcagatgttagtctggtataacttttcacttctcattttaagactagcctactttatttccacttcactgcatcaccttggaaaatgcagacaccttatttatttttgaaatgttaaactttacctttataggcctatcaaacaatgcctttgtgaatacctgtaattttagcatagagaactatttattgaggaacctggagatatgtattagagttctcttgtggtcactggaagatttgttgtttctctggatcttaaatttcatctgctagtaaaaaagggggacataatatctgattttgacatgaaaacatcatagaaggtatgaaatggaacataaatataagttattgttgacataataatagcaatgtaatttgatgattgatttatatctttggatttctttttccttgtaccaacatagtaggcaaaaatgggaatgagttaagtttcatatagaattgtactgaaaaaatgcagtagtttaatagtatctcattggaaataataaaacaatttcttttctattaattttactcagttaaagtatatttctgtctttcttgaggtgatggtagctcatgaattttggagtttgcccagaacttctataattattgcacaaagagtaacacatgctaggcaggtcatcaatgcaggaaagagaaatgaaaaataaatcataaatctagagtaacttcaagtagaaatttgagggttttttttttttttttggagattggatcttgctctttcacccaggctggagtgcagtgcctcgatctcagctcactgcaaccccccaaccccctgcttcctgagttcaagcaattctcaygcttcagcctctcaagtagctgggattataggtgtgcacaatcacactcccagctaatttgtgtatttttagtagagatggggtttcaccatgttggccaggctggtcttgaactcctgacctcaggtgatcggcctgtctcggcctcccaaagtgctgggattacaagtgtgagccaccacacccggccagaggcatttttatatataaagttattttctctcttgccactcaaagactagagaaaaacaggtggtmgtttcttcccttcctctgcttttttttgttttaacttaattctgtttcatttttcacaattttaataatctctatctcattttcccctgtgtagaaatagcttctaagaatcagtacaaggagaccatttctcattgttagagaaayccagaattgaaataggcagtgaccaaaattccccgtaagacatttctggcattgggctgggtgaaggtcaagcaggattattctaagaggcattcctgccatagccaggggccatccatggtcctctccaactgtcctgggatttgaggaattgctcagctgtaaaatggagatggctttgaggattaaaggtaatatatattggcacctgtagtatgtactttttggcctccaccctggagtagagtaggtattacctrtgtggctcttcattatatgccacctcactacactgttcatataaacatcttgttttataacatgcatgtgtgtgtctgggcrtgtgtctcatttccccggctaagtgtagaatccttgaagacaaggattattgcttataattccttgtttctcctgcagcgtgccagtgtgtcttgttttgtggagatttggtgcatgtttttcaagtggacaagtggatacacggataaattaactcaagccagagtctgtccttgggaatttactaaggggagtcctgccatgaaattcagataaattagtgggtgatttgcaaaaggtttcactgttggatccctttaaataacaagctcccctggtgaacttaagatataattaaattcctaaaattacattttcatgtctatttttaagaatgtctgtacaggataaagcaaaatatacgtgcctgcagaattcagcttttgtcattagaagaatggaaggcactgtaggacctcaaatttaatgttaatattgttgtgttatttgcctctctcctaaagcctcctccaaaatctcttaagggaatcatttccttagagacattctcttcctaatagagacctccttcttcttcttctttttttttttcttttgagatggagtcttaccctgttgcccagatctcagctcactgcaacctcygcctgtcgccctgatctcagctcactgcaacctccgcctcctgggttcaagctattctcctgcctgcacctcctgagtgtctgggattacaggcatgtgccaccacgcccgactaatttttgtatttttagtagagttggggtttcgccctgttagcaaggctggtctcgaactcctgacctcaagtgatctgcctgtcttggcctcccaaagtgctggggttacaggcatgagccactgcgcccagccctaatagagaccttctgatcggaaggaaccacaccactgaggaggaatcagccttgagagtcttcctccrtgtctcagctcaaaggctccctgtgccttggtgcttagcctgacccatttctgcctaaactcctcagtctcccctttatttatttttaaaattaatgtttatcttttctacatatccctattaatcttacagttttaaagtagaakttctttacttatttgtttaccacacttactaattgtctactgtgtgccaggtgttgtgctaaatgtgaagggccagagaagctgcccataaaattgctgttgccagattccagtcttcaaagacaggcaggtgtttgccaggacacacataggccttgagcctggagggctctggcagtgattagagaaccagaagcagctcagaagctctagagcatgtggtcgggtggagaaagttaagggcttaatgaagaggattggagttagactatggacagccttatgatattattctactagtgacatagaacttctttctaaggatgatagggagtaattaaagagcttcacctggaattggactacagttggttttatgtttaagaccactggttgtagggttaaggactgggcagtgggaggaagagggcaggatgaaaaatgatggggctgtatcactggggatttgagaatgaaaagaaaagagctcatgggaattcattatcgtttgtacaaggaggagaaggcaaaatgaattgttgtccccaagatgattgaagatggcattgcatttgttttgaaataagtaaatgaggagtggtgggttggttgaaaagatgaagaattttgactagaacctattaagatgtgttatagtgttttgtctgcatttcttatgccstttagagttcatgctctttgaacagaacctttgtctgtaattagtcattgtatttccctgttgctacctaaatgtttttggataggagggcttcaagatagagaacaaattgtagaataaactgtttcttcctacagatactatttttcttttatagttcatgtgtggttccaagggtagatggtgtaagaaaaaacacatatggtcacacactaatcagaactttatgtacaaaggagaaaaatgtgttgccatatgcttaaggtacctggagaatttttcaatacttggccaagtttgggaattgcctctccagtgtttgaaagacgttgttctctctacttagagttcttttcttattttttttaaactttcatccttggcacctgagttctaaagtttcttggcattttctctgtggaggtggtttcacaagtgattgtaaagttaatggatgctaatgcattaatatattatcagaggacatgaatacattccttaggggccttgtgrccattggaaaagtctagcagtaagatgaaatactgtttagtgctgtgttgttatcaagtggtacatatcagtggtaacaagatttcaattgttgctgtgatggggtatttaaaacatgggtaaatggaatactgagagtttgggttttaaagtgactctgaaggtagtggggtgatggatcctttttggaggagrgctttttggcaatatctgtgaaaatgttaaatactgctcatctttcatccagcacttctgcttctcagaatttctctttctgaaacacgtgtgcatgtctccaaagtagcattgtgtttaacagcctaagtgaccaaaatagggacttgggtaaytataatacatgcttacaatgaaatgcttacctgaacatccaccaaaatggaggaggttgaactacaggatgtattaaaataatatgggtaatatggtcccattaatgaataaagctgaagaatccagagactacacccaaaagttaattgcggttatcattgagaaatgagggatactaccttttaatacttayatttctataatattttaatattttatagaagcatatctagaatatttcaatttcttctaccagtagattcataattttttttaatgacctttttattttagagtagatggctaaatggtatcaaattcaggcagttttctttgtaacaattttgagggggagaaamagaaaaaaacctaaaagggaagccagaaggaaagcaaaaacctttttgtctctttaattggctgtatctaaattttttaggtgaaacattgtcagtggcatttcawttttttataaaatgctgatatgaaccttgcagaaattaatgaactgatattgacttagtttgaaatgaacatcaagatttattgagcaaagcagtaaatattgacccagccaaagataaggtcaatatttactttgacatagcataaatcctaatattcattaatgtataaatttattgtgtcaacacaaggcmtacagaagttgtatataaatatttttttcatatctgcgatgaatcagagtcaaacatcttttttcttggttataaatttaaaaggacaatgttctcttctttgaaactaccttctttggggagaggggtgtgcgcgtgggtggaaggacatgattaatttaaaggttcaaaggaaaaatatacctagctgaatacatgtgttataattagagcacagtgatttgcatgtgctctgtgatttacttaagggctaccagttttcctttctaacctaacaaaacgttctctttcattacatctgatttgattcataaagcccacccacttcttttttctttctttttttccattttttgagacaaggtctcactctgtcacccaggctgaagtgcctggtactgactataggcgcacaccaccacacctggctaatttttgtagagttgagatttcaccttgttggccaggccgatctcaaactcctgggctcaagcccagtattcccgatttagcctctcaaagtgctgggattacaggcatgagtcagggtacccacctaaaacccaccttctgatgatataaaacggggactttctgtctttccctctggatattgttaaactacttacgtagaattttgtttggtaaataacatattgttggtgtatatcatactttataatactttattggctgaaatttcccatgttgaaattatcttagtttattattattatttttgagccagagtttcactgtgttgcccaggctggagtgaagtggcacaatcttagttcactgcaacctctgcctcctgggttcaaacaattctcttgtctcagcctcctgagtagctgggactacaggcgtgcaccaccacgtctagctaatttttgtatattttagtagagacggggtttcaccatattggccaggctggtctcgaactcccgacctcaggtgatccgcccacctcagcctcccaaagtgccaccacgctcggcttcatgttgaaattatcaatttgagttgaactctcattctttatcttgtgccttctcttggtggggtggtcttggtagcagtaagaagaacgtaaggaggacccatttcactggattgtgaacttttagaattgccaatatgtagttggaataagtgtctaatatatgcttaaagactgaattttctcgctgttcatttaagcgaagaaagtaactcagtcacaagcttaagtataatcttgtccctatgcaatagtcttatatgatcctgttgtgctcagtccacctggcatgttctttgagtgtaaagtggtggtgttagtttcagtgtttggctgatcttgaaatgaccatcacttctctctctcagctggtaatctcctatgaccctgtttgagatcagctacctkaagggtggttatcttcttggttgtctttcttgctattaaaacttaactgtcctatgtttcgtttactttaaggcccattttctgttatgtaactgataacttgtgtaggttaaaaacttatcagtggtgtgtatataacatagaactttgccttcttgagaaatgctttctaataacttcaggaattctcacttttcattcatgtcactatagtatataataatgttttccactgcgtgtagtggctcacacctgtaatctcaacactttggaaggctgaggtgggaggatcacttgagccgaggagttcgagaccagcttgggaaacaaagtgaggacctgtctctacaaaaaaattaaaaaattagctgggcatggtagctcacgcctgtaagtcccagctactcrgaaggctgaggtgggaggatcgcctgaacccagtcaaggctggagtgaaccctgatcacaccactgcattcccagcctgcgtggcagagtgagaccctgtctcaaaaataataataataagaatactaacaatgtattccttgagtgtagtattcattggsatttttatgtcatgtgaaaaatgactctrtgactctcctgtgatacaaatatttgactttcacataataaagtcatttcttcttgaggttttttttttttaaatcaaggagaaagtgagttttgtactaataggtctttaacatctctctgtcacttgctcatacctctttttatcaagaagagataggactgacctcagtctgctgggagagtatcttagaatttgatctcgtggatttcattataccctggtacccttcatgtctggcaagccatgttagttttccgttttgatgtgttacatttcctattaagtcatatttgagattttataaaaagtgggccagtttaaagaaaaattttatctaagcagtagtacagctggctttccaatatggcaaaataagtctttctgtaggagatatcaccattttggcaggattgaaaagcctcttgttttgtgccatataatcaaactatatctgtgatttgaaaaatgacaaagggtataataattcctagaattggttttaaaatgaaggaaaatagtatcctagttcaaaagttatggctcattgtaagtgctggtctggtataaccatacagattgtttaaaatctttaaataaatacttggcccaatcccttttgttccccctttctcgctgccctggaaactccttctcttatyttgggaccttttaaaaatcctaccttagacctgtaaacccactctgtaccatctgctgtgactgattattatctctgatttgttaaatgatttaagtttcatttctgcttatcatgacttggagggaatttcagagtgataggcctgacttggtagggttttgggatatgtattatactctgcaacccattcctttgtttttttacattttattttaagttcargggtacttgtacaggatgtgcaggtttgttacaaaggkaaagtgcgcctggtgatttgctgcacctatcaacccatcacctgggtattaagcccagcatgcattagctattcttcctgatgctctccctcrcccctccctgctctccaggccccagtgtgtgttgttcttttccctgtgtccatgtgttcagctccctctttaagtaagaacatgcagtgtttggttttctgttcctgcattagtttgctgaggatgatggcttccagcttcattcacatccctgcaaaggatgtgaatgaaggatctcattcctttgtatggctgcatagtactccatgatgtatttgtaccacattttctttagtctatcattgataggcatttgggtttattccatgtctttgctattgtgcacagtgctgcgatgaacataggcatgcatgtatctttgtaacagaatgatttatattcctttgggtgtatacccattaatgggattgctgggtctaatggtatttctgattctaggtctttgaggaatcgccacaccatcttccacaatgattgaactaatttaaattcccaccaacagtgtaaaagcatttctgtttctctgcagcctctccagtatctgttgtttcttgactttctaatcatcatcattctggtcaggcatggtggctcacgcctgtaatcccagcagtttgggaggttgaggtgggcagatcacttgaagtcaggagttcaaaacaagcctggccaacatggtgaaacttcatctctactaaaaatacaaaaaaattagccagrcgtggtggtggacacctgtaacccagctacttgggaggctgaagcaggagaatcgcttgaaccctggaggtggaggttgcagtgagctgagattgtgccattgcactccagcctgggcaacagagtgagactccgcctcaaaacaaagaaacaaacaaacaaacaaacaaaccgtcatcctgactggcatggcgtggtatctcactgtagttttgatttctgcaacccatttcttgaattgagttgatcttgagagtttccttggacwcgggaagccacttaatccagatttcctatttctgttgatccacattcytccagcttgaaagcctttttctgggggaggaaaacaaccttcttcttaaagctgcatgaaattttgctgctcccaaaggcatcatttagtagctctgccccaattattgttggccacttttcctcctggaaactgtttttctctgtcccacccttccccctagttccaaatgttaggctgatgttcttctttttagcagagtgtgcatgccattagtacactgagtattgattggtcattgagagattttagcaggaaaatgaaatatgaagctcttcttggctgttggactagcacctgcaaagatgagcgaaggcatttttagtgtgtttctggctctggggctcactgtgataatgggaggtattttcttctcgctgttgataagtacatggtccacactctcctcttggggagtgattttgacactttttgatggtcctatggcttttacattcttataccatttcctaatgagttatcttttctctcaccatctactagggtgtgaaaagggagtttcaacactcaaggccaattgagctgcatacctgctgtgccagaaagaackagttaagatttgcttctggctgggcatggcggctcatgcactttgggaggctgaggcgggtggatcacctgaggtcaatagttcgagaccagcctggccaacgtggtgaaacccgtctctactaaaaatacaaaaagtagccgggtgtagtggtgggtgcctgtaatcccagctacttgggaggctgaggcaggagagacgcttgaacccaggaggtggaggttgaagtgagccgagatcatgcccctgtactycagcctgggcagcagaacaacactgttgcttctctttgacgtatgagtacaccatagctagcaatattastaggatttttctcctaaattcccayggaagtcatttccrggagtatgaatgagtataaggatttgtttttggatcagttttagcctctagaaaagacccccttactctcctggcctaagcgtaagggcagtttatcgccttacatagcacacctagggtaggacacctctgggcagcacctttgtaccctgccatctttaaggtacaccccatgttgtttaggctttgccatccttagtgggtaggcttggtccttagaatcactttccctgtgttcttaacatggcttccagaattctagatgtcaaayactgagtacaaagttcagaggagaaagggaacgtgtccctttcttatgtctctgttgaagagcatgtaacatgttcttcaaagcatcccacccctggtgaatcagccttcatattttgttgtccagacttggatcgtgttctcatgcttaaaccaattattggcaacaggaatgggattagcactgctgccttagactgatcaggatctaccccgaagtagaggtcctggaaatatagcccgtgtggctgctacctatacctacccttgtcatcattttcaggtgtttttttttttgagacggagtctcaccctgttgcccaggctggagtgcagtggcatgatcttggctcactgcaacctccacctcctgggttcaagtgtctctcctgcctcagcctcccaagtagctgggattacaggcrcgcaccactacacccggctaatttttgtatttttagtagagacgggtttcactgtctgccactacagcacctcccagtttcaagcaattctcttgcctcagcctcccaggtagctgggattacagactcctgctgccacgcctggctaattttttttttttctccttcgttagagatggggtttcactgtgttggccgggctgctcttgaactcctgacctcaggtgatctgcctgcctcggcctcccaaagtgctgggattacaggcttgagccactgtacccagcccattttcaggttttaaaggctaacaaccccatggcacttaataaaggaaaatgttctaggaaagaaatgtgtttacttttgaagtgaaaatttgatttcaaaagcctgacatcactgcaaataaaataataaagctccatgaatttggagtcctttatggtattcctagcttccctgtactcttctatagttactagttacatttggctatttaaatttaaattaattaaaatgaaataaaatttaagattcagtttctcagtcacactagccaaatttcaagttgtcaggagccacacatagctactgactacccttttgtattgcacagatatgaaacatttccatccttgtaggaagctctrtgtgacagtggtgttcagaggatataggcattatagaggaaccagcaggtaacatattattgagtactgaagatgtgggtataagacctttctgaaaagcttgyatagtgccccagttgtacaagcttctaaaattcaggtagacctccctgttccttttggaggtcttgagaagttgacctagggtatattttctgagccttgtttttaccaaggttctgaatctttggagaaatacagtgagtggagcgtagaartgaggaggcatgagggcatcctcataccagtcttcattcattgagtcattcagtaaaagtgtttatcaagcacaagccaggtggcaaactcagttcgagattagggctaactacaacagagaacaaaacatacacagttctattcctacctggtggaggtggacagagcagcatatacaaagtaacatgtagtatcatcacatcattctgtgaaataaagtgtaaagtgaggtggtgcctagagagggatttaggggagagagttgttattttagcctgggaagacctctctgatcaggtgatacttgarcagacatctgaacacagagggactgagccttgtggstatgtgaggtaagcattgcaggtagagggaagcgggggagataatagcacttggaaaggttcaatgttataccttaaactactctgtgaattttaattaggcctccttctagaaccttctggccctgtattcttgcttaggataaattttgcattgttctagagaagtagttctcaagtggggactctttcctttttgtggaatatctgacacagtctgcagacattttttggttgtgacaattggagatggttgggtggccaactggcatttagtgggtagaggaacaagatgctgttgaacatcctacaatgtacagaacagcccccacaataaagaattatctggacccaaatgccaatagtgccaagattgacgaaccctaaactgaaggctcaccrgaatccatcgtttttacacagttggtctccatgctgctgtgaggttctacctttctagccagtccttaattgaatgagtacgtggcacaaacacagcaaggtgtgttgtgcacagtggctaaggtattagagaataaagtgagtgtcatggtgttcaatcatctttggagattaaagagtagaaatggaaagcttggcaagttgacsatttcagaaatctgtgcatgaaatcataaaggaatgaatcacacttctggtcgtggtgaaaagcctacctcgtaatgtcacatggaggtgatgaatgttgattgtgctgcagtaaagaggtggtgagattgcttttattattattgttttatttttgaggtctcttgtgactatgccatttgtcaactctttgatctaagaggccgtaggaaataatattcatcttagtattgctaaccatgaaggaccctaaaggatcagctggccaagcccctacagcaccctgagaaaatttatagttacccagttgtgaaccttgacatgtcacttcagggctggcagggaatagcagtttcttaaatgatcacttttcactaaaggagtggaaaggaaaccagagctgtgaatggtgattgacaggctaccgtgatccagctttttgtcaagtgtcagcaccttaatatttgataagggttacataaatgtagtagtaatggccacagatatcttccagaatagatttctcacttttttgtataaattaagcaaagctaccttgtgatggggtataaatgcatgtatatttatctacacgtgttatggtggcctgaattttccacagagcagatggctgtttgtactcatttgttcccaaaccctcttgtagatatttgagtataaagatagattcatgtggtcaccgcttctatggagctcaaaggctctctttctcttttctctattgaaacccaatttttattagcattgaaggccactgacgttgtaggttaaacataaaaacgtctaatatatctatctcaatactcctattgcaggtctacgaggagtttgaaaaggtgtaagattatttatacatcagagtggctcagaaatactttttctttaaattggaatgataatatcataccaaaagtattgatatatccatttaaattgtgagctgtgaatgttattccatcttccttcattcctatacagtttcgagctcaaattggagaaggtcatgtgaaaaccacttttctccccaaagaaatgttggcattattttaacatctttttcctaccctggattctttctcacatcccagactaattccaaaagagtttcttcagtcactgctgttgacaagagactttatttttggagataattttttcttgttaagttttctttcttagattttgattctaacatctctaattgataatcacattttccagatttctatctatatattaaaggagtagatctggaatttcagctctctttagtagactgcattatagaaaggaaactttgttcgtatcacacatgtattatttaacaccattattaatgttaaaaaaattttttttttttttcgtttaagacagtctcaccctgttgcccagattggagtgtggtgtcataatctctggtcactgcaacctccatctcctgagtttaagcaattctcctgtctcagcctccctagtagctgggattgcaggcatttgccaccatacccagctaatgtttattgtatttttagtagagatggtttttcaccatgttggccaggctggtctcaaactcctgatctcaaatgatctgcacaccttggcctcccaaagtgctgggattacaggcatgagccatcgcgcccagcccagccattgattattaaacatgttacttagaaagtagaattaggacaggagcactggctcaggcctgtaataccagcactttgggaggccgaggcaggcagatgacttgaggtcaggagttcgagaccatcccggccaacatggtgaaaccccatctctactaaaaatacaacaattagctgggcgtggtggtgcacgcctgtagtcccagctacttgagaggctgaggcaggagaattccttgaacctgagagacagaggttgcagtgagccgagattgcaccactgcactctagccttgtgacagcaagattccatctcaaaaaaaaaaaaaaaaagaaagtagaattatcaaactccatttttttaactaattttttatgttaaaaaaggcataccattttcttttactctcattttgtttttgcttattctagtacatgatgatttccttgtagtaaatagttttttctaattttccccatgtagacaaatccaaaatgcatacatgctcatttaaataatttgtccactggtaacctcagctgagcgctgcccttggcagaatatgttttacaggatattaaatgtgtttaaaatattctttcatattamttggttggcatttagatgtcttaagttgttttaataaattagggaaagctagaatataaaaggtagaaaatatatacattttcagtgttccaagacactttggtggactatagaatgctttaaatgcaagttaagatgaatrttttatatttggctgggcataatggctcatgcctataatctcagcactttgggaagccgaggtgggaggatcgcttgagcccaggagttcaagaccagcctaagcaacatagtgggatcccgtttgtaccaaaggaaaaaaaaaatagctggatatggtggcacacgcctgtagttccaactactgtggaggcttacataggaggattgcttgagcctgggaggttgaggctacagtgagctgtgattgcaccagtgcactccagcctgggtgacagaaagcaagaccctgtctcaaaaaaaaaaaaaaaaaaaaaatcttggtatttaattttgatctctcactacggaacagaatagatttatgcattgggaggataggaaatataataattagagatatattaattgattttaratttttrtctgtaaaatactagtcataaatgcagttactaraatccatgtttatggtctttgaatttgatcaagacagagagttattcatcaaaaagccactagacccaccatttatcacaactaatcgtgaacttawatctctgtaactcacaggtatgatgtatgtcttttttttggtagggatatttactacaggaattaatttcagacattgggagacttttatagccatttaactgttagctacctagagatttaaataattttcctggtttctctgtgttagcctctgggagtagagtttctctgcacaaaaagaatgtcatcagtacagaattgttggagtctctctttgccagcctcagtactgagtctgtgtaggaagtccccggcaagtagctaagtatgggttgttgctcgsagagcattttctcaaaatctgtgtctggaacattagttgaggaggctgttcacaggctttttatggcaggagggttctgtgaccatggaagattgggaaaggccaaagtaaagattgtcatacaggtttctttgctgcaagacttctcagatcctttaatagtccactcttaatagaattggaaacttgtccttcactgtgcacttagacgtccgattagaaagtgagggaaagaggaaaatagttgtgtgggggagggtgtgtttgcccagggaagaggggtatgggggaggagaaaggttgattctcctgagttggctcagtgtctactatcataatgatttccccacagctttatgagggctgtgctgctgttgtgaggtgtggtcacagggaaatttcagtctgaaagatgagttccacatgattcacacacctcctatgaagtagtaaaaggaaaaactatgccaatttacattagaagtattttcctttcttctttatttcttggaaatggagcatttgtgtatgaaagagttccttgggggataaaatgccatttagtttaatgtgatgacaatatgtatttaagtcaccatatgaaaatatttactagaaacaatgacatttgaatttatggacgtgaattttgcgtaataccttccttaagagggtgatgatatatgggagtgtgggatggttttctttcactgaatttgggattaatagaattgtcacccacaaatgtttgttttttttgtttttgtttccatatagggttttactctgtcgcccaggctggagtgcagtatactttggcccagtcatagcccactaaagccttgacctcctgggctcgtgattgttccacctcagcttcctgagtagctgagactacaggtgtgtgccaccacgcctggctaatttgttctttttcatagagatggagtctcactgtgttgcccaggctggcctcgaattcctggccttaagcgatcctcccagcttagccttgcaaagtggtgggattataaatgtgtgacaccacacttagatgcccactaatggtttggtgaaaggattaaaccccccaagaactgaattttcagtaataaggaattgaagattttagtcaagccagagcacacatgattgaacttcagcagtgagggtaccaaagaatattacatttggaaattaaattttaagagagaagaggaaaaaaactgggcgtagagagtatggggagagaataaaatatggtgaatatggtgatgtgattcttgaactgtccttttgtttttttctgactgtaaagagtagcacattccccaattagacaatcagaagtgttttcagatgttcccacctatcccctggggagtcaggggcagactcctttttggtagagaaccctctgctgtagaacgtgcaagaaataataataaatagtaatagtatggaagagtatagaattattacatggtaaaggtggctgtgatttttgacctgataagcttatttagccaattccagaagtttccttattgcaaagtgggcggattttaagtgttccttaccaattgttaaatgtggtgagatggattttatttcccttggattcgtgctatatctgccatggaaagcmtgggtggtgttgattgtagctcagattgaaaatgacagccaggagttgcttagttaatggggtatatgttggtcctcaatttgtgcaattcattgtttaatgtgaatgaataatttagggatgaatgattgggttcatttttagacactggctaccttaacaggatgatagttgacagagcttcatgttatatttcctcacgtgaagagctaaagttgttgcccaggttaagtcaaaacattagacaaggtcataatgttaattatttgaatatgttaaactgctgaatatacatacgttggtgcaaaagtaattgcaatcttttgcaccaacttaatatatacacaagtgtatatatatttgtgtggtggtaggactaattacttaaataatttttctcaactttgcatatacttttttcttcctgcatttaatctagtttcatttggattatgtctagtttctgtggaagtagcttcataaataatttaaatgatctttgatttgagactgactcttaaaaatggaaattgcatttatctgggttagaattttatctaggattttaatttaatagctgttatttttactttcaaattcatattttaatacaattaaaagttgggttttttaatttggggacagacagcaagctgttttattttatttttgcctgccaaggaatgctttttccttgacacggacaagggtgctctttctttttctgttctagctctcctgtgtcttggacttcttaattctttctggtgggatttttctcccttccttctttacctttcactagagatagagttatcctttcttctggctcttgtttccctcccaagacagctacatctcaccatttgccttggcctcctttatttctccttctattcatcttttgtacttggagtggtccgcaaggtgaggagagttgagctcaatgaaaagaaggtagatttttgccttttttatgcagaacaatgtcttcaaaaaaatcagaacagaaaaaataagatgcattctaatggatctttgacactttttggtaatgaagcttttagttcccatagagttgtgtgtaggtcagaaaatctgccaagtttcttactctatgttcagctcaagtttgctctggcaccaaagaggagagaaacggggggttgcagaaaacagggggttgagagctttatctttttgtcctttactttcatctaaaaaaaaaaaaactttctatgtaagtcaaaaggcatactaattttatatttcagtgtttctttgagtttcatttagaccatacaagctgaccatgacatatgacttctatgtgttcagtcacttaagatcatcaaatgcctagactttktatttgaaatctttggcatcccttctaacttgtgttttgcagttaaattactttggagatgagatagaaatctgaaccaaaaataattattgtaactatgcaactcttatttcctaccttggcttaatgtgttcctatgtgaactgtgtttgtttggaacaatttaaaaatatatctcctctcatcctttttctttcctgaaccatagtaggctttggtgagcagatatgaaaattgtgatgaccaggctgggcacagtggctcacacctataatcccaccactttgggaggctgaggtggcgggtcacctgaggtcaggatttcgagaccagcctggccaacatggtgaaaacctgtctctactaaaaatacaaaaattaaccaggcatggtggtaggcgcatgtaatcccagctactcaggaggctgaggcaggagaatcacttgaacctgagaggcggagggtgcagtgagccgagacgatgcctctgcactccagcctgggtgacagagtaagactctgtctaaaaaaaaaaaaaaaaaaaaaaaaagaatgaatgaatattgtgatgatctctgaatcatcttcatgttccttctttgccaattcccatcggggccaaccagggacaaactcaggacttcctgggaaattatacagttgagggagggcgttaagcagggaggtgtaaaatatgttcttggagactactttgtctaccagaatctgtgaagcactcgtttagtgttgaatgaggaatttaggaatgattggcctttgttgctgccaatcatggtgatgtgtgtataggattatcaaaatgtgttacaaatcaacctgctcattcacattactccttttccgtaatgtctaatttttgtatcattaatatttttatattttataaagtataaaatattaatattgattttcttattatagctgatcaatcagtggaaaaatgaataatgtaacctgctattcctttcccccaagcctactttcctgagatcatgattataatctttgtacatacactcttttctttttttaagcatttgcctttggtgacatcattctcttcacaatgtagagtagatatccatctgagtcaatacataaaaatccatgtttttaaaaataactgcatctgttctgcagtgtagatagaccatatgttattcaaacatttccttcatgatggacattcactttgtatcaagctttttcacactaccaaagcactgcagtatctatcctcatgtgctggtgcgtttatttttgtaggagagatggtcaaaaatagggttgctagatcagagaatatgctgtaactttttcccgtgtccttcagtatggggattttcagatttgattatttctaccacaacgaatgggagaaatgagtggaactccataataatatagactgaaaataagtgaattgatcaacaatgaaggaattgcttttagaggcaacatttgaaaagcaagaaagacaagataacatttgaaacattagatgttggtttgctgaacttaaaacaaaacatgcaggtgtctatcttaggaaatatgtgtgttatcggctggtgtagggtagggtggtggtaggtttgcagaggggttgaatgtatgcaataaattatttggaagagtgtgttattgatgcagtcaggtggaaattgttcagaaaaaaagtgacaaagaccatacaatgatagttaattactaattagaaatttagaagatgaaattttaccaggtagaatatttgagaaataaaagtgatctgttgcttgagctgaagaggaagaggaaagataaacgcctaactacagaccattggtagcaatgtaataataataaaagattccaatttgatagaaagaagtggtgaaaactttcagggatgctgtggatttggaagatcgatacatgtggccaaaataaaagacttttgggattggacatggttattggataaataataatgtattgagcatttcttttgtgtaaaagtgttttaggttagtaatgtcttttaattcctcctatcagtcctaagaggagagtatgattactgctgttattatatagctgtgaaaattgaggttcataaagaacttgtccaaagctcactgctgtatcctgagatctcaaaaaagagcctaggatgctgtgtatgcttagggaaaaaaaattgtcatgtaaataaaaaagttaaaaccttctcccccattgactttttttttttttgagacagagtcttactctgtcacccaggctggagtacagtggtgtgatcttggctcaccacaacctccgtcccccgtgttcaagcaattctcctgcctcagcctcccaactagctgggattacaggcgtgcaccaccacgcstggctaatttttgtgtttttaatagagatggggtttcaccacattggccaggttggtctgaaactcctgaccttgggtgatccaaccgcctcagcctcccaaagtgctaggataacaggtgtgagccactgtgccagcccagactttttcattcattccaggcttagagagtatctaagagactacagtcctttcccaaagttgaccgcatagaacacagcaaagcatgacattgaagaaagattttgtcaaaaatcgagttaattctcaagtacaaagtgcagatgagtttgatgactgaggggttcccagaatgggagacattcatgctactctggccagcacaccgggaatgtgtgcctgggaccaggagtagtagttattcatttatatgcattcagctaatcatttttgcagacgattgcatgaatataartaccccatttggagtttgcttgctggcacttgaaaatttggctgtcttatatatacgaaatgtgagagttggtactggaactgttgcataagagtccaaatagtttacaaatgcagtgagatcaattgcagcctaaccagagtagcaccagaggacaagaaggccacaaagactctggcaacttcagttggatgcaaatttcaagtctgttccagtttgttttctgtttaaaaggctggatgtgtcttgcacactctcttgggagatttcaaagttaaaattattgttttataattagcatcaatataatcgacttgagaggaatgttgcatggattagtgcatgcaggcagcagggagtgaaggatgcttgcctaccggtgtctctgcttcattcctcatccacatatggctattgagcagcttctcgggttgttaagaaaacacagccttgaaaaggttattagttaaaacaagatgggaatggacgactgagtgacccagagattggactgtgtttgaccttttcccaaagtggagaatgtattcttttgtaatgcccactgtatccacttcaagttgcacctctttctctgtgccttccatacttctgaattcccaacaggtgacctccttcccaaccccagttaatttttttgactcgtatgtgatggtgtgtgacattttatcccttaaagaaaattgttgttgttgttgttgagacagagtcttactctgtctcccagactggagtgcagcggcacaatcttggctcgctgcaacctctgcctcccaggttcaattgattctcctgccttgctctcctgagcagctgggattacaggcatttgccaccacaccgggatactttttgtatttttagttgagatggggtttcaccatggtggccaggctggtctcgaactcctgacctcaagtcatctgcccactttggcctcccaaagtgctgggattataggcatgaggcactgcaccaggccccttaaataaaatcctttcagtaattttaagcttgcaagactgtatgtagcaaagcttgcaatgcaacatggcctgctttggttcctgaatatgggcagatgtttttaatcgtattaaaataatgttacgggagaaatgctaacctcataatggaaatcttctttttgataatttagtcgatattaaaagacaaactgagtcttaggaaatgctcaacaatcctagaaatagcttcatgtaaatagtttgtttccatgtaaaacaaacaccaaaggtcttggctaagaaatcaaggttctgcaacccaaatgtccaacaatgatagactggattaagaaaatgtggcacatatacaccatggaatacgatgcagccataaaaaaccatgagttcatgtcctttgtagggacatggatgaagctggaaaccatcattctcagcaaactatcgcaaggacaaaaaaccaaacactgcatgttctcacttataggtgggaattgaacaatgagaacacttggacacaggaaggggaacatcatacaccgggggctgttgtggggtagggggaggggggagggatagcattaggagatataactaatgctaaatgacgagttaatgggtgcagcacaccaacatgrcacatgtatgcatatgtaacaaacctgctcgttgtgcacatgtaccctaaaacttaaagtataataataataaaattaaaaaaaaaaaagaattcaaggttctggtataagtcattgcattggtcaggttggtctgacccctcccacatctccaggtttgtatctagaatgttagcatcaagagtgagtgggagcgtaaagaatactgtttgctaaggkaatggaactgctggccaatccagaagtctttggtcagtttatttctttgggtgagtgagacctatgagcttgacttacttccttaaaggttagatgatttttttgaccccaagttctcatttttattggaataaaaaaattagttgtatcgcatagattaaaatcaacacaggcgctttcccctgctgtgcgaaacactctttgaaatcccaggtgtcactttatgcttatggtaagaacccgtttgtgtctgttgttaattattttctcttggtcagaccagttccccagcctcagaaaatttcagaggagaaagtacatccatagtgaactgggaaagtactttctgtcctagaacttattagggcggcacctagtttactacacaagaaattctatccttttaactggaacatctgggttcttaatgctctctgcttgcaattatctgtagccttatattttgccacggtctgtcttgtcattcttgaacattctccatctgaatgctaatttgcacacattctgtaattgtgtgtaactgtgcttcttcttgtgtattaaagtcctccctgtctttaagagtaacttaaaaactacttctttgcctaagtgttgccagattttttattttgctccaccccttaatttgaattaattattgcacgcctgtataactttacttactatttctgcactgaactgtagctaactattgactggtaygttttctttgcatactggtttgtgaaatttgtgggggtcgaggttcaagtctcattcctctttgaatctttcctgggcctagatcagtactgcatatgaagttctcaaataaatatttgaagcatttcgttgaattgtgtgtctctggaatatcagaaatgacatttctcttagtcaatacctaataaaattttactcggtagctttattttttaaagatccatacaagtgctgtccaacagaagtttctacaatgatggcaatgttctatgctgtgctgtctaacacagcagctacttgccacatgtgaccatggagcacttgaaatattgccagtatggctgaggaactgaattttgaattaaattaaatttaaatttaaatagccacatgtggctagtggctaccatattgtacagcaaaggcagagaaataagytttcaatcttgatcttttcctctttcatttcagcaatctttattaagcacctattaggtggcaatacattttctaggccctgggaataccaagatgcattggttaattccaggactgagacaactgtcacggtactgcagagagatcaacaggatcctatcattcattaacacaggacagtaaatgcagtgctgttagggttagcagggaatcggagacatttagaaaagagtggtgtaaagccagggatcattttcagccaaaaccgtggaaatccgggaagacttttaaagaggtcaaggagggtatcacacaggaggattacgtgacaagaacatattttatgggccctcagtggggaggccatttgtggttgatctgtttctagataacgtgaaacatggcagagggtaatcacatsatctgttcaccatatttttattctgaagaaagtctcccataataaaagacagagtgaagtcctattactttgtccatttatttgactctaagccctgacattgttaaatttccagagtttcagataccaagtgtatttagcttatagttggttcttcagtgcctagtacaatacgtgccattcactcattcattcattcatgtaacaggatacttggaggcctgccccatgccaagcactgtggctccactggaggttgtaacccattttgttattggtagagggtctcaactgcaagttatccaggttcttggtgttttgatcaaagaattggacaaaacgctcagaaaagtgaggaaaagaacgaaggaatgaaagctgagatttattgaaaatgaaagtatactttacagggtgggagcggcaggggctcaagggctcctgttatagaatctcatgggatccacatgccccctagaggtttcttattggccacttggtgttcacgccatgtaaatgaagtagtggcccacaatcagaggctgaactgaagttacaaagctgcactcctatgcaaacgtctgattgggtggggaaaagcaactaatcagagatactttcaattttccatctgctatgcagaaaacttgggatgggggtgggtttgcaaagggagtagcttctggtcctcttgttacttaggcccggaacgttggggtttttcttttgattttgttctaggaagtcagtgtgaatcagccttaggttccctgcccccagaccctattctcctgcctcaacttggtccctgctactatcctgagacccatcttagttggcctgtcaggtgagaaacyagtgaacacatcaatagatagtactgacctactgtagccttgaaggagtgaaggatctcagatagataacagcagcaggattgattttaggcaatggtgaggggaaggtctcccagtcatgtgatgagtcagggaaagaattccaggcagagggaccaacaagtatcaggaccacgtggtgggaaaagcacatggtttgttctagcatctgagtgcagaccctggaagcaaagcaaagtgagagagagaggaatagtgtgacaatgaggtctgagagggagggaaggaggaaggaaggagctggatcctgcagagtcatgtaggatgcattaaagacaataaaatcctaaggatgatgaaaaataatcatttcaggaggatttacacacacacagacacacacacacgttctaagggagggaagtttgcaaaattttagtttacctttgaagttactgaacacttctcatggtcagtcatgttgctcttttgagatacctcattttggccatagattaaaatgcattaagaagctgcacagagttgtacattctcctgagagtgcttgaagctgagcaaactggggaaacatcagatgaatcctcggggaggaaaaagtggaagatataatgctatacaagtaggttttgactcccaagtctaattttaagagtaagcccccctatgagtggcagtaattggctggaagagtgtgattgcttctaattgccttcctaatgacacgtggcagtgttgggagctgcaggcttggtgcctggcactgtacatcacagatgacttgaccccggggagatagggctaaaatatctccctaaggtgagcctttttttgcagtcctccagtcagtgaagatggagggatgtaggttatgtgaatggtcctttaggcattttaggtaggcatgttccacctcagagggtagatatcctaccaaacctttcagctttaggaagattagcttcttaaattttcatattttagctcttgtttagtaatcagtggagtattccaagaagtttatgttgcatagatgctgttaatatcccacccacattttcttattttcaagcacttatatttttattttttgcatgctgacctgctgtcctcctgctggcacttgcaactctttccccaagggctctatggggccacagatgacatgttgccatccagaagggctgggggaatccatgtccgatagcgagcagctctgaggcgataattgatcagagttagatattaccttcccttatcttgttccctactcctctattgtttcctgggtcacctcccaaagaaagtattggtacctcaatctttgtcttgggacctgtttcctgggaaagccagactaagacacactaccttaagaaaagttgatgtaagaagttaatggccaaaaagcttcattgccagacgtggaagtcacatatgaaacccaaatgtgtttctctgaataagacaaagtcagcgttactatataaagtttaatcaagtgatgacaagttacttgaaattagtcatttaatcagcagctctgggtaatgacaatcagactttgttttgttgtttcatgggagggatcactttttgaagctggaaaataccagaaacttgagtggggggcaggcagccacttaggcccccaggaagaaattacaagaatgcttaatgaagcattatgagtttcctgcttgtgactaaatcacagraaaactggatttgtctctgatttgggctgtatttagtctgtgaatattgtatttgttcacccagtgtttttaacatccttggattcgttcccaatatttaaaaattggggattttaatttaaaaggtcagtattaatatcttccttaaatcacagtgcacacattctgaattgaaacagtaaagtcaggcagttgggcaacagggagcctgcattcttccctgacagcagtgtctcttcctagtcagtccctactgatgagtgatattgtgaacttagccatttatatgatctgccacacyccatgagacagttgtatttgcatccatgatctaagaatttgttttcagttcattaaccatttgaaaaacttaattcttaggcactcctgccaatgagctttaaataggaagataaaatgtccatgaaattaaaatgtgtgcctatgtccatattctttgcttttgagggcgatgtacttgatggcgtgatattataagttaatgggattttgctaacaaaaacatgattagcttagagctctcctacaacaggcctccagagggaatggggaggaattttggtaattatgtagctcttagagtatttgacttgggtctctttagttatcttagctaatttcacatgacttgagagtatctgccaaaaattgaggcaacacatggatatattaaaaggagttggataggatagcctcagtgatggcctctgtaggaggaaagatgccttggggctgaatctattgggaaatttaatattgattcccatctttccacctgcattaaaaaagttcataaacctttaggagtagaagagccaatgaaatagaatttgccgagtgtttcacataaaataggtttagttgtgtgtgcttttcagataaaacgttgagggatgactaggtatatgagcatttagtctgtttttctagatataaaagagaaaaaacataatttaagtttgacaactgtcctttgattattatttataatttaatatattttttgaaactaatgaggaatactctgttttgtgtggatcagtgaatttgggatacatatcatcacttcctacatcctgacctctccactgaataaaaatttgagaatgcttaatctatcatgagtttcctacatgaggcaaaatcacaggcaaaccagatttgtctctgattctctgatttggtcaacaaatattttgcttttatcagtatgataatactattcagctctgaatgtagacagttgatttttcaattgaattattatgagatgttgattactaaattaacagaatttattaatttctcttttttttgagatagggtcttactctcttatgtaggctggagtgcagtggcgagatcatagctcactgtagcctcagcctcccaggctcgagcgatcctcctgcctcagcctcccaagtagctgggaccccaggcatgcaccaccatgcccagttttttttttttttttttttatggtagagatgggatactactatgtttcccagggtggtcttgaactcctgggctcaagcaattctctttcctcaacctcccaccgatcttttgttaataaacatgatttaaatctgtcatagcttcagctcagcaggacatgaccattgcaacctcattgaatgggtataatccccagatctaagtggagatactttgtgggttgttattttgtgcagctactttaaaatattgggaaacaccactgttgagctccactgtgactttgagacctttaaggccaaggggcaaggtactttatatttccatcttcctttggcttgcattaaacttgcttaaagatgagcttactctagtgtagttatctcttctactgtctcctcaatgtcagatgttgtttattttccaaggtatcacttggctaatttgacaaaccaatcagtgctaatttaataatagatgaagacaatgctttattcatcaatttagtcgtgtgttaaatcggtcagtaaattgagtgtgaaccatcagccaggctgatgaaccctgccttcacaaaacttggtatgaaagacagacattggacatataatttcactaatctttgattttaaaatgtcatgtgtataaagacgtctggtgtacagctaaacaaaagtgctaggtgagccagaaactgtgaagttttaaggacaagagtaattgattttgttaattgaggcagagtgctctgatgaaacaagggctgaaagagaaaactgaagacgaatgtttaacctagttgacctggcgcattttagaacccttcgttttaagctgaaggttatgatatgctctttcattcatggtaataattgcttgagtctggatgagtatmgtgttttgttttgttttgttttgttttttaaatagagctagggtctcattctgttgcccaggttggagtgcagtggtacagtcatagcttactgaagcctcaaactcctgggctcaagtgatcctcctgccttagcctcctaagtaattgggactacaggtgtgtacaaccatacctggctaattaaaacaaattttttttaagagatggggactcactatgttgtccaggctggtctaaaactccttgcctcaagcaatcctcctgcctcagcctcctaaaatactgggattacaggcatgagccagcacacccagctcagtttggttgagtattccatttgtaattcactttttaaaatatatttcaacatggcaagaccctgtctccactaaaaataaaaattagttggacatggtagcatgtgcctatagtcctagctaattgggaggctgcggtgggaggattgcttgagcccaggaggttgaggcagcaatgagctgtgtttgcaccactgcactccaacctgggtgacagagtgagacccgtgtcaaaagaaaaaagtgtatttattgattatctgcttcatgccaagcattcctaggarctaaaatacttaaagagtgttcattgtatttagggttgagtagatatagatgccagttcacacagtatcaccatgtgataactacaataatgcagaaatgcattggttgctataggaaccagctataatgtgtcctagggtgtggcttggtggacagggaagatgtctgtgtgtctgggtgatatgtgtgctgtggttgaggagggttgagatggtgtgtgctgcgggttgagattgacgttgagttggggtgggagtggggagctggcagcagcatgtttggtgcagtagagaaagtatgaacaaggggtggaagccaggactagcatagctcatgctgggtggagggccacagtgaggtcctaagccctggaaggaatgtgaaggcaggcactggagacagatgaacttgggttgcatatcggggccttgtcgtggagagccttcatgccaagttttggactctaaagtggagacatgacagggatctgtgcagtgattgactgagttaattggaggtgctagctggatgtactgttggaaaagttcatctggccattgggcatttgaacctgagcatgggatggggtcagaggtttgggattagcttagatgactgaaggaaaattatagagcaatatcccctgagaaacaccaatattaaagaagctgaaaaaccaagaggaacctgcatagagaaggctaggaatggtgaaaactacactgtggacctaagagcagtgggtgagccagaaactgctgcagaatttggaaggaggtgaataattggtgatgtcagcggggccacactcacaggagcctgccatcctattcccagcagctgatctgaagggcaaggctacatgctgagtggcrgtggggttgggggacggggttaggtgatgttggattgagcgagaagcagccgtcatttaactaatgattttcccttccttcatttttttcagatacttatttcttaatgcacaccataatatgtaaatatttttgattctataaagacatagttttaacctaattgggtgggggagagagtttgtgtgagtgagtcaaatgaatcatagagtttattcctggaatgagtacggactgtggttgaggatgttgagggtaagttagcagctgacatctgtgtttcactttaagcttccacaagacttaagccagatctagttagctgatcatctgcatagttgttctttaagttgggtatgcatarcgctggtagattaggagcttgataatttcattaagtgatcatgatctatttcttctgcctttccatttttacatgtagaagcaaatatygttaccaaccaaaatgacccatttgctctcattatgaattacaattcttttaaagaatttagtatgcatatccttgaccttttttgaaattaaaaattatcttgaaaatttacctctcygtctgtaatttctgtggtgtgctcaagaacagcttaatagtctgaaaacggatgaatttaaaattagagagttgaaggtcgtaacccagcagtgataactcagctaatgaaatattcatttccaagtacgaagtggcactgtatatcaatatgttgtcactgtctgtcatcattacgtagagcacaggtatatttatgcatttataaatagctaagggaaaaaagaggctaattacatgcagaaatgctacagaaatttccgtggctgtgcttctaacaggcaactgctaaccatttttccaagccacgtttgtgaattaagtataggttctgcacattaacctctgccgtatttggtttttagaatgatgctcttagggggaggacaattcaggagatatacatactttttaaggtcatgtccacactagggatttgtttatacaaatgtaaaatgaaacgtgcaatttagcacctatctagaaaaattaaaccgaaaactgtttggtttgaaaaatctagaacattgtagaagagagatatatttatataattagcatcaccaattaagaatgaattgactttagcaaaaatcaatgtaattatctagataattcaggctaattaaagaccttcccaaatccttagatcttcattagctgcatgcttctggtaaaagcagatttttggggtgtcacattagctttatattttgcatcagtcttgctctattctgctgccgtagacctggcttcaaatgatagtgcccacttgataaacagatgttgttcaggagaaaataaaataggaaatataaaatattctgtgtcgaattgaaagcatgagggtcctcatgttcttagaatcttcttagaaatacagtataaaatctttatatacagatacacattgacaacaatagagaactcataagcagttacctgagcagggttgaacatataggtagggtcatgatgataatacactaatgaacagcctgccttacacacatgcctccaatacacagacacatacacacttagcttagggaagtagggccacttctctcctgtttgttcttttccttggattcctatacttccctgggcctgtcagtaaccatcccttctccccagtcacactttttctgtagtcccctctctaaacaggaagcgacaactactaattagacttataaataaaagccaccttaaatgaacatcatgtgtaggtttcccaagttatacgtgcctctggcctttttctcatcatttactatggaaataaagacaaacaaacatattttcccccataatctttggagggtagagtaggtagtgtcagatgtgcctgttatggtggttgttcagaaattaaaagagggcaatttgcattggccaatggacactttagcttctaaaaaattcattttattcttcttctttgattattcctagcttttaatctgagtaaaggacatagattgtggcttggccttacttcatggcatgggaagcacatgatacgaataaacttgacttagtactgtatttggccgtggcttgacttgataccttgagcctcatgagttatttcatcagttggtcgctagttatggttctttatctttcaagggccttaacaaaaatttttaaagagccaggctggttatcgtaactattataggaattcaagggtggttggagagtcaacgtagygaagagttagaaaagaggaaagaaatccacccccagactgggtatgtatcattgatagtgtcagaaacaggcaggagtattatttttggagaaaagacctacttttacctttgtgcttctatttttatacttatgtctcatgatgtttttaagacgccagaaatgacatatgtctatcaagttttgaaactaatatgtctttaaatgatcattctctgattacatcatgtagatttagaatatgctaaatttgaggaaaattagcattgtgtctttgaaatgtcccactggaaatagaagccttacgcaccataactgcttaaagacaaagagaaaatagatgtcttttgaattctttcttaattatcaccatgatctcccatgtgtcaatgctagtttttctmagcaaaacacagttttggtttttaacatatatcctgaaaggggaaatagttggtgatctggtatccttctttaaaagctcctcataacgtaggctaaaagaatcgcttatattttccccaaagctgaatcctttgtgtgccaaaaaaaaaagttatttaacctaagaagcaaatattaatatttcgttgagttgaaagatgtgtctgttcttctctccgtcctaaccccaaataaagtgattgataaagaaggaattatggtgatgaataattcctgatggccttttaatgttcgtttgtatttcctgtaaatgattaaggataattactctggaaagaatccggaaacaagagaaactccatagcaggaattatttaatttatgctgttacttcctttcctgccttttccctgaatgaatctaaggcaactttggtagcatcacattgcctctgtttgaaaaacttygctatgcttagttttagtggatgggttatctcattggcatctgaaatggtaaatattccgagtggtatcattagtttcgcttttcagtgatctgtgaagtaaagagcccctaagtaatgcgggacagtacagttactgaatcaccatagtccgctttattaggtccttctgggaagcccataaatgcttgatcactgaccccagaccttaatgttcattccttattggaagcctttaattttggtatgatggacacaattatatcacartggttcctgtggagttgttaaagtcaatctgttcttaaaaacttcttaaaaggccgatttattgacttgatgggctgtaaaacagtttccgtttattacgggaattaccttcttaggtagacatttgtgaacatgacggctttagtgatacccctcgttacccagtggagtcctgttaaaattcctgaaattaggccatttattccctcaaggatatcgtctccagtggtgtctttttttcttgaagatggctcccgctatctcagacaaacttgtgagtttgtctgaggaaaataaaggatttgtagcagtattcaaaatgttcccagtttgacagtagctcccagttagagaggctcctgctgcttgtgtctacctgtcctcaaaggacacacggccaacttctttccttttcccagtttaaaagtgatttactcccatggttgagactggttttcagcatcaacgtgtgctgcatggcgtcttctaagtatcaaagcagagattcacttttcatttctgggtatttggaagatgatcaggtgcctaggactattagatgtataataaatatgtttcacttctcaaccagagtacacagggttacagagggaactaattttattgagttatcaaaatattaaaatttgtgattggcaatgcgtgaacattttattaacacattacaagatctactagcasgtataacaactatcataatattaaagttgtcatgaatgcctgtgacattttgagatacctgcagcaactgtaatgtgagtgatttctcacaatgacaaattctcaaatattgctaatagtactgtggattttcctacattggtaaattgaaggaattgctaaatgctgaattcakcaaccagtttgagattgttgaaaataaagattgtttctttttcaatgcaagttcacagatcactggagttctagctacagtttgttctasaccagaggttgcagatatttttgtcctataaagagacacatggttaatatttttggctttgtgagttgtatagttttcgttgtagctgttcagctctgctacatgaaagcaaccatagaccataccttaacaagtggtcacttttgagtaccaataaaactttatttagaaataacagagggctggatttggtcctagtttgctgaacccttttctagatgaaggctcctcttgccaagactggctccctaccttggctgacaaattctcactttgggacttagtcattgttgctgctctctgttattttgcatgtcttttctcatgtttaggtgctgtgtcttaatacttttttcttacatttaatttaacaatcattactgagcgctggtatgtctagtttcttttctcttctttcctccttttcttttctttttttctttttctttatttgaaggctctcactctgtcacccacactggaatgcagtagcaggatctcagctcactgtagccttgatgtctcgggctcaggtgatcctcccatctcaacctcttgagtagcaggaacaatgagtgcatgccacaatgcctggctcattttttaaaattttttgtagagacggggtctccctgtgttgcccaggctggtctcagactcttggtcctgatctcaagtgatcctccagcctcagcctctcaaagtgttaggattacaggcatgagctactgtgcctagcctctagtttcttataatacagagatgattaagacatacttcttgcccttacagaaattcatactagttgaatagaccaacacacagatgggtaagtgtaaatatagtgttataattgctacagtagtgcagcataaagtgttgctggaacaatgaggacaaaaataacgtattcctccctcatgggacttttcagtactttgcattcagtactttatatggatagtgttcctttctttccatgacctgatatatctaaagatcaatgtgtctgtatttaagtaagtattttatttgaaaaggatgaagagttctgaaaccctaagtgtttgtatatggtaatggaagtttattcacaggtaatgataacttactgctttggaggtactttgtttcacgagttgattgttatttgaggcttctgttgtaagtgaggtgagataaaaaataatgcctaaaacctagtcctctaatctggggacagtaaattttgtgcatggagtgaatttccataactggcatatcctgtcctggttgagatcttgtgcatcacatgatttagtgcttcattttcagcagctgtttcctggtaccatcagggtcggcatggccgtgggattcagctgatgtgcttattccagtgggtggtttctccctgtgttgcagagttcacaggctgtacctagctcagtggagtagactggtgtgatcacttagccgtgtctgtcwtgggcagtggagtacagagggtggttgccctctctccatttcacacttgtactgkaggaaccctgaggctagatggtttttctgttaatttagaaaatctttgtcccctaatgttgctggacttgctggggtggtgaaccattcgagttgttgccttctcttctccgtctgtcccttccttaagcacagagtacttcgggaacaccatcttgtcttcatcactatcttgggcatctatttattacaaacttggaattgaacaaaaatgttttagtccagtggtttggattaaaatcaaagttcataacaaaactcagaccatgttctattttactgaaaacatcaatagtgagtgtactagagcttttggagttagaaaaagaaccatggaaagcagagttgctgctgatgtgttttgcttcttggctaagtttgtgtataagtttatagaygtatactttccctatgtatacacatgaggaagtactaaagcagaactttatagctatttactttacccttggtttcacaaatagcttcactgaaacattacaagagaaattytcagtctcagaatccctttcatttcagaaattctttgacttctgtgatttttttttttttttggtttggtaatttttcctgaaattcagttattcactttgtgatttaattatttcatctaggaaaatatgtcgaataagtcattcatctctgacataggtaggtacaaggattgatttgttgatacttttttgaatatcaataagattaaagtatatataaaatctgagtttttgatctgttgtatgttagcaaggatatttgtaattaaaatgaattatcagtcagcacctcctttttccttttactgtggttaaggtaaagatgtcggttaacagtttaaaacaatagtctaatcaatggttgccgtgttgctaaattattaatgaaacagggaagaagtatggtataatttttattatttgacttgacttctgcacctgtttttatgtataattgatcctaagctattagagctgaagctttgagaatagttttgagaagcaagaaactgtcctttcttagtgggctggaaaaacaaagtcagcatttatctcaggtatttacaatgtattgtttcttagatttgtcatttaggcttactcccacagagtctgggaaataagtttctgttgcaacggtttcttgaggcatgctgttccagcctttgagtcaaacttaccaagtgactttaggaaccaaaatgattcttttacttagataacctgtttgaggcaagagttgggtacgtatttgtaactgtttcagatgctgtatttctaataaatttatttacttactttttttgagagggagtcttgctctgttgcccaggctggagtgcagtggtgctatctcgggtaactgcaacctctgcctcccaggttcaagcgattctcctgcctcagcctcctgagtagctggaattacagacatgtgccaccacgcctggctaatgtttatattttcagtagagatggggtttcaccatgttggccaggctggtctcaaactcctgacctcaggtgatccgcccatctcggcttcccagagtgctgggattacaggcataagccatcaggcccggcctgtttctaataaacttataatatttattcaatgacatctataaactacaagtgtctgtgctagttcggatgttgtttaaggtcctttcttgccttcagaggtatcgtttattagtgaatttatttttatctcactttttagattttgttaatgatgtgcagagttttaagagaaatggaaggcagaaaagtacatgtttaatgcatcttcctgtagaatctttagttctagacactggaatgcctcacttgttagagctcccctttttgcttgggttgctgtgacctcagagtgtaggagtttttaggggagcacggaagatgagagatctgtaatcttgtagttggtgtagtgtcaccaaaggggactctggcaggcacatgactttatgtctttacttctttcttgargcggggagttgggggtgggggaaggaccagttcttattctgtcacccaggctgagtgcagtggtgccatcacaactcactgcagccttgacctcctgggcttaagtgatcctcccacctcagctccacaggcacccacccccstcacccctccgtagctgggactgcaggtgtgcgccaccatgcccagctaatatttttaagttttttgtagagatagggactcactatgttgtccaggctggtgtcaaaactcctgggctcaagcagttttccctccttggcctcctaaatggctttacttctccgttgagcctacacttagtgggcccacgttgggctatgccacattcttctcagttcttggcccattccaccaatgaattcaggaatktgggttcatatctcaggtgtgctatgtcacatttttcttagttctgtttcccatggaaaacataacttttttgtgggttttctttctttctttctttctttctttctttctttctttctttctttctttctttctttctttctttctttctttctttgagatggagtctcgctcgattgccaggctggagtgcagtggcgtgatctcggctcactgcaacctccgcctcctgggttcaagcgattcccttgcctcagcctcccaagtaactaggactacaggcacgtgccaccacgcctggctaactttttgtatttcagtggagttggggtttcaccatgttggccaggatgatcttgatctcctgtcctcatgatctggccacttcggccttccaaagtgctgggattacaggcatgagcctgtaaatagaaaggctttgagagtggcacaagaaatataagataggaaatataaacaagtggaggaaaggtctccaaggtycagtgaatgattgtgaatattggatgcatgtcaggatttgtctctttattggtccagcctgtcgcttcctgtctgtccctgcttctcacagttctactatggctgtctgtcaccgtgaccagaatgggagtggaccacttacccagcccagtctctttcacttgaatggatatgtcacctgggcttgtggtgtacctagccaaagtggtggtttcaagactggttatgtgtctcaaagcaaggctaatgagcatcttttctgagtttgctagtcccctcccaaacagaatttatcttcttttggatgtgtttctcatccaaagaagaatatgctgcatttttggctttgtgatggcaacttcctggcctagaaggtagaaagagaaccagagctatgatgatacctgaaccagctgtatctggagctttgtaccttaaactttttaattatttgagtcaattccttattttatttatttgacttacatttatgttcttttctatcaaaaaataagcaatacaatggggaaagggacacaaaaagctattgataaaaaaataataataacaagctattcttaccagccaagaccttaacttgcaaattggcagaagtccagtccagtacagctttctggatgctgtctacttgttgttgttttttttctggccactgtctccaccccttgccagtttccttgagctaaaaggaccaaagttaattccaagtttggctaggtggtgaaaatgacactgtgagaatcatctgttctctgtttctccctgccatacagaaataaacatctttttgattattaaattagaactagcctgaagttcttccatggcatgttgaagttgtttccaccaaacaccttgttggagcaaagtgattttgctgtagaggaagtgacatccctggaagttaatgtcacagattttggagtatctgcttagtgttggagaaaggcgaacttttctgtttcgtttgcccaactgccttgacttgagcacagaaggccattttgcatgaatgcttttatctaaattctgtctttcccattactttccttgttttccacccccatctccattttactttaaaaaaaaatcagaatagaatttgtataattattatggacttgtgtgtggggggtatctttttcttaaggatgtgttagaattactattatttaaaaaattcttcttgtctttatttttctattgccatctgttcatttaaatattctcagattgtttatggttttggttttccctccatatattttctggcatttggctctccttttctgacacaataggtcaggctttcaaaaatctggtccctatgtaatttgactttttcagtagtcaacataccgcccatgccttccgaagtctttcatctcttaggtctttgagcagatgttaactgtttaaatattttgttgttttggtgtaaagaaaattgaaatataagacgtcagtgatagcatgctttgcttacaccagagcagattgctgcttacaagttgaatatgcaaacatctttaaaacatggaacattcccttatgcattttaaccataatctacaggttgtgtattctgaaaaatgagtaaattcatcaggttataatgaagattttcgtttgaaagctggtgtttttattccctgaattggtcttcaactttgggaacttacctgtggatagagtcggtctcccacctgagaatgagaaaggaatttaggtgtgttttatactctataacttctggttcatattatattgatgatggtatttggacttatttagtcataatatgagtggttaaaataaatgaatactaagttggtggtggtgtagagtcaactaggaaagtgacctcactgttactagtagtagcaacagaagcagcagtatcaatgatcagcgttcattgcatacttaatatattcctgacacagtgtcaagtgtctcatttaatcctcctgccagccttatctgttaatcccttttagtatcccattttacagatgagggaactgaggcttagaataagtagcttttctaaggtcatacaactaataagtagtggggctgggatttcagtcatggtgatctgagtctattgctcatgtgcttgaccactgtattgcatttcttcattgtggtatagggcttaagagcacaggctggtgaaggtcaagaagtagtaacctcactaaatcttacttttttaatctgtaaaaagtaggygggaataggccgggcatgatggctcacacctataatcccagcactttgggaggctgaggcgggcggatcatctgaggtcagttcaagaccagcctgacaaacatggtgaaaccccatctctactaaaaatacaaaaattagccgggcatggtggtaggtacctgtaatcccagctattgaggaggccgagacaggagaatcacttgaatctgggaagcagaggttgcagtgagccgagatcgtgccactgcactccagcctgggtgacagagcaagactccgtctcaaaaaaaaaaaaaaaaaaaaaaaaaaaagtgggaatagtatctaccttcacagtgttgagagattaaatgagaaaatatagatgcctggttggcataagtgcttagtatataccggctatttttattatttttaaggctattgattactagtactttagaactttgtatatactgtgtctccccacccccattayraagtggcctttgcatagtaaaagttcgtatggctttgagtgtaatcatatctttgggtggatagtgcatcactacctttgccttacatgatatattaaataattgaacagcagcagatacctctttaactttattcagattttgtccttggcctgttccccaccagccaaagcagggagaaatttgtagctcaggccctcaagttgaaagtgggcattaatattagcaaattccctttaataatcatcccattaaatttgatgaccagaggggacgtcctcatagcttataacagaaaatagtgtctctaggagtcaagggagcttttcccaaatgttatctattgagcaagattaaagagacagatcacccaggaggctgatggtaggtggtgttaatccattagtccacacgcagataactcgttaggtttcctgagcatcccccttaatcttggctgcagagatagaaaaggagattgtagaaacttgccctgcagcaaagattattgatatgttttcctcttacwtgactcaaaaccaaaaaggaatgtaataaataacggctgtgactcctggagtgattaaagagcactcaggagccaggagagctgatagctgccagctccagagcctgagtgggcagaacttggttccttgagacagcagctgcctaggaaggacaaagtctgcatgacgctctgtggtgctttgtgtgcaagttgaccattgtggcaaggtcataggatagcatggtggggagggggttgcccctttgtgtttgttgcccgcacctttgcccttgtgtgcaggattctctctgcttccttttgtggatgaatccttctgactttttaggtcatagattttgtgttgattcttaagtgtggcctctacagaggtcgtttgccccttaatatgtttatattgttgctgttaactttattgtttttgtctgtcttaccagacacaaggcaagattttgtttctctcttcactctcttttctggcttaacccaagacctggtggtggcacatactaaccactccaaaatttttagaggctgaatgccagctgttggcttaatccatatgttttcatgaaaccattgtgttcatctgttttctcccgggtgaagggttagttgttggattcagctttatatatttggaaataagaaatcaagtgagggactgtaggaaaacgtagagcagctcctggttttgcgaggttgttagaggccagccggcacagaaatgttcgtattcttcccaggagctaagatattcatcatgagctctttgagccaggtttccatcatctgtgaaatacagaaatgatgcttactgtgttctagctccccttaaggattaaaccatttaacagatctcactgatgcagaaatttcttcttcacattttaatatctctgaaatcggaatatacttttcattgaataatgtttgaaaattgttggatttttttcccccatatttgaacatcactgagattgggctgagtcttaaaatcattggtgtctgacttcatgaaataaggtaattatgggagccgcattggtcttaggtgtatactaaatgttagtaacctttttccgtaataactaagaaaaaaatgttgatacaaacatcactatgtgaaagraaggctcacaggtgtgagaagaacagggaggctgggttctttcaggtttggtgttgtcactagcctggagtcatttatctccacacccccccccacccccccacctcccgccttcctttgtaaatcaagatttttggtttttcaggtatgaaactaggttttccatctagtgccactgattaccagtagctcatgagagctctgtgcttgagtagagttgtaaagccaagtcctgagtttgtatgctggtgttagatcatgctgactgcccggagtgtggtgtggagaaggagacttgacagtgccctcagtttcccctcctgggttacctgatcctcaactctaatttttaatgtcaaaaagaaggaaagatgaaggagggacgaaaagagtgggagagaaggagaaaaaaatgaaaaaaacaagaaggatgaggatgaaatttttaaaaaaccaggtcaatggactattcttcccagcataaaattaaagaaggcagagagatacttgagtctgcctgctgaatccaagcatgtagtaatactgttgagacagttatggttgaataattttttcttcattcttaaaatgctcgtctgcattttaatacagacaattgcataaattatctcttataggaataaactctctttccacaaagattaaccctgcccagtatcatggggagcttttaaagagtttattagctgtgatataggaaataaacacttcagatgattgtggaaagaaaatagatacaactgtagctataaatgctaaaataccaactcagcatgttaggatcccttccccaacacacacttcaccactatgtaggttcccaccaaaatcccgtatgtgacagtaaatgacaactagttaattcttttggtaggttaagaagggcttttagggtatggacagtaatatcaggcatgaaattactttatcagtgtaatgtttatcagaatcacttgccaactcactatgcttcctctgagacttatatccaaaacatttccctgaaaggaataaaaattttttcacagtcactttgcattttaaagagtctgttctttaccacctcatcaggcattcaaagtgctgttgttgttgctgctggtttttttttttttttttttaaaccctttgagttattttgaatcttttcacttttacctttggaagggacccttagtgaaggtcttgtcttttcatctgtagcatcttccaataaaagttggctcaacaacagcccatctgataactcaagagtcggagacaagggcttgactagtgaatgaaatgttctgcttttgtggataagcagcaagtagaaaaggaaggtcagtggaacagaccagaggcatggtgagtctttggcctcctgttgatggggtagagctgtgcggtacagagccagccttccgttcctgagcagagttctcgtcattactagaacctgaaaccttgagggtttcttggtctttttcaccttctctccacctgttagggacataaacattaaaaatttttttttattttaaaatagtttttgatttatagaactctactattttcataatagtgttatgaaatactattatgataattgcatgaattatctcttacaggaataaactgtctttccaatagtagtatgaaattctattatgaaaataaagagttcccatataccccaaatccagttttttctattgttaaccatttacattaggttggtacatttatcaccagtaaagaaccaaaattaatacattttgattaaagttcatacttaatctgtgcagtacaaagccagccttcccttcctgagtagagttctcgtcattactagaaccagaaaccttggctattcagatggccttatttctacctaatgtcttttctgttccaagatcccatacaggatgccacattgcatctagtcatcrtgtctctttaggttctgctggactgcgacagtttctcagactttccttgttcttaatgaccttggcaatgttgagtactggtcacatatttcatagaatgtccttcaatttggatttacctaaagttttcctcataattacatggggcttataggttttggggtagaagataacacaggtaaagtgccattttgatcacaacctatcaaaggtacttgttttcaacacaatttatgaccttgatctcctggactgagttggtatttgttagatttctccactgtaagtttgccccccaccatactgtactccttgtaacaaagtcactatgtgcagctcacactttaggaggtgggagttattcactaaccccttgagagtgtggacataacatttttccccagaacagtaagtgtatttattttattgttcaaggggttgaattctgaatttggaagatgctgtactatcacagttaagagtatggacactaaagccagactagggtgggtgtgaattccaaccctgctaacttcctagctgtgtacctggaaggtaatttaaactctctctgcctcactttcttcatctatcatatggatctaacaatggaaatagagtgaaaaataaagactctgtggtacaatgcttagaccagtgcctggaaaattgtaattactgaataaatattgtgtgactgtgtccatcagctcgttgtggggtgggagggtaggatggtgacagatatattactggttttaagctgatttggtatgttttttcatagagccagtgttctagaaggtggtaggttttccaggtgagttgaagacaggtgacatgttattacagctccaatttcaaaaataaagacagaaaacacaaaaaaaattctttgggtcaaaaataccctgagcactagtagaggataaagagtttttacttgaagtttagtaggtacaagaacttggagagtttcccaaggaggcttctcggtgccttggctgggttagagattgttgctagttcttgatggcgtccaagttacctccatgccagagacttccgtatgaggttggcacaatccctagtctgatttctcaggattagtgtttcaagttgggtgaagaaagtcatgtttcctgaggtaataggtgtggagaaagaagggtgttccgtggtggggacagaactgtgcacggtactctgtttttttttttttgttcttgttgcccaggctggagtgcagtggcatgatctcggcttactgcaacctctgcctcctgggttcaagtgattctcctgcctcagcctcccgagtagctgggattacaggcacccgccaccacgcccagctaatttttgtacttttagtagagatagggtttcgccatgtttgtcaggctggtctcgaactctggacctcaggtgatccacccgccgtcagcctcccaaagtgctgggattacagacgtgagccaccatgtccggccagaactctgcacagtacctttaaggaagaagaaaggtggaaggaagcagaaatctgctgaagctttgcagtgctctctggtgaagcccctgccctggcaccgcctgccgtagcttccctctgggaagtgacttcctggtaaggtaaaaagtgtgtcaccagctgcttctgcaaaacagatgcactggcagcccaggggagtgcttgtgaggtgggaaatggcttctgactgcttaatttagcttcaaaagcacacatattttcatgattaccccccagtggtctatgcacacagacgccctcaggtgctctccaggtacagaccactggggagggtggtgtgcgcacacgcatatgtgtgtgtgtaatttttttttttttttttgagacagtcttgctctgtcacccaggctggagagcagtggtgcgatcatggctcattgcagcctcaacctctagggctcaagtaatcctcccacttcagcccccaagtagctgggactacataaatataattttttttacacacatacatagaagaggggtggaggggggaagaaaggggaggagaagatgagggtgatgtctacagcaataacctatgtggagtgcaacaacagaaactcaagtcggcttgtgtcataatggaaaaaatggaaaagaataacgtctgtgttggcctcagtgagggttgggttccgcttctcaagacggttagggactgtttctctctgtttctgggctctgccatccatattgttagcattatcctaattctggctctgcattatggtgggctgttcactgtccacagcagggaatgtttggaagaactttctcagaaggcccagagggccggatgccaggagtttgagacccgcctggccaacatggtgaaactccggctctactaaaaatacacacacacaaaattagctggccgtggtggcgtgcgcctgtagtcccagctactcaggaggctgaggcaggagaatcacttgaacccgggatgtggaggttgcagtgagctgagattgcaccattgcactccagcctggccaacagagcaagactccatctcaaaaaaaaaaaaaaaagactcagtgtttcaggtcatgtcagttgcatcctaactagctccattatttgtgcagctggttatcttagcaccaagatacatgctgcaccctaccctacagtctgtttaggaccttaaatcaatttttaaaaatggaaattatcagtaatatacaaaagtaggaggagtaggagaatgagccctggtgtagtcattgccagtttgggtggaacttttaaaaatcaccagttcatgatttgaatagggaaggtgtgaccactgagacgagaaccagcattattttccagagatggcaaaatagagcttgagaagctggccaaagagaagatgaaatgaatgctggttgcacagtgttcagtatgtagacatcaagggattctggccctgttagatatgttagaggaaaggtttgtttaacattaatacaatgtgctacaggggaagtgttgtcaaacagttatgccggtttcttaggtaaagttggccagtattcttcttgcaggcctagtttgcttcatcattaggataactgtatgcattctcattggagcctattatccagatataattgttaattatgtccattctttcattctcaaaattgatttggtttggaccatttatcagtcctgggtagaaatgcacattttctgactttctgactgtctgtctctgtggagagcctctttgtatgacaccagctctgcagcaggagtgcttgtgcacatggccattatgagaaggccagttagatttcaggagtcatggggactgtgaggacctggaatacccatgcccagtataaaggtaattcaagttcagatctgtgcaaaacccacgctggatgcaaaaacacatttgctggccaaattcagatcacaggcacctggtaggttcatcttcytctttatagggaactgttaatgttctagaccctgggtaggcaaactagggcacacaggccaaattcagctgtctgatgaactaatattggaacatagccacattcatttgtttacatattatccatggstgctttagcaccatagacagagccagagcctaaaatatttcctgtcaggcacttacagaaaatttgctgtgagtagaaatctgtgagccatcaatgccagtcacacatgtaatttaaaattttctagtggtcatactaaaaaagtaaaaagaaaaaggtgaaattaaattacatttagttgtttattttattcaacccattatctctgcaatagcatcatttcaacctgcaatcgataaaaaaaattattagtgaaatattttacattcttttttttcctgcgaagtctttgaaatctgatgtgtattatactctgtaagcccatcccatttcttactaagggacattgcaattgcttaattggccatatgtgcctggtagccattgttttggacaacatggttcatgttgtccatgttgtccaacatggacaacatgtaatgcctcaaacattctgctaagcacactgcaacccacagtactatttcaacttatgttcacgttttactgcatacttgatgagttattttttcccccaaaggatttttgttgttgttgttgcttcctgaatgttgcacttttacaataaaacaatgttgaaatgtgaatgtctggtggttggctgggctctctcactgggtgacacaccaccatatactagctttcaggtgctcaaaagtaatttcttcctcaagagattgaaaaatacctatttgtcatgggtcttctgggtctgttagaataattaccaagtatttggatagttaaaagttgcaacgctagggtcttttatacttgctctaggacrtagttgtcaggtatgaaaaatttaccatggcaagatccatttgttgtattaatcactacctttcccttagagttgatttatggttcagagggatattctggaaaatgcttagatcaaacaagaccacattcattcatggagaaagagtggaatgcaggttcgtagtaaagaaaaataatttccagggctcckgggaaaaagctttggtcacttaaatgcccttgggctttctgtaagtaaacatctgcagtcctctctattggttttctagcatatttcacacaaaagcaggggagcagagtagtgttaattaccctgagccaagtcagtattaatctcaggtctccattgttgtttaagattgatggataaagatgtgactgcccagaactacctttgttctcttactggaaagatgtggacttggaggggcaatctggagttaatagtcagaactagattgtatcctccttactgggatgtgagctctgtcacctgagtaaccaatttctttgtaaagggatgtaatctcaaatcttagctttcaagctgccaggcttggtttgcttttatatccccaaatggaaccggaaccttctttattccaatggtacattgtggtagactgtattcggcaaccttttgtatgaaagggttaacatagatctgtctcatcagtgtctttctgtttaaggatagcatraaagtgctgattgttaacttcacttggtcctatgcttattctttatttttactgtaggatttactttttcttttcctgtgtctttctctctccaaaaaaaaaaaaaaaataaaatctaccttgatgtgtcaaagagataaagaagatgttataaacattaaacaaaagttcacgtttctgtttctttgtgcccccggtcccccttttaaaaataggcctcacagcatcaggcatttgccagtgcagcagttttgaagcataggatttttccccttcctgatgtataaatgccagctctcttcccccctttgcagacacaggcattttcctcttttgagttttagttttatgatagcacattacaaagagtttgacagatcctttaagatgaagatctgttgatgtacttcctgtttatggtggctcccagcttcactggtgatgaggacacaggcgcctgaaacccagaggcagggtggatctgcaccacttctctgaccttgccagggctgaccttcatcattctaagggaactttttttctttttttcccctccctaagcagtggttctcaatttggggctattttactccagaaggggcttttggcaatgtttggagacatttttggttgttacagcaagacttggagctaccagcctctagtgggtagaggccaaggatgctgctgaacattctacaatgcactggactgtccccacaaaagaatgttctgtcctgaattgttgatagtgccaaggttaagaaaccctcccataagggatgttttctaggcttaaacagtggcctgtatgtgtctttctccttatttctttatttcaagaaaagaaaaacgctgccaaagcaaaagccatgcagtatgttcataataaattaccttttaaaacaaatcccaggcctactcttcccgaaaatgggaaagmcaaaaaaaaaaaaaaaaaaaaatcaaagtgccccatggcacaagttatccactgatgacatttccctctgaggactgttttctgggttagggtaattaccacaacccaraaggtcatggagtctaagttaaagggcgtcactgattcagctctcagatgagccaccccactgggatgtatgatggtataaactgcaattaaatcttgtgctgtatttactgtgtgattggaaggacagaagggagatttccctttagtcattcttacctagagcaaaactcatgtttttttagtgtaatgtgatttcttgagaatggtagatgttagtgaagtggggcagggagatggatttacaaatcttggagtttgcaaaatatgacttgaccttttgttcttatgttgtgggctgtgttttctattaagctctcgatcatattctctctttgccatttaagaaaaatacagcacaaacctctgtcagattttagtatatggtgacctaatttggtgggatgattgctaaagttctggaacaggccctttgtagctgatttttgttgaattgayaagcatcgaatatactaaatataattttttgtgcctaggtctcttccaaaacttgcataccatttttagcctgaactcagtgttatcattttggtcttttaragtggagggagggggagagggagaatccaattatagcaagcctgacttgattgaatgatcttagaatgaaccttgtgggaaataatgtgttggcgagaaagaaagttgagtttctaaagttacagaatctgtagatctgttacacaagtgcatgtaggtaaagcctccctggaatgattcaaaaggtagttgtaatggatgggttaaagacttcatttcaccatcatccttatccaggttctgaatacacatgccctgtckggtctgtggctcattttagatacagtgagtggaaaattgaatttaatgattaagtctttttggtttctgatttgtggattttcttgtgatttttgtacttctggatttatattgcatcttagtgaatatcattttttttcttcttaaattatctaaaatatgtgatagggtagttagcaaacctgtgttggttatacctattggcaaatgaaaggagatgacagaaataggctccgatgggcccatggctgaattacagagtggtaattattctttaaatactgaaataagagttttgcctattagaagcctcataaaaccagtgtctacaatctatctgattttgctgttgatgtaattttaggaaatcaaatgaactgggatggaaattaggtttcatactccgtggcttgtgtacccctctaagttctattaaattttataggagttttacaggtggaaacacagcagcaccacagcttttgtcacttcaaagagcagccctttcataaacagagaatacagaatcatgccttttatcttgccatttaaaaattcttcattttctgcacccaagtgatttatcacatggacggagaggacaattcaggatattgtatttcgaaaaagggaaagagaagccattcaaattcctattaaaatgaattgcactagctgtacatcattttctaatttctgagacgacttgtaaatcacaaggagagagggcattctaccattggtcaggggaaaaatgggaaatttaatagtttgtcaaagattgataagaaaggattaccactctgagagaccctaacttgatgagcaagtacattttgaagttcatcagacgtataagcagttggagagtttaattaaagttacttgtcattactcaagtttacatccggtctgtctctgggccagcgtatatggtatgccagtgacattgtcagaacttagttttgaccctgagagctgtgcgttgttcttttactccctcttgattcctctttcatcatgtagaagctgatgtgtattttaacattgtggtcaatttggtgacagaggtcttgatcagtgcaagttccagtagttagctgaattttatatttttctttattttttagctgataatgattcaagttgttggaataatctaagactgctagaaaataacatatatacacatatgtacacttgtgtaaatgccatcttgataacagaatcataaatgtgttcatgtaagggtatgtgtgtgtacgtaaatatgtattattgaatcgtattgggatgatttttttttgccctttcagatgtcaaattgtatattgagactatttattccattcttataagcaaagcccttcctttccctcttgttcctgcaaagcagctcagagaatgacttttaactgggcaaccatatttttgatcttctgcagagctaggagcactctgacatatggttcaacaaaggctcgcagaccggggcatccagtacttgtggtgcttctgttaacgcctgtttatcagattattgaagggcaagctgctttcctcagaacgtgcttgctctccctgactctgtgtaatcctatccaggcacggagctgatattgttatacaaacaaaactcaataggcattactgaaatccagagagtggattctttaggattggaccttttgtgtgtgtaaccacatttgaaggagacctaagaatcatcatctggaactttttaaaattgcagttactggaaactaaagccagaaactaggagaaaaccctccgattttttgtttggttatttttaagtggagaagttacaaaggtgttagctgttaagatgtggagtgaactggaatccagtggctctcaaatcttgcagctcatcagaaacccctggtgaactttgtamgtggcactcacccctattccttaactgtgaaatctatacatttttttttcatccaccccagataaatcatatgtaggtgggctcttggtccagtttgggaacccgtaaaagaagttatcaacctcatcataaccttcccaggcaggaatcaatttctttgaatataagccattcaaattccataatatgatactggctctaaaggcacatttaattatgtaggacacaccatccctttcgcaaaatcgcacaaagatttcaacttaggcctaaaatctttggcacatacgttgcactgggcacggatcccttggcctagataatactgaattaaactcctccctttcctgccctcccacacagaatttggccagagaagctcagtgaaggttattcttaaacccatccccgttgttcaaatctggcagtaaaaaaggctttacaacttgggtcaactcctaatggggccttttgatccaagtgctttaaagtttagaccttttgtatctttgttgataaaaactgaggtgtagtataccattaaaatttttaaaaaattatttctactgaacctgttggatttaatctgtttttgctatctagtaggcttgtgaccttgagcagatgacttaactttgccacatttttttcttttcttgtaaaatgggggtaatataatccatagagttatcataagaataagtaaaagaatgtgtaaagtgttagttcactgccttccacatagtgaaggcccagtaactgttgtttcttattattatcacggtgggggaggttagtgggggaaagttacaaaatgaataagcagcagactttgccttagtcaagagcttgcatcctcaaatttggagtaaggtataattatattaccatactagaagtaggaaggattaaaagaagaaaataaagatgcactcttttttcagagaaaaatgtgatcactgatggctttttgctgcatcttgaggggagacattgcccatgaaacagttttctgagctgagcccagaagaataaccctaaaggagtgggacaratagaaaatccaactggaagaggaagtggtatggtgtactagtgtctgacacacagaagatacccaagaaataagggttgaaaaacatgaggctttatggagagaaacttacatttgagttctgatcctgttaatttctgtaaaataagtattataacactgaccacataggggccagtgtggacagtgaatactatatgtcatgtacctagcaggttatctggcacgttgtaagcttgaaaagaaaataatatagttattctgtattaatatgaaggggaatagaaagacataaacttgaaacataaatgtggaccagataattaaggcatttgaatcctgaactaaggagcttagattttattcacttgacagttgagagccacggaagctttttgagcgggtgcacagctattgaagctctgtgctctcttgatttcaaggtgattaagcagaacagttttcccccagctcctgtatcagggaggcagagctttcccagaagtcccattgcatacttcacctcaggtgtgttcttggaattgtggccatgcccaccttatagctgcaatggggggctgggaaactgtttagcctgttgagcctctgtagctggaagtgggctgtgcctgcacagcctaaatggcttttggtctgtggccaggaagccagtgatacttgcaactgtgagcataatagcatgttggaggccaaagtgtactctacagggagtgcaggataaaataagaacaatacgactggtacagagaatagaggaaagggtagaggtttgtatgaaagctggcaaattcagttctagaccaaaaatgagtttagggtgcaggtaggatatccaggaagaagtgatgcatgggcaggagtaatttaggattagagtgcaggactgaaagtattgatcagtgaatcattgatttggaagatgacagtaaaaccctaagaatctgaggtaaggaaggatgagagaggaatggacaagaaccagataacaagcttaaaggaatgatttctttttaggtgccctgtataagcaacgacagtgcgaagggataccttatttagcattgtttaaacctctttatctgctccataggcatatgacctcaataaaggcagcagtgtgtttatgatgcagacccagctagaagacaagttcccaggtctggctacccacccctactcttggccacccaactcctacctcttttggacagatttctcttctcagctctgtctgtgtaatgcaattgtccctacaatggcctttgacagagaagtcatggagatccaaagaaactaattagaatgaataggcattttttataagtaattcgggacaaatggagaatccagtccttaagaagggttgtaatgagggtagctgaatttgcttttgtgggcttttactttagcgttccaccatcaaggtgacatcatatgatgtaagaatgagtatctgattggctacctgccagccaatgagggttcccccttgcctacctgtgttggggagtgcaaggctgtcaccaggagggcaggttagggtgaatgtggcagcccaggtgaggtagacctgatgattgttcgaatgtgacactttctccctgtcatagcccagcagcccctttagtttgtgactctgctgtgcctcccaattaggcctgctgtggacatctcacttctggctgaactttgggctgggttttgtgatgctctttggtcagtggaatgtcatggaaggcccatgaatagagtgcttgaatgtgcttgcatgactttacttggcctctctgttctgctaggtaccatgagaaaagcatgtcctagattcacaggtggaacttcctggccccaacctgttgcttaactctcagtcacccagtgtacccaaacaccagtgagcaagaaataaatgcctactgttgttcaataccaaaatccttttttcccctcttgcttttggtcccacagtattgttgcagtagaaatctgaccaacacagcagacaagttgactaatatgtctgctctttggccagaaaaccaacaagagccagaatggacagtgatgatggaaatgaattagttgcatctagggccatgtaacttgccctccatttgaccaaagctgaatttcattgaagtgtccattccatcatgcctgagttctatattggaaaatgatctgctttttcacaaaacacaacttcagctttcatatcctgattaacaaagacaatatgcattattagacttaatttaaaggtgtaatcagccatgcgagtcagataagggaaaaaatagtaccatggaccttttccaaattcccacaggcttaaaatataaaaattccctcaagagtgctgacagcataccttgcctgttattacagcttgagttttattttgttcctctgccagtaccagaataaaattaggttacaaatcagatctaacggtttagattattgttcatcttgagctctgcgctttctctccatttgttgtggcatagcagaaataattaaatttattagtaggcctgtcttcaaaaaaaggcttttatttcaaaatgtgcttgaggacatagtggggagcaccatgagttaagccttagtttttcaggaggtagaactgctaggatataaacgtgtggttttgcaggatgaagagatgcttgtaccccaatataacgcattcttactgcaaataacaagttttctggcaacttcttcctggtatctacagttgattgtgtgtgtgtgtgtgtgtgaaaacgatgatttttagatttactgtcttgagggtagtttagcagtggtcctgaccattcattcattcattcattcattcattcattttgtcaatccatctgtgagccattcagcaaatatttattttccaccttcttttcaggatgtgatcaatttttcttttgtatrtaataatctttcacactttgaagatcattcaaaacgggtatgtacatttttgtggtgtaatgaaaacccaccagtttaagcccagatttgtcattaaacttcctaagtttccacatactgcctctatttgttccttttttgtaatagaggttgaagattatttgaaacagaaatggatgcctttgctcaccaaaagtcagattcatcctatctaggtttccagataactcctcgttagctgctttccacagtagagattcttaagggacaacaagaccagcaaaatgactcaagagtctttaagaagaatgtgtgccccgagggctcctcagatgttcaccctcagtctccctgcccatgttgggccagctctcagataattctctgatgcagttaagagtgtgggaagtgatagagggcattgcggcagagaaaaaccctgtgaacaactgtcttgctggtttgatgaatatttaatgtgctcctactggtttaggatgctaggttcatctaaatgtgcataactacttttagggtcttaaatgcccccttgctttctggagacaattaaaattttaaatcctgtaaacagttttgttacatgcaaagaatacttgtgtagatcacctgaaactgtttcccaccaattgttgtttgggaaagactgttgtatttgaaatactagaacaggtgagtgaggtagaacatagtacagattctctctagcatgaggttatgtggggctcaacggaatggtagagcatggggtctgaggctgtagaaagagtaaggtattttagaatgaaaatctttgtgggtatggctgggcacagtggctcacgcctgtaatatcagcactttgggaggcttaggcgagtggatcacctgaggtcaggagaccagcctggttaacacggttaaaccccatgattactaaaaaaaaaaaaaaaaaaawagaaaaaaaatagaaaaattagttgggtgtggtgacatgcacctgtaatcccagctgcttgggaggctgaggcaccgagaaccacttgaaccagggaggcagaggttgcgttgagctgagatcgtgccactgcactccagcctgggtgacagaatgagactccgtctcaaaaaaaaaaaaaagaaaaaagaaaatctgtgtgtgtgtgtgtgtgtgtgtgtgtgtgtgtgtgtgtgtgtgtgtgtttagttgtactggcttatttttcagccatgaagagttctagatgcctttaatagcagtagttgtagttgtagtcataataacttattgaatgtatactatgttcttggctcttccatggaacatcttgtttgatttattctaacaagcctatgatgaaggggctgttaatattctcatgtgacaaaagaagcaaggtctcgaagtggtttgtttatgttccaaacatttgtgtagtgctgtaatacatgcttttcacatattacattaattcttacagacatcttatgagatactggctttttttttttttttggggggggttggagtctcgctctgtcaccacccaggctggagtgcagtggcgcaatcttgtcttggctcactgcaaccttggtctcctgggttcaagcgattttcctgcctcagcctccagagtagctgggaccacaggcatgtgccacaaggcctgactaatttttgtatttttagtagagatggggtttcaccatgttagccaggctrgtctcgaactcctgacctcaggcaatctgcccgcctcagcctcccaaagtgctgggattacaggcgtgagccacagcgcccagctgagatactatttttacagtgaagatattgatggggagaaagctaaggcgcctttctaaactcacatccctaacaagcgggtgagcaggatttgaaccagaccctctcgctctttcaccatcttactaaagagcttatagttcataaccactggagtattccacttctcgtatacaagaacagctggaaggacagactttgctagttttttatcagagagtaaatctgaaatccacctgcagacctatgtctagtggtaacttgctttgttgatatctgacttactgtagttcagcttctctctagtagccccgtatgttttctgcttgttttttgtttgtttatacttgaagatctgctctgaagattttctcagacctctggtaactgtgagttacatgggaggctgcttagaattcttaaatgtcagtagtagctacctagtgtgctgctgctttatttcatgcataagcaaaaggagaagtaacctgtataaaaacttgtgtgccatgataggatattgctcttgctttctatcttatctsacttttttcttctttgtattcatctaggatgactgggaggggctcagggaaataaatgtcgttgcatggctgctttgtgccaagcatattgttaagtgatttgcatacctggtatcatttacccctggcagcaactctatcaggaagctagcagtttttattgctatttcataaataaagatgctgaagcttagagtggccagtggtagagacaggatttaaactcatatctgcctagtgtcctatctagtacattttctcctctgcagggctgcctcagactcaggttttttgtgagctgcctgctaattaggtggttagtggctgctgctttctcatgtttagttttgtttattattaaaagaaatctggctgggcacagtgcttcacacctgtaactgcagcactttgggaggccgaggtgggtggatctcttgagctcaggagttcaagaccagcccgggcaacatggcgaaaccctgtctctactaaaaatacaaaaaaaaaaaaaaaaaatcagttgggcatggtgatgtgcacctgtaatcccagctacgtrggaggctgaggagggagaaccacttcagcctgggaggtggaggttgcagtgacctgactgtcacactccagactgggcaacagaacgagaccgtctcaaaaattaaaattaaaaataaaaataaaagaaatcttattgtttcattttactgtcttgattggctttaaccctgtttccaatgcagtcttagagatggaatacattataatggggataaccatgtctcagtgtcatctctcatttgatctaatcagagaatacgaggttatatattgacaagattgtagggacccagatgagggggctgcattgttttactgtgcaaaagtagtttatccgttttttattgtgagtgcttattgagaacctcattgctctgtgatcttaatcattactaagcaagttgaaagatacagtggctgtttattaggttaagggaagcccacacatctatccaataaatatctgtaaagcacctgttacatgctgtgcactgttacaggcactggggatataggaatgaatacagcagaacatgttcctcatttgccctaaaaacataaccagtgtttggaaattctagaatggacctctcattattttcatttttatttcattttaggctattttatttcctaaagtcactggtgactggccatctttaacccttgaaaatattactacaagtgaagatctcttgatagcaaaactgatgactttaggtcttccctgcctgctgttgaataactcttttaagtttgttatgaaatctgtaacatgacttcagtatcatctagtcaagctcctacatttacctggtgaggaaattgagatccagggatgaagttcaaatagcaaggcaactccattcaaagtaggaattgtgacatgctgttgttttgtgtcttggcattcttgaacagaatttcaaaaacccagaaaaaggctggacgtggtggctcacacccataatcccagcactttgggaagatgaggcgggcagatcacttgaggttaggagtttgagaccatcctggccaacatggcgaaactccatctctgctaaaaatacaaaaaaaattgctgggcatggtggtgggggcccgtaatcctagctacttgggaggctgaggcaggggaatcacttgaaccctggaggcggaggttgcagtgagccaggattgcgccactgcactccagcttgggtgacacagcgagactccctctcaaaaacaaacaaacaccaggaaaaatgttggaatgttaactctatcccatccagctatcagatggttgcagctttacttggcctagaattccttggacatcttctcccacagaaaaatcccaatggctacatgtattcaaattgtttatggagtttttgaaaatgaattgaggaggcacatggatggctgtttttgcagcggtcttgatgagatatgatgaaagtttggttgagtatgattgtgaaggagataatagagaagtgaccagatttgaagaccttggtgagataaaagtgatgtctcactgtgctgatgagaaaagtttcagttgaaaatttgtattgacatgtagctttttggtagggataatttactggtaaaatgaaatgaaatataatgctatgaagctttttggtagtacctgagagtttcagtaatcacttatatatatattatatatatattatataatataaatatatatactatataatatatagtatataatatataatattatatataatatataatacatatattatatataatatatattacatattattacatattacatattacatatgtattacacataatacatatattacatatatataatatataatatataataatatataatatataaaataatatatataataatataataatatatataaatatatatttatagagagctgttggtaatctccatcaaaagtaagtgctgaaccttttaaatcactgaaatttttttttaaatggttcaacaattttatagaaaacattggtagggggagatttttattttggggggagttggtaatttaatgtaccttttcatatttctaagaaaaataaaatatttagttgattgttgttggctttagaatcattatagttgagttttcaatgaattctgagaagaaaacaaccaataatggcagtttttaaatcccaaattcttccatggaaaaataaagcaactaggaaagctaaactataaactcacaaacaatatctgtaatgaaactaggttatgaggtatctccatcagtctcagaatatgtgtggatgggacaaaccacctacagctacgagacctgcgtggaattggccccagagggaagagacagaggacctgaagtctcaaatcagctgcatattgcagatgcccatgggaaagtgtgctgggcctacttgggatgtgcaytgaagagtaggcatgcttccatagcatacctagttcctggatgagtgcaaggagactgcagtggagcaagatgtggtgattttggggctctatcattttccaaactaataacctgaatctgccttctaaggtaaaacttgcaagaggaagaactgctgggggtagaagtcagaatgaacaagatggggcggtgagagtcaagtatagacaaggttcagataacagtgtggaagttgagaagacaggtctgtgaaagcagaaggtcatagtgtttggaatcactttgtgaaaataacagtgggagatctacatgttaagaactagaaaagctccaccataccccccaccctaaccccatgattagcgtttgggaatatttattttacattaaaaaatgagcagaagaaaagcattacacttgaactctatataaagttattccaaaaaaaggaaatacggagcagcactcataaaagagttgaacactatatacctgatattttaaaataagactaaaatatgagaatgtgatagatggtatgaaagaacgttatacattagttttagagaaactcagaaatgccagaattgaagagaaagatggcaggatttgggaaagaagtagaaataaaataatgtctcagaaattaagaataaattagaaagaatgcaagagcaagtagaggaggagaagattttaataatcaaagagaaatataataatgaaaaagtcctataaaatgtataatgaaaaagttgtttaggtgggtgtggtgtctcatgcctgtaatcccagcactttgagaggctgaagtgggagcatcacttgagcctgggagtttgagatagcagtgagtcatgaacgtggcactgtactccagcctagacaatagagcaagaagaccctgtctccaaamagaaaaaagggagaaaagaaaaagttgtatagaggctgcctaaaggagaaccaaaatatgtgtgataggagtcctgtaagaagaaattgaaagtaaagagaaaaaaaatattaaaaatcacaagaaaaagtcattgaaataggggccctttaaagtgaaatagtgaaatagtgaatagtgaaatagtgaatagtgaaatagtgaatgaatagtgaatagtaatgaatagtgaaatagtgaatagtgaaatagtgaaatagtggccctttaaagctatatttaaagggccactatgttccttactaaatcttctcaaatcatcccagataaataatatagagaaagtatgggtcattcatgaaaaggaaaaacaaaaatcctttgagcatcccagcaaaaagactctgtcactataaggaaaggaaaattggattcttgtgmaactttttttttctttgacagtagtgttatatgccaaaaagacaatggagtatcatatttaagatatgcaaggatagaaaatgtgaaccatgaattttataactctccaaaatggtcttcaactatgaagatcatatgattgtgagtgtgccagaaatcaggcaatataacttccatgagctgtttttgaaggaactagtggagaacaagcttcagataacctcaaagcttgaggaagcattgatgacataagtagaggtcggtaaatgattgctaattgttctttctctttacatctactaaggataccatgtagtgtttcagataatcayaattggagtgtccagtgaatttggggaaggatagcactagaggtgacacagttttgtggccctgaataaatttgtgtatctaggcaataattatcaatggccactagcatcacaaatgggggagacacctagactttatataattctccataggagaatgcagtactacctataaggtagttctgccaacaaaatagggaactttagtctgatcaagcttctacatctatcaatttacagaaattaaastgagtatcatgttaaatggcaccatggggatgcaatcagcaaaacagacaaaatccataacatgggaatctttatacaamagagggtacaaaatgtttttagcacaaaaaggggtaaatggagataaaaggggaacctatagattaaatgagattraggaataccttgatttatcttaatgtgtatggcccttatttggatcctgattgaagcaaacacgttgtaaaatggaaaacattataactagttgggaaaatgtatgtgaatattggatttttaggaacggatcattcatattttttaagtgtttcctgacattttggtttttattaataataaaaaagaatacattggagaaaaagggtttgagtcatcagtaagcgaacataggatgttgaatcactcatttgaaattttagtagatatgtgagttagggttcttcagaggagcagaaaaaaggagatatatttttaaaagacatttattataaggaattggtgtgactgtggaggctgagaagtcccacagtctgctgtctgtaagctagagacccaggagagccaatggtgtaaattcccatctctcttggaggcctgaagaaacttatggccctggttaagcttaaacactcaggcagagagaagatgttttcccttcctctgcctttttgttctattcaggcactcagggtgccctgaatgggtacctacccacattgaggtacccactcgtattaagtggtgcccacccattgaggaaggccatctgctttaaacagtctattgaatcctaaacaccctcgcagacccactaagagataatgtttaaccaagtatctgggcaccccatggcccagtcaagttgacacacagaaatacccatcatctcagaaaacactccccyttttaatttcttgttcctgtgtctctgtttttttttttttttttttttttttactgtggctttagggataaaacagtaattttggtgttgaatcacggtgttcattaaaatggagaaagcaggttttgctcttgggtagatagaggcgcctggctgctggggattgtttgagtaacagctagctatagcattcatcttcaggggttcctgttttgcacttcctctgtgaccgcagtgagaaattgtatatgagtgagacttcctagggttctttggccacactggagagcttgattacttgttacctctaacacctttattggacatggtgtttttttgattcactgtgaacatttatggattttttttcattacgccaagcatttcaaatattcctttccttatccaggatttttaaatgctgtgtttcttttggactttgtctacattttgcagtattctcctcagcatagatttctccttttaatggctacttcttcagctttatgagtttaactttttcaataataaaaacagcacaaaacatattaatcatattagttatgatcagttctcatttgtctgctcttcttgttttctttttttttttgagaccgagtctggctctgttgcccaggctggagtgcagtggcgtgatcttggctcactgcaagctcygccgcctgggttcatgcccttctcctgcctcagcctcccctgtagctgggactacaggcgcctgccacctcgcctggctacttttttgtatttttagtagagacggggttttaccgtgttagccaggatggtctctatctcctgacctcgtgatccacccgcctcggcctcccaaagtgttgggattacaggcgkgagccaccgcgcactgccgtctgctcttcttaagttgacagaaaaggagttttacagtttttacatttcttaatcctttatgggaaatagtatttctttcgttttnnnnnnnnnnnnnnnnnnnnnnnnnnnnnnnnnnnnnnnnnnnnnnnnnnnnnnnnnnnnnnnnnnnnnnnnnnnnnnnnnnnnnnnnnnnnnnnnnnnnnnnnnnnnnnnnnnnnnnnnnnnnnnnnnnnnnnnnnnnnnnnnnnnnnnnnnnnnnnnnnnnnnnnnnnnnnnnnnnnnnnnnnnnnnnnnnnnnnnnnnnnnnnnnnnnnnnnnnnnnnnnnnnnnnnnnnnnnnnnnnnnnnnnnnnnnnnnnnnnnnnnnnnnnnnnnnnnnnnnnnnnnnnnnnnnnnnnnnnnnnnnnnnnnnnnnnnnnnnnnnnnnnnnnnnnnnnnnnnnnnnnnnnnnnnnnnnnnnnnnnnnnnnnnnnnnnnnnnnnnnnnnnnnnnnnnnnnnnnnnnnnnnnnnnnnnnnnnnnnnnnnnnnnnnnnnnnnnnnnnnnnnnnnnnnnnnnnnnnnnnnnnnnnnnnnnnnnnnnnnnnnnnnnnnnnnnnnnnnnnnnnnnnnnnnnnnnnnnnnnnnnnnnnnnnnnnnnnnnnnnnnnnnnnnnnnnnnnnnnnnnnnnnnnnnnnnnnnnnnnnnnnnnnnnnnnnnnnnnnnnnnnnnnnnnnnnnnnnnnnnnnnnnnnnnnnnnnnnnnnnnnnnnnnnnnnnnnnnnnnnnnnnnnnnnnnnnnnnnnnnnnnnnnnnnnnnnnnnnnnnnnnnnnnnnnnnnnnnnnnnnnnnnnnnnnnnnnnnnnnnnnnnnnnnnnnnnnnnnnnnnnnnnnnnnnnnnnnnnnnnnnnnnnnnnnnnnnnnnnnnnnnnnnnnnnnnnnnnnnnnnnnnnnnnnnnnnnnnnnnnnnnnnnnnnnnnnnnnnnnnnnnnnnnnnnnnnnnnnnnnnnnnnnnnnnnnnnnnnnnnnnnnnnnnnnnnnnnnnnnnnnnnnnnnnnnnnnnnnnnnnnnnnnnnnnnnnnnnnnnnnnnnnnnnnnnnnnnnnnnnnnnnnnnnnnnnnnnnnnnnnnnnnnnnnnnnnnnnnnnnnnnnnnnnnnnnnnnnnnnnnnnnnnnnnnnnnnnnnnnnnnnnnnnnnnnnnnnnnnnnnnnnnnnnnnnnnnnnnnnnnnnnnnnnnnnnnnnnnnnnnnnnnnnnnnnnnnnnnnnnnnnnnnnnnnnnnnnnnnnnnnnnnnnnnnnnnnnnnnnnnnnnnnnnnnnnnnnnnnnnnnnnnnnnnnnnnnnnnnnnnnnnnnnnnnnnnnnnnnnnnnnnnnnnnnnnnnnnnnnnnnnnnnnnnnnnnnnnnnnnnnnnnnnnnnnnnnnnnnnnnnnnnnnnnnnnnnnnnnnnnnnnnnnnnnnnnnnnnnnnnnnnnnnnnnnnnnnnnnnnnnnnnnnnnnnnnnnnnnnnnnnnnnnnnnnnnnnnnnnnnnnnnnnnnnnnnnnnnnnnnnnnnnnnnnnnnnnnnnnnnnnnnnnnnnnnnnnnnnnnnnnnnnnnnnnnnnnnnnnnnnnnnnnnnnnnnnnnnnnnnnnnnnnnnnnnnnnnnnnnnnnnnnnnnnnnnnnnnnnnnnnnnnnnnnnnnnnnnnnnnnnnnnnnnnnnnnnnnnnnnnnnnnnnnnnnnnnnnnnnnnnnnnnnnnnnnnnnnnnnnnnnnnnnnnnnnnnnnnnnnnnnnnnnnnnnnnnnnnnnnnnnnnnnnnnnnnnnnnnnnnnnnnnnnnnnnnnnnnnnnnnnnnnnnnnnnnnnnnnnnnnnnnnnnnnnnnnnnnnnnnnnnnnnnnnnnnnnnnnnnnnnnnnnnnnnnnnnnnnnnnnnnnnnnnnnnnnnnnnnnnnnnnnnnnnnnnnnnnnnnnnnnnnnnnnnnnnnnnnnnnnnnnnnnnnnnnnnnnnnnnnnnnnnnnnnnnnnnnnnnnnnnnnnnnnnnnnnnnnnnnnnnnnnnnnnnnnnnnnnnnnnnnnnnnnnnnnnnnnnnnnnnnnnnnnnnnnnnnnnnnnnnnnnnnnnnnnnnnnnnnnnnnnnnnnnnnnnnnnnnnnnnnnnnnnnnnnnnnnnnnnnnnnnnnnnnnnnnnnnnnnnnnnnnnnnnnnnnnnnnnnnnnnnnnnnnnnnnnnnnnnnnnnnnnnnnnnnnnnnnnnnnnnnnnnnnnnnnnnnnnnnnnnnnnnnnnnnnnnnnnnnnnnnnnnnnnnnnnnnnnnnnnnnnnnnnnnnnnnnnnnnnnnnnnnnnnnnnnnnnnnnnnnnnnnnnnnnnnnnnnnnnnnnnnnnnnnnnnnnnnnnnnnnnnnnnnnnnnnnnnnnnnnnnnnnnnnnnnnnnnnnnnnnnnnnnnnnnnnnnnnnnnnnnnnnnnnnnnnnnnnnnnnnnnnnnnnnnnnnnnnnnnnnnnnnnnnnnnnnnnnnnnnnnnnnnnnnnnnnnnnnnnnnnnnnnnnnnnnnnnnnnnnnnnnnnnnnnnnnnnnnnnnnnnnnnnnnnnnnnnnnnnnnnnnnnnnnnnnnnnnnnnnnnnnnnnnnnnnnnnnnnnnnnnnnnnnnnnnnnnnnnnnnnnnnnnnnnnnnnnnnnnnnnnnnnnnnnnnnnnnnnnnnnnnnnnnnnnnnnnnnnnnnnnnnnnnnnnnnnnnnnnnnnnnnnnnnnnnnnnnnnnnnnnnnnnnnnnnnnnnnnnnnnnnnnnnnnnnnnnnnnnnnnnnnnnnnnnnnnnnnnnnnnnnnnnnnnnnnnnnnnnnnnnnnnnnnnnnnnnnnnnnnnnnnnnnnnnnnnnnnnnnnnnnnnnnnnnnnnnnnnnnnnnnnnnnnnnnnnnnnnnnnnnnnnnnnnnnnnnnnnnnnnnnnnnnnnnnnnnnnnnnnnnnnnnnnnnnnnnnnnnnnnnnnnnnnnnnnnnnnnnnnnnnnnnnnnnnnnnnnnnnnnnnnnnnnnnnnnnnnnnnnnnnnnnnnnnnnnnnnnnnnnnnnnnnnnnnnnnnnnnnnnnnnnnnnnnnnnnnnnnnnnnnnnnnnnnnnnnnnnnnnnnnnnnnnnnnnnnnnnnnnnnnnnnnnnnnnnnnnnnnnnnnnnnnnnnnnnnnnnnnnnnnnnnnnnnaataataaaaacagcacaaaacatattaatcatattagttatgatcagttctcatttgtctgctcttcttgttttctttttttttttgagaccgagtctggctctgttgcccaggctggagtgcagtggcgtgatcttggctcactgcaagctccgccgcctgggttcatgcccttctcctgcctcagcctcccctgtagctgggactacaggcgcctgccacctcgcctggctacttttttgtatttttagtagagacggggttttaccgtgttagccaggatggtctctatctcctgacctcgtgatccacccgcctcggcctcccaaagtgttgggattacaggcgtgagccaccgcgcactgccgtctgctcttcttaagttgacagaaaaggagttttacagtttttacatttcttaatcctttatgggaaatagtatttctttcgttttgcatgccagagaactgaggcttaaatgataagtaatgtgctgtgacttataaagctaataaaggaaggctaggatgaccctaagcatagaagacagaggcaaaagaagaggggaaatatgaaagttaaagagatataaacagtagagggtaaggggtcgtgaggtgagtgtatgaatagcagtatgagcgatgacaatactgaatatgataatgattgagaacatccgcccaagatgcatgctaagcgctttactagtattatatcactggatttcacagcacctttatgtggtagtcacagttattttctccattttacagatgagtaaacagagctgttagaatattatgtaatgtgcactgggcaggctctgccaagtgcgtgcagaagcataagctagcaatttaactgcctctcaaatgcatcatagtaatctatcttcctccttcatcatcagggattaagtaactgcaccatggacaatgtaagtaacttgcctaagtaattagtttcagtcactggcacagccaagtggagaatctctcttttctgacctggaagtattatgagtttgctcagtgagtttgtttttggaaatgctcctctatggcaacattcttgcctattcaatactgtttctttgacttctgtgtctgtttttaattgttcagctcttctctttccacccacatccccaaatatgcagtgagtagccgttgggtttcacgttgtaattggaaaaggtaaaagccagcctgaaaataattctggcctgttgggaatgttggcttcatgttttgagaatttccctcgtgtccctgacttcagagttaactatttctttaatgaggactaacatgttagtgttgtctctgaactttatttgcagtaattcactaatggaagctttcacagccaactctggtaatgaatgtagaacagcgaccttctgtagaaaaggaaagaaaaaaaatgctttctgtcctcagagggatctttcctgtttggaaaaaccaaatggacaagaaaaataaatcaagcatttgaaggaaaggagctacatcctttagagtgttatatttgtgaaaattctcatagcctagagattttctttccaatttaagcaaggaggaattttccaatgtgaagctatttttacatggccattaatggggtatttttggtgcaaaaatagtttctggtccttggtgtagcaacctttacccttttagtcaaatgttttattcttccaaccacacacagtaggagaatttcttctctaacagtcctcataccttccccaaaaaaggagacagaggaaaggcaatatttgttttgagactgattcgttacatggccgatggtgacttgaaaacacctccctgtgtgtgttttctgggaaagagaggaacaagtgagtgttaattctccactctgactgggggccaacatccctttgatactcattgtgctgcctttcctggttaggagttcttggggcacttaattaccctgggctgaatattttttaccatctactccatcccatcatgcgtagtttgcatttgcaagttcggttactttgggagattgatggagttgaaattgatgatgagccagttgcacaggtttgtttgtttgtttttgttttgagatggagtcttgttcttgtcgcccaggctagagtgcagtggcaccatctcagcttactacaacctctacctcccgggttcaagggattctcctgcctcagcctcctaagtagctgagactacagacacacaccaccacaaccagctaatttttgtatttttagtagagacgggtttcaccatgttgagcaggatggtctcaatctcctgacctcgtgatccaccgcctcggcctcccaaagtactgggattacaggcgtgagtcaccaggcctggccgcacaggggttattaattagtggaatcatattgctcattgcagaggagcaagtagaacttacccaaatttatgcatttagaatagatgttaatgtaacaaaagtgatgaaaaacttaaagattattatggtaatttatatattttttaattttgtakactagcttaataaggtgaaaggaaaaacaacttgttcttcatggagtttaagttcacatggatttatagtgcaagtagaaatcaataatgtakgacaacggagaaatgccttcattcttggatatgtctgtccagcaaatatactgataataaatatccctgttataaatgatgatgaagctgggtgcagtggctcacgcctgtaatcccaggactttgggaggccgaggtgggcagatcacaaggtcaggagatcgagaccatcctggctaacacagggaaaccccgtctctactaaattacaaaaattagccaggcgtggtggcgggcgcctgtagtcccagctactcaagaggctgaggcaggagaatggcatgaacctgggacgcggagcttgcagtgagccaagatcgctccactgcactccattcagcctgggcgacagagcgagactccgtctcaaaaaaaaaaaagatgatgaaaaatgagttgacagttgtgagatttgagtgagagattttgaacagttttccaaaccacactagactattcctattgagttagtttaaaatattttctaggctttcctgcagaaatgacttgtcatatttgtagatgaatatgttaattttgactgagaagccaggttaaatttttatttgtttccttaggtgtttcataagaatgtaagcaaccttccttcacaaaccccacacagtcttctaccaccaggttactcatgtaggataggtggatggaagaaaaacaaactttacatctaagaggccttcccttgcagcagggaaaaccatagctgcaatttaattctgctttgaggattttcaatctcaatggaatccttaagtgaaactgtgatttctcagcaagtatggtggctcacgcctgtaatcccagcactttaaaaagccaaagcaggaggattgcctgagcccaggagtttgagaccagcttgggcaaacaaaaattaactaggtatggtggcacatgcctgtactcaagaggctgaagcaggaggatcagtcaagyccaggaagtcaaggttgcagtgagctgtgaccttgccattgtacttcagcctgggcaacaaagcaagacctcatgtcaaaacaaactgtgatttctccacagtgatgaaaattttgtatgacataaactctaatccttcaactacttgctggtcatgttgataagtcatacaaagtccaactggcttccttagatttaacaacccacttaggacagaaaacccttgtggatatgtgttccttgacattcagttaatttaactaggtgtggtcttgaagctgccatcagatgtgggcagtgcagaatgggaagcaaaaggtgacatgccagagtagaagtaaagaattgtcttttaaccctgactcctttctcctctaggggtgatttgtgaaaagggtaagaatattcgagatacatcagtaaatgtactcctgaagtcacaaagcctgaagaaagttttcaggttattggacagaattcagtaattctgcacattcatgtgtctcaacacttttagggattactaattaagggaaacccattgagcttactattctcccatgttttattttaaagaccagtaagttaaatgcttcaagtgtaagactggtcatactgarcacagattaaatagacaaactacagaaaaatgcaaataagtggttgaggttgcttctggttatgatccatagaaattgtaaacaccagaacataatacaaagagggaaaagtggaaacataagagtttcatacctattgttttgatggttttacaatgcgtatcatagattttaaaagctgaactagcagttagttactagattctaggtatgaaatgggaggcattattgtatggtagttaaataaatttcacaaatttggaataagaccaagataaggtcttagttctaccacttggcttattccgttttcttaggtttttttttttgagacaggttctcgctgtgtcacccaggctggggtgtagagataggatcacagctcactgcagcctccatctcttgggctcatgccattctccctcctcatcctcctaagtagctgaagactagagctgttccctaccacatccagctactttttgttgttgttgtttggtagaaatgaggttatgctatgttgtccaggcttgtctcaaacttctagactcaagtaattttcctgcctcagcctcccaaagtgctgggattacaggcgtgcgtgagccaccactcccagccaatcttgttaataaatgatgataacagtaacaattttggaagattcatggaaataatgcataggaactacttagcactctgcatggtacatagaaactgctcaaatatccttaactctcattatcattaccagctgtcctattgttttaggaggataaaatacatatcttaagttaaaatgtttttttatttggttgtgtcgttttgcacggaatagtagggagaagcctcctgatttgtttctctcgtggaaatttgatctgtatctgctaaaaaatgtttatcccttcttctgtaaaagggactctttcccctacggtgagtagtatatagtgaatatcaatgctgatacatttaaactgtggaggcatcaggggaccaacctgcagtgatgctaagtggaactgacaagataatgacatgygggttattgttgattaatccagktcactggagaatcattgggaaatgcatttatcctttcacctgaccctcccaaccccacaaaaatgatttacagtaatcttggagtcacccagtcctttcttccacatcttccagaacttaaaaaaaaaaaaaatccgatgtttgtactatttcccctcttccctacttttgatgacggccaatttgttaaaaatgtaagaatggccagatgtttggtgtttgtgttagtggcagcctggagctaagtatgattttttacagtgaggtaaaatacttgcttcttactctaccaagtactttttacacctccctttatagccctttttgtaagcaaagatgcctgacttctgtttctcatctgtgaagtatcataggtctagagtccattagacatgatagccaaatataaaacgttctaaaaatggaaaggtttttttttttttttttccgattatgtggtggcaaaacctaacctgtcctgaaatcatttggtgattgaagtagtaattactatgcttctagaaatatttttagctctccatctccaggcgtatggtagccttacttatcccgccctcttctaagttgagcatgactctcaaactcaatcaggcractagaatgagaatatcgatatgaatgaggatatagacgtttgttgcctttagttggaatctttcagagtaagggcatgctttgctgtgttcttctatcctctatagtcagggaagtgtgaaggtggagctaccctctcagcctgggtaccccagtaagggagatgttgggcctagtcccctaagtggtgcatttgcagcatgagcaagaaaacatcttgctgttgtaagattctatttggaggactggtttgcggcataacgtagttcacccagagaagtatgtggtaaatatagggctttgatttttagtctttcatgtaatcagatgcactttcggagaagggtttcaatctcacttccaacctttgtataccttgttcctaatcacaccccatcatactataggaaaggtggaaggtggacagaatctgggatcccagcctcactcatggatccaaggtcagaaatcatctcatgtctttctgccagtgaatgtccttctcgtgacctcatgatattttgtgacatccctgatctgtccttcagtccatggaaatgcccctggctgtagtcatatttctctgtctatctaaccatgtgtctatctatattttcatatttatctggttggaagcatatatatatatctttcaaatactgggaaggcccaatattttgcctcattaggttatacatacatgataaacagcatgatatacattttaatatcaagtagataaaatacaagcttttctaagctataggtcatcactggtgaccctatcctgatacagttactttagagatctaaagagattagatattatattttcttattatatagtaccttaaatatgtctataacagataataaaatagtgcattagctcatatatactacctaaagagagacacttaatcttactgtatttatttggaaagtttaggtaatttcttacattaaaatatttttccttaaattaactgctgattcttagatcaagtcagttatgtattattgacctaaattccacgtacagtaattagtttttgttttgctggtcatactgagtcattgcgatatttctctggtatgtgattttagtcttctacatgccctttttttctcagtctatcaaggtacattacatagtttatttattctaagcgtttctacgaaatacaataattgtcactcactttttaaaggtttaaattcctaggctagcaaaggagtaagttattttcctatatgcagtcaaacctgggtgacacagtatggaagatgtttaatatctgtccatatgtctgtttattctttcatacagcgacacatgtgttgcacaactataacataccaggcatagtcagtagcgtctgggaatattcaagtgaagaaatctaagttctagctactccatggagaagatgcttttagactagaacaaggtagacaaggtgtgttttgcacgtagtctttcattttcatagtgcctggcccatgcttaacaccaaataggtagaaagtgaatgcatggacttgtaaccaacatgtgtctcatctggcctttcaaggaagtgctgtgtgaacccagaggaagtgctgtgtgaacccaggggaggagtgactacacatggttggcgtcggatgcattggaaaggcttcagataggatagtattggacttgagccaatgggaattggcttggtgaagacctccaggggacagggtgacaagccttgcctgcagtgacagcagcttgtgtgaaggcacagtgacagggattatgtgaaaagaggtgagctgtggttttcatgtccctgagggatctgtttatttgggccaataacctatatttcctttttttcccttggtcatgggtggaagatatttacctatatgactgattctgtacccagaagaggtgaaagcctagaacagatgatttctccaatatttaaagtgtaggttttgtcagcatctgcatgtgttatatagatatatatccttagcacgtggtgtgtatgtgtgtgcatgagcttgcctgtgtgtgcccgagtacgtgcctatgagtgagagagaaggaacttacttggcatgggatatgaaggaagatactcagtatttgttccgactcatgcatcccaacaaaggcgaagtaaatgtctctgtggtgtcccacataaaacatgaagcactaaataatattgagagagcctcgctgagccctccacaaatagtacattaatgtcaaggaagtgttgaggaattcccagacagygttgtagttcaataatgaccgttatttatcacaaacgtgcactctgtttgttcacattgggtaatgaatgacctttctgtttccgtggccagggccaaacaggcctctgtcgaggcgggtgcaggctgggggccatttatcatgcctcacttagcccgatcactgccttaaacgacaccaccagggacatacttgggcttaaaggatcaggcccgaagaaagccttcatgggttaactactccaaaagcaaatactgtccaacccttcctgctgtctctttctcttggatttgatgcgactacagtttggatgaaatcacatgacaggttgtcagggagagtgtattaatccacaggaaaagtatatttccaacagtgatgactcttgcaggattttttgttgttttgttgctgtctgacacagcttccttttggtttttttaattgagaatttctgtcatccttcaagtgagagkcatacagtcaagaaaatcacccggtagattaatttagctggtgtaacatggtcctgaacttggaatgaaaggagacagagcgcctgtgtattttggaggaagaggttgtcttgcttgtgatctggttgggactgttgatttagtgtggaactaaagactacttcattttagtttttataatgctgtgatgttcttgtatcctccacatggtggatagctcacagaaaagaagaggagaaacctttgcatgtggtgatttaaatactgcagtgtgaagacagcatctttgttatacacagtagttgtccttaaaagttagatttacatcacaagctggtcaaatttattcactgaaaaatgcatttaaaagccagctctgagaattgctgtgatgtcatgtggcataaccctgggaatactgccagttctgaaaacctgtgtagcaaatcagaattgccgtatttttggaaacttcactrtgtgaatttcaagactgctatgctttggaattatayggtgtgaactgtcttactctgttgtcgtggaagaatactatcatcttttaggttgataatgtttaatttagttgtgtaattacagttcaaccataaaacccagaaatctgtcaatctctccaactgtctgtctatagatatcttttaaatagaaaacaaactttaggggcttctccaggtttgctgattcttgacagatttgtccacaatgttctcatctttgaatcttcgacttacgacttacttaaaactggtgatgkttctttttgtttttgtttttttktttttttttttttggagatggagtttcgctcttgttgcccatgctggagtgcaatgccgtgatctcggttcactgcaacctccacctctcrggttcaagtgattctcctkcctcagcctcccgagtagctgggattacaggcacgcgccaccacacctggctaattttgcgtttttagtagagatggggtttctccatgttggtcaggctggtctcgaactcccgacctcaggtgatccacctgcctcggccttccaaagtgctgggatcacaggcatgggccactgcgccctgccgatggatctctttatcgggagrtataaatgcatcaaaatttgtggagctgtagtgaaatttgtgctttgtttttacttggtggcttcctttcttttttcaaagacctaatgagaatgtttaaataacagacatctgggttcagcctttgaagccttagcttgtactgtctgatattctcaagtttttgaggaatatcgggtcagtgatggacatttagctgcaaaatatattcctttagtgatccatctatttaatctcactgataaaaagatactgatactgatgagtatctttcctattttcatggaggcattattcaggcataacccaggatactcctagctgctgttgcagaatttttcactgaaatatagaaatatgtgtgtaaacatctgtctcacaacttttgtgaaagagcataatacccatttatggtgaagagaaggaataagcagttaagaaaggaagcagttgagtgaataattttgtcatttgacttgcataaaatcattgggataatttttacttataaatataccacacacaggaaggaccttttgttccattttaaaaattgcaggtgacacctgtttttttgtttttgtttttgttttttttaacctcatgttacttctcttgcttgatgttcaacccagcttaaagttaaagcagactcaagccaccattcattcattctgttgaggacagcatccatctggtatcttcttactttgttaattcagttattctatctacarttgtttctcacattgatracttaggaatttcaggaatggatgagttaggaaartgccaatgaccatggaaatagagaaaaaggtataccaaattttgggtgctttttgagttttctgtcttatgggtaaatgatatttttgtgcctttttctccattgcaaaaagsaaatagtttttcataagaattgctggttcaaactgtatatagataaacacacacataggatagatattgatgggtggtaaaagttttctaattggttcagatgagaagatttaaaaatyacttaaaagagaataaacaacatcttgtctataactattctaggtggtttgtttttctaaaaataatgtaatattttaaaaatgtttctagatgatttcatttatacatggatttatacatttgtatcttataaatatcccagaaagagtcaatcaaaaaattatatctgccaaaataagtgtaatcatgttgttcagcctaacaagaagggggtgctttgcatgcacaattccatgcaaatgaattcacatttccatttagctgtaatgggcacattctccccacagctgtgcttttcgttgtgacatggagatagaagctccactttcaaaattattggatttggaaatggagttagaatattgaatttggtgcctaaaataataactatctctttttaaaaacattattatatgctcaaaaccccttccctggactaagtcatttaattctcataaccctatgagataggtactgtgatcatcttcagaacagagttttggagcatagagagtgggtaagcatctggggcagggtcatacaactgggaagaaactgacctggacttgaacccaggctttctggctttggaactagctctgttaagtgctgtgtgtacagccttcagggtatcaggtccttatctgacattatctcaccctcttcccccagtggatcttgtagggtaggtatcattatcttcattttatagctgagaaaactgagatgcagratatgctgctctgatctttggtttttacttacttttttaaaaaaaatatttatttctagtttgtatttcagtaggtttttggggaacagggtatttggttacatgagtaagttctttagtggtgattcatcagattttgctgcatccatcacttgagcagtatacactgaacccaatatgtagctttttatccctcgtcctcttcccaccctttccccgctgagtccccaaagtccagcgttatcattcctatgtctttgcattctcgtagcttggctcccacttatgagtgaaaacatatgatgtttggttttccattcctgagttatatcacttagaataatagtatcccattccatccaggttgctgtgaatgccattagttcatccctttttatgtctgagtagtattccattgtgtgtgtgtgtgtgtgtgtgtgtgtgtgtgtgtacacagtttctttatccacgtgttgatttatgagcattacctcrttctccttctttttatttgaagggtggagtagagttagcctgaggtgcaggtagagtctcctgactgaaagttataaattgaattctacatatgaccctaaatatatactataggactttcactataatgcccccaattttgcagggcaatttgctacatctgtcaaaatccagtgtgcatgtgcttgatatagcaaatctgcttaaaaacgtgcagaagaaatctctagggcttttactggcttaatctagtttatttcagaatgtcagatcttgcgcttggggtggtgtttgtgacaattccagacctaagcgagagtccctgcgaggatgtagtgagcgtgtgtgccaatgccctggtgaatcctttatccccaggcacttcacttgctttcctcattccggcaaagtgttttcctttcttttctttttctttttttggagacaagtctcactctgtcgcccaggctggagtgcagtggtgtgatctcggctcgctgcaacctccgccacctgggttcaagcaattctcrtgcctcagcctcctgagtagctggaactacaggtacccgccaccacgcctggctactttttttgtatttttagtagagacggggtttcagcatgttggccaggctggtttcgaactcctgagctaaggcagtgtgcccgcctcggcctcccaaagcgctaggattacaggcgtgagccaccgcgcccrgccgtgttgaagtgttttctatggaagctcatctttgaaaggagagctctgtgtaaatgttaggtattctcatccacaaagttatgggtcttccttatttctcatctactttattggcttcaattagtcacagcacagtaacttaaaatgattaataacatggaggtcagcttaggatttcagaagatgcttttcttgggaagtaaacataacggattgcttatatattactcttttaggttatttgtcaaagaacacatttgccttggaaggatgtttgttacagcatcttttcttctttctttgacatgttgcctctcytgagtcatttcttcacaaaaagtctcttgtggttgcaactgttagatggagctttgataaaaattggtctcagaatcatctggaatatttatattgtcaagttttttcatataaattattttatggccttaagagtgtttttttctcaaagatactaccctggcagggggtcagtttacagttcaaaactttgtttgctgttgagcttaattgatttaaaaatgtgcttctagccaggtacagtggcatgtacctgtagtcctagctgctcaggaggctgaggtgggaggatcgcttgagcccaggagttcaagactagcctagtgagatcctttttcttaaaaacataaggcttgccacggtggctcatgcctgtaatcccaacactttgggaggccgaggcaggtggatcaggaggtcaggagatcgagaccatcctggccaacatggtgaaacactgtctctactaaaaatacaaaaattagctgggcatggtggcgtgtgcctgtagtcccaactactcaggaagctgaggcaggagaattgctttaacccaggaggtggagtttgcagtgagctgagatcgtkccactgcactccagcctgggctggagtgagactccatctcaaaaagaaaaaaacatgaacattttggttctgatgtgagctgccaattttttctcatcctggaagtttcctaaggcaaacatattgggaatccagctctcagaaattagacaattgaattatatttcatctagattgcccacccaagctagtgaaagcttgggttttgattttggttgtgtttaataattacaatccttttggctgtgttttctatctgaaattcagctagatatagaaataaagtccaaatatacctaagattcagcatcataaatgtcaggttcatggaaggattatttatacttgtattgagaattatgctgtccagtttggtagtttccaggtgtctcattgtggcagaggcaggctgccttcctttggtcgttactgtgcctcaattacctcaatattctcttgagagaaaagggcttaggttattccattagcctctggtcagcccttcctgactctactgttactttctcctgctccagcctcctttgtaaatgtggaagtcaatttcctattcagtgggatcatgtcattcctactccccccttccccaggctggagtgcagtggtgcgatctcagctcactgcaacctctgcctcctggattcaagcgattctcctgcctcagcctcctgagtagctgggattacaggcacacgccaccacacctggctaatttttgtattcctagtagagatgggatttcaccatgttggccaggctgggctcgaactcttgaccttgtgatccagccacctcagcctcccaaagtgctgggattataggcatgaaccaccacgcccagcccgttcctgctatttaagtccttaatggcctggccttgttggtagtctgaagtgtcacatcagtggttcttaaaccaacctttttatcaggatcactttgggcatatgttaaaatatacacacgtgggccgggcacagtggctcacacctgtaatcccagcactttgggaggccgaggtgggtggatcacctgagaggtcaggagttcgagatcagcctgggcaacatggtgaaaccccatctctgttaaaaatgcaaaattagccaggcatggtggcacatgcctgtaattccagctacttgggaggctaaggcaggagaattgcttgaagctgggaggtggaggatgcggtgagctaagatcgcgccattgcactccagcactgggcaacaagagtaaatctccgtctcaccaccccgcgcccccccccaccaaaaaaaaaaatatatatatatatacacacacacacacctgaccccactgcagattatgctctttgnnnnnnnnnnnnnnnnnnnnttcaaaactttgtttgctgttgagcttaattgatttaaaaatgtgcttctagccaggtacagtggcatgtacctgtagtcctagctgctcaggaggctgaggtgggaggatcgcttgagcccaggagttcaagactagcctagtgagatcctttttcttaaaaacatttggcttgccacggtggctcatgcctgtaatcccaacactttgggaggccgaggcaggtggatcaggaggtcaggagatcgagaccatcctggccaacatggtgaaacactgtctctactaaaaatacaaaaattagctgggcatggtggcgtgtgcctgtagtcccaactactcaggaagctgaggcaggagaattgctttaacccaggaggtggagtttgcagtgagctgagatcgcgccattgcactccagcctgggcaacaagagtaaatctccgtctcaccccccgcgcccccccccaccaaaaaaaatatatatatatatatatacacacacacacacctgaaccccactgcagattaatggctctttggatatttgtaggcctgctctttgttcttacagctatgtgtaggaatcactggtaagtctttaccttccttgtctcttctctttccaaaccattgttctttgtttaggcctttgttatagaacatagcccttttctgttcatccactaccctctgacctctctgattcatgtacccctcacmttcctcattgttttctgagtgtgtagtacatagtaagtgcttgaaagtggttgaagtaatgcagtttaaagttgtaacattttgaggcctggtgttgatctacaaagatggtaggctcagttccaaacaagacactagcctttcctgtctcctggaggccagctttacttagggatagtgataataaaatatagcagctactatttactatgctcttactaccttccgggtactttgcataatgcctctcagacattattgacatcaaggcctgaactaggaatatcagataataatatctattgccatcactttgtagttgaggaaatagaggtgcagtaagttttaataacttgctgaagatgatgcagtttgtaaatgggtgaagttctgtttgaaaccagtttttttgttgttgttgttgttttttgttttttttatttgtttttttcagacggagtctctgtctgtcacccaggctggagtgcaatggcacaatctcggctcactgcaacctctgcctcccgggttcaagcagttctcctgcgtcagcctccctagtagctgggactacaggcacacgccaccaggcctggctgattttttttttttcttttgagatggagtcttgctcagtcgcccaggctggagtgcaatggcacaatctcggcttactgcagccttcacctcctgggttaaagcgattctcctgtctcaccccccagagtagctgggattacaggtaggcacccatcatcatgcccggccaatttttgtatttttgtaaagatgggttttatcatattggccactctggtcttgtactcctgacctcaggtgatccgcctgtcttggcctcccaaagtgttgggattataggtgtgaaccactggacctggttaatttttgtatttttagtagagacagtgttttgccatgttggccaggctggtctcgaactcctgacctcaagtgatctgcctgccacagccacccaaagtgctgggattcacaggtgtgagccaccgcacccaacctgaatccagctttttcatctttagatcttgacctyttgacagttacccagtaatatctcctaaaatgtgggatacagtaaagtaactggaagttgagtcacaagcagggctcctgtttgcccatgtcttgctgaatgttcggcatgcagggggtactagactattaaaggctgaatacggaggtgcagcctgaatagtacgtcatagacaagagcggatcagcagcattgattgaacaatagcaaggttttagcctggatttttgtgtttgaggtgaaggaaggggatgaggaatgtctgtacacgtacacatgtaccatatttttcacttgagggtgctttcactgatcaattttgagggattattgaaaataagtgaagacattgaaaccagatgtattagtccattagggcagctataacaccacaaactgggtgacttaacagaaatttgctttcttacagtgcaggaggctgccagtcaaatatcagtgtattgcaagtttgctttcttctgaggcctctccccttggtttggagatggccaccttctctgtgtgtcttcacatggccttccctgtctttcttcttcctcttacagggacatcagccttaatggatcaggcccccsacacttttgcccacatttaaccttattcacccctttaaaaaccctgtctccaaatacagccctgtgagggcttcaacatatgaatgttgcaggggaggcacaattaagttcacaacaccgggatggttaaacaactgccctgagatttcagatggtgaatgggagggaactgggcctaaaagctggtttctaggacaagtggtgaaggtgctcagaattattgtcctgaactcagtatgtgagaaatagttaaatggggaaggttgtgctgttgggttatctacctgaaatcagttgaagaatcgtttttggtttcaaataattaaccctagaagttgggcctgactggagacttaggccaccaaaactagacaggtttatatagtttcttttccctttgaaaggtcccttttggatttagtttcaaaataagatggccaaatttaacctccctgaagtttcatcataccttcaagtttttcatgtgtgtgaatggacagagtgcccacaatgtgatattttggccccacatggtgattaaaatcaggcttttcctttaaaactcttcaacagtttatggctgggcatcccttaaataaaaacagtctgttaaataagtgatggtataaatctgcttgtatttggaccttttgaacsaaataccagaatgactttttaaaaatagttgactaagttttatttcaataacactgtaatgttccatatcaaatgactggtcaaaaagtgacatattgggtattcttaccactctccctgagctttttcttcttcatttgctttctcttgctaaaactgtcatttggaattagttcttgtcttatgtttctgtaaataaaattgatagcatgttattagtgtctttgtttccagaattctgagagtttgcattttaaaaggagctatataaaatctaagcttttcatgcttaataggctagtctttaagtgaacaatagtgtgaagttagcacatattaattaaaatgtctgcaaaaccaaagctttatgaattcaataagsattgagaggagtttkcaggtctctgatttatgtgttcctaccagaaaaattttaatattgtaagcaaatctaaaaccaacaaggcatatatcctttaagataatagataaactttcaattaggggctttaaagaaagtaacatcactgagaaaagaaatttcacagaaaattacttttattggaggcaggaaaagcttatttaatgtgttaaatatatttaaatagctcttaagttgattacacctgaaaaatatttactgttcggtagattagagtttggcctctgtagaatgaatcttattttagatgcacagaatgtagtagacacaagagactattctatgatactgttctgtttctttaaaaatatgtccagctgctcctggaagccccagatcaacaaggaagataaatgcaaaaacaaactaaagtaaaatagttaatattcttcagctgctagaaggctggaatttctgggaaggaccagctccaagagccacagcttaaaacawtttaaactaaccttgtcagagttgggacttgaactgaaaagataggaatttgctttaaaatagacctatatagcaacagtactttcgtatttgaaaaaaatgcctgtaaaatatttttaatgaagtctattttaaggttatagagctaacacatgttccatatagagaatttggaaaataaacatttagagaaataaaatcgcaattaattacattagggaaaaagaattgctttkgacattttctgaattttctttctgtaccatacctgcttccctcacctctcaactctcacccccttccccctcgttgcctacacagcattttttgtcgttataaagctcacacccttcaatgcatttggtatttattttgtaatcctaatgcatcttagagttgtgtgtattttatgtggtactatttctttttcctccaaaaaagctgctattaaaatgactgcgtatttcagaattcatggagtcttggaatttagagaatatagcacacatatatttatgtatacacttatagtttatatgcacatatatatttagatgtgtgcctgcattttccccttgatattatatcataaacatttcctggtagtattagggtctaggcacttgtaatgtctaaatcatattaatttatgtgattgtgactttattgatatgattttgcttcagtcacttaggttgcttttagttttttgactaagtgtagttaacattcttaagaatattttttgctagttttctgtctgaatatccaggacccatttcgatctgtattctttagttactaaatctttaaaatttaaaatattagggtttttaagcccatataattcaagaagtaaatgytttatatgttgaattatgatttgggcaaatgcatcttattgtyttagggcaaaaaacttaagctttcttctattaaagtgatttaataagcactttgtaagtgtgtaatgaggatgatttgggttttattacaaatgatgtcagtgtgaattgtgtaatgatttcttgctttggtcatactaatttaagctctaggaataaatattcttttatcaaagaatcattgatgactgggcactctgtgggtgggtacatgggacagagaatatatttttacctttggagtttatattgggggagggacaggtcatgtggagacaaacaatgcacaagtaaacaaatatataggatacagaaaatttcagatggagttttttttktttgtttgtttttttttttttttttttgagatgaggtcttgctctgtcacccaggctggagtacagtggcaagatctctgctcactgcaacctccaccacctgggcaagcrattcttctgcctcagcctcccgagtagctggatctccaggggcctgccgctatgcctggctaatttttgtatttttagtagaggtggggtttcaccctgttggccaggctggtctcgaactcctgacctcaagtgatccactggccttggcctcccaaagtgctgggattacagatgtgagccaccacacccggccgataggtagctatcttaataatgcccttttccatccactgattatcttaccaactttaacaatgaaaaaagcatcaacgtatatattgggaccgttatagaagtttacgccaaaaatgttaaagagatgttttatatatacttgacacagtcatattatagtgagcaggaaagaacctttctatttaatatttgttctcccaggtcatgtgtttgctgaaaagccatcagttaaagcgaggcggccaggtgcactctctaggtggagaaattaagagcctgttgctctctttacagtgattttagttttgtgaggtttcttgtttcttttaaaagaaagagaaaaaaatatctttgtcctgtaggtataaagtcattatccagactaatggggcattgaactaacaggaggtacaaagtggactcttttcaaacctttttattgaatccgtttcactgtcaggtcaaacaagatgtgattaaacttagccctcgtccaccaccacccccaccttacccctctgcccttaagaaatgttttcatgcttaggaaatggcaccacaaaagaacagtcatgtgcttctgtccactggcaatttaccaagtgaaataagctgaaagtaagagaaaaagagagtactactgtggaatagtaaagctgcttgagaaagatgtgtaaatacaggacgataaaggaatgtgccagggcgacagagcgagactccatctcaaaaacaaaaacaaaaacaaaacaaaacaaaacaaaacagactttttgtaccagagctctaagagttaawaatttcaggcaaattacccataaaaatcccgatggtggaagggtggaacaagagaacttgggtcaccacacaactctatgacagtcattgtagatggtatgcacagagtttgttgtgacacagcaaccctgataagtawacaagaaatgaaagccttagctaaatgtttctttataggattgcaatttctagttttatttaataaacacagttataagaaccaatgcagcactgaacaggacaagagataaatgagcctgtctctgagtatgcatcacaccctataccatgtttagttcagaacagccaaggttagcaacctcctccttcaaatatcacaattctatgtgcatccatcactcagcagcaataacgtttcttattgcttctaaaggcaatgccatacacttggaaagctgtaatttcactgcaacacatacatgcacactacacacaaacacatttatatgctctctcgccagtctggtgagcagcaatccttgactcaagtcttcagtctgcaccttcgaaagtaccagaaatgtccctttaggaagacagttcagatttactttcattacatgttcccctccttgtattccagggcaagagaggaaagataatagaaaagatattgaaggcccacattaaatcaacccaacttacatttagtatgtgcagtacacatttaaattatgctgtaacagagatttctactgctacaacacaacttgtttccttttttctggatgacacagataaagtgaatttttcaaaccctctcagggcaatgtatgtgtggcaaaaaaaaaaaaaaaaaaagaaaaagaaaaagccaatggaaagtggcagagtaatatttactacttctaggcctgacccataaaatgttcccagttagatggggatggcagagctacaagacagaaggagacttggtccctgaatgacaacctggaggggagcmtactgactcaccatacctgtgctactaactttgcataagttaagaacaaacttttattctgttgaaccactgagatttgagagcctattacggccaccatcattattaatacatgcccaagccactgcaaatcaaatggaaatccaaattatatttcatgaaatgtctggtatctctcttacagctctgttgctctagcctgatttatactacttcccacttcatagaagaagttttttatctckcagtttcatattgattcattctgcaaagaaaatccagttttaccgaatgtcaatttaaattttgataagccacaatcccaccaatatttgaaaatggccaagttaatctatagcccatctgaagcaagaaccatcagaaataacttgaaaaaacaaaacaaacaaaatcaagggtttatactgtaagaaaaagcatagaataaagttggtatttaaaacagygtggtactgccaatatagattattatattgtatatatacacacacatgtatatcacacacatacatacacacggatcatagaaacagacccatgtacaaataaaaaataagagatataaatgaatacaatgtaagatagtatctatcttcagggagtatcctgagacaattcaaggtgggcaaaatgaaacattcattgaaaagttttggtgaagaagaagttaaaatgatgacttagggttgtatgtcagatattttaataatgttggcagttcctagattctacagtctttctcaaaactaagaggtttatccctaaggcaattttcttctctttttttactaccaaaaatgtttattctatcggcaggtttccagtgactagaaaaatttccttctttacaactctgaaatcgtagctcaaatcattttctaacagagtgaaagtaaaaacattattagttgatgtcagcaccagcagaaaatctcttaaaactggacatttctttaaaaaaaaaaacaaaaaacccagttttccaagtcaccaattccatgcacttaaaatgctgcaaatttcaggtgaagtaaaataayattatagtttatgttcatgtcattgatagcttggaaaattcacattttacaactctttttttttttttttttgaaatggagtctcattctgtcgcccaggctggagtgcagtggcacaatctcgtctcactgcaaattccgcctcccggtttcaagcgattctcctgcctcagcctcccgagtagctgggattacaggcatgtgcccccaggcccggctatatttgtattttttagtagagatggggtttcaccatattgtccaggctggcctcgaactcctgacctgaggtgatctgcctgcctttgcctcccaaagtgctaggattacaggcgtgagccaccacgcccagctgaaaaaaagtctgtttttatatttgtattgcaagttgacactactgatgaaatggcgtattagccttgctagataaaatacaggatgcccacttaaatttgaattttatctgaatttgagataaatgacaaataattttttaggataagtaaatcccattcaatatttgtgacatacttatcctaaaagttatttgtcctgtatcagaaattcaaatttaagtgggcatctgtttttgttgttgttgttactgtgtttttaagagggagagtctcgccctgtcactcaggctggagtacagtcatgtgatcatagcttagtgtagccttgaactcatgggctcaagtaatcctcccaagttgatgggactataggtgtacgccgccacatctggctttttttttttttccccctgtttggtagagatgcgtatcttgctatattgaacagggtggtctcgaactcctggcctcaagcagtcctacygccttggtctcctaaagtgctgggattacaggcatgagccaccacacctggccagcatctgtatattatttgctaaatctggcaaccctagtttctagaacaatttcatcagactttaaagggacattgaatggttagatagtaatagggatacctacatcaaataactggcartagttgaaaggttttttaactatataaactagggcaaggctatatctgccttatttgttgttyctaatcttattacagtgcttggcacatacgtgctaaatattcagttcttacrtggttgtttatcaataaagggaaaattgattcattcattttgtcattctctttcttttgggtttgtcacactttccccagcaacctrccttaagcattttatgagtggagttgtttcatgttcttcttttgwktttttaaagtattagtgatttaaaaggcacctgccaaatacctggtaggtgcttggtgaatgaactgtcaaggtttttaatgggtgcagaaaactgagggaggtgatgggagagcagcttgtggttaccgtgttgaaatttaacaaataattttaggttatagatgaggacaaataacttaacagtgaggacaattaaaccgtggggtggcctcttgaggcaaacagcagagactgttgctttaggcagccaaaggcaaatgtttccactgggaagatgtctattgatcctattatcccgggacttgaaataacatttccattttccccttgaaaacccatgatgctgtttttaaaatcacatacttcatccttaaactctcatgcaaagctattacttgagttaaacctctcaccagaaatgtcttcaaggagtattctctctgtaaaggtgtatattgtggaagatgaaaaaaggaagctctctttggttctctgttacrcggggtggctgctttgcaaggtgaatcacttcggagactgtgaaatatttcatgtcttataatgtattttccattatttttggtccataagcatgtatattaataagttgtacgaaatcaaatgtcagaggttcagggagacagttttgaaatcccagcattttgtgagtggaggttgtttcmtattcttttgtgtttttaaagtattagtgatttaaaaggcacctgccaaatacctgataggtgcttggtgaaatgaactgtcaaggttttttagtgggtgcagaagactgagggagggtcccagtttgggatgtgaatttgggttccagatgtaacattaatttgcgctgtcaycttgagcaaagtgcttaacctttgaaagcctcagcttgctcatccattaaatagggataataatagtaattattgtgaagattaaagaagatctgcctaaagcactcactacggtgtctaatctctgataaatgctcgaaatatttgatttgctgtattttattatttatacctgtaatttaaaagagacaattattgttacattgttaaggcttaaagctacaatagcaagtaattaattcgtacaatagcaattaatatccgagtgatgaattgtcttcctataagaagcagctaggaatgtagtcatccatgtgacggttgcaggtcctagggtggtttcttatttaaattgtaaaggaaacagccactggggcagctcaagaaacaggcttcagagtcaaaaaaaacacccatctggattcccttcctgactctgaggctcaytgaccttgaataaagtaccttatttaccttctctgaacttgggcttcctccttgggtaactggtggcaccagtgccttctatgcatagagcttgccacagtacctagaacacagcaagctcttggtaaaagcacagtgaaagagagacaatatttttattgggcgtggtggchcatgcttgtaatcccagcacttgggaggttgaagtrgacagatcacttgagcccaggagctcaagaccaacctgggtaacatggcaaaaccccgtctctactaaaaatagaaaaattagccaggtgtggtggcacatgcctatagtcccagctacttaggaagctgaggttggaggattgcttgagtccaggaggtggaggttgcagtgagctaagatggcaccactgcactccagtctgggtatcagagctagaccctgtctcaaaaaatagagagagaaggacaatattttgcgactgtgctgtctagtacagtaaccactagccacatgtggctattcacattcaaatagatggaaaaataaaattaaaaattcaattcttcggtgtttggagtggagttgtttcccctttcccccagtcatatgttgaattcctaacccctagtacttcagaaagtgaccttctttggaaataaggttgctacagatataatgagttaagatgatgccatacgggagtagaatgggcacctaatccagtataacaggtgtccttatgtaaatgggaaatttggatggagatacaagcacacggggagaacaccacacaaatgttaaggcatggatcagggcaaggcatctactggccaaggaaccccccgaagattgccatcagcccacgggaaacttcaagaggggcatggagtagatcttcccctcatggctctgagaagggcccagtgctgctgacaccttgatcttggacttctgccctccagagctgtgagacaacaactgttgttttaggcacccagtttgtggtgtgttgttattagcaccccaggacactcatgcactcagtctcaccggctgtattttgagggctcaggagccagtgtggctaccatcttggacagcgaggacactgaacatggctatcactgcagaaaattctaatagacctccctccttcggggattccaggttgctcattgctccaaaaactcaagccaagaagatagaagaggttcaaatgattgtatgaagcatgttctttgtctggaaatccagaacaaaacaaataaatgatctttgaaaaaaaaaatctctgccttaaagttgggctggtcaacatgtccagatattcacagagacttcctgttctggaagagatgcagacagaggcttaagacagccttctgtcctgtgacggacgaatttctgattctgcttccactgttaaactcttacataattgcattctatatagagagcttccctttggatccagcttgcttttccccttgtcttcttcctcagactttatgaaagtatttgcagagacgccttgtcccctgccatgagctgtaaatacttatgcagatgaagggtttgttactctagttgatgagtgttagggaacctggagcctttcctggttttgagctgtggctgaggacgtaggcaattctcatgcacactttgcattggctgaagtgcatgtcctggagtgcctcatgctacaggactggcagtgaaaagcctcttaggcttggggtagaggtgaaaacctccctccatgtttgcactctctctcgccatgcccccaccttcacgygtggttgtgactgctgggtggggctgaagtcacagccttgctgcagtctttgccctaggcaggctctgtatgatctttggtcaagggaaagcactttgtgtgcctgacctctgagcagcccattttggccctgaaatcctctgttggcaaacttcacattcagtgagtcagaattaaaggaaaatgctgaaggaacatttgcattttttatcttttccaagttaaggctgttcttttccaaagtggagttatactttagagtatcttaatatatcttatagcaactcatcaggtcttgcaaatgtattttatcttttcatattagaattatttcagactatttttattcattatgcgttttgttaaaccaagttgttcctataatgaacatggaatataaagacttgctcttccctaaattgctcagtatactatatcttgagtcgtctttatgctcaatctaatgctttattaaaggagaagacacaccytacacacatgtatacatgtgtaaaatacctgtactgtgctcctactatgtgtcaggcactctgccaagcacaatgcacttgttttattccttacaataaatctcataaagaggcaggtaattcaattcatcttcacattatagttgaggaaactgaagttcagggaagtcaggccatctggctggagaacagtttgatatcacagcaaaagttccttcccggagtgtttgtgaaataatgatttcattaaacattgttcaaacctaaattgcgtttgttcttgcagtctttggagtacactgggccttttgcagttgggasaaacccatttcctctctcagtgggaaacactccaagtattcctcttgaaacaaaacgtcaaagattatttttgcagacttctgtggagtcatttttggacaacaccctggaacaggaaaccacagtttctcctaaatttgtacaggatggaaatagataacattcttcataaaaccatggccacaaktaatgctttcaaatcaacataatggtggatggtttgttttttgcatttcttacctgaatagattatgggaacctgcagcatgggaaatttcatgaataattttacagggttttattttataaactggaaatgcggtgaaaagatatgtgtaggtgatgaaaaagagtgctataggattcaacgtatttgaaagctctccctgaaagatggatttgaaataaaacagagtctcgcaccctaagttatgggaatgagatttacgctcgctgactgaagcccaggtgctgctaaaggttaattagtgagagaatgtgatgaacttaatgaaataggtgatgatgcagtgtgagggaagcccacacagtcatcaaaagataaatgcactgagacrttgtatttttcttttctttgctacagaggagtagcwacaactacacatagaacaaatccagaggagtagctacagctacacatagaacaaatcctgcgtatacccatagcaggtccggaaggactggggtgcttaactacagactttgctgggagccatcgttccataactgctgaaactccttttattttaggtctgtttctgcgaagtcctgatagctgagttgacttaagaggagttggactaaatttttaaggctactttatttttatgattgatttttaattattctaagcaatacatagttattttctctgggcgaaaagttgaaatgtttcatacaaacctcatttccttgttkcctaaccccagacccttctccccttcttctcaaataaaagctagcactagttttgtgcatatactactagtttgcttttaacgtgtatgtatgtttatattttcttaggaaatatttaatatcctgttcttttatttatttatttttattttttatttttgaaaccgagtcttgctctttcacccctgctggagtgcaatggtgcaatcttggctcactgcaacccccgcctcctgggttcaagcgattctccctgcctcagcctcccgagtagctgggattacaggcacccaccaccacacccagctgatttttgtattttttagtagaggtggggtttccgcatgttggccaggctggtcgtgaactcctgacctcaggtgatccaccttggcctcccaaagtgctgggattacaggcgtgagccgctgtgcccaatccttgttcttatatttttaaacatagaaggtatgacatatatgtttttgtgtgtatgtgtgtatatgaatttcatacttttaaaaaatgtgtcctatttgtaccttgtttatgttaatcttcttcaatttgtatatacttcctgttttaaactgttggacagtattttcacattgtggctattttatagttatttatttgcttctcctttactagatgtttatattgtttatatttttattgacattaagatggtagtttaccaacatctgtcttcgtgcatccttgtacacatacgctgcagtttgtggtagacccatttaaaattttaatagacatgcaaaaatgagagcaccatcttaaagcaaatcttagagatcctttttgcaaagcaaaacatgcctttgtatgaaacaggatatatttaaaggtacatctcaattttgctttcctgtgatttctggcargatgaagcttgcgtgggcacctgtgactaggtttctgagaggctccagcactgtccataggtgtcaggttaggtaagattcttagaatgttaacggtaactctccctctttttgcctgttcaccaatagcagaatgcccttggcagatgaaggaacactatatggtactaagactgagcccacaaatgatacatagtaacctatgctgtcagtcagtgttgcaaacaactgaaggctgctatggcttagtttaagcaaagatggactttgttggagaaaggggagttggggaaatctctagctgagctgaaaactccagctcagaaaggattagattcagggaagaatctaatcagaactttttcactgtctgtatttcaaagtctcttcattgtaggatgggtctattttataggagggtgaataccctgtttgaatggttcctcaagagagratctagttkggaaacatattaacacaaaagaaaaccgagctgcttttaggaatacagatgcttggtggccagaaaatatacaatactagctgccatcaaataaactgaccaatatatctcatggcgtgctttatctgtataaacgtacctaacattttccaaatgtgcttttcacatctaatattcatttatttgcatggtggaaaaatgggttktttgaatcaggtatctatttttatagaattagattagggtgaagtacacttaacatttaaagcacatttaaattttaaaatgcctgagaattgtcatgaggagtcttggaattattagacttttcttgatgggtttgttgttacttattggtaatgagagagacatattctgattgaggttctagtacagctgctacaatcagtttcttctctttgccttcagtagcataattgtggaggtgaaaaatcagaaggggtagttcaaaaagtagttttcatgttaaacagccattttaaattggagtcacgtaattttccagtgtcttatgattatagctatctagattggctgaccctcagaaactgtgatgaggttaatattagtggttttaggccactagattttgasgtaatctcttatgcagcaatagataactaatacaatgttgatacaattggggctgtatttttggttgatggtaaaatattttgagttcttttggaactagattttagggagtttaataaacccatttttgttaatttctttttaaggtgtttggatacagtattagctgatactacttttctctctctttgcgtctgtccttcactaaacataatctttgaaaaggagacatttttgtttgtttgctgtgctttccaagaaggatggggtctgactttctctttttatggtcagttataaagttgtaataaggattattttgacctttctggagaatatgtcatgacaattatatttcaagcatgttatacagtgattataaggtgggtccagtacttggaataacaattcacaaatggaattttacagtaagacacagatctatgtttagacaaacctacttgcatacttcggattttcttacctgaagagttttttaaaaaccatggacatatactgttagcatccagcttcagtgaygttataattgggatgaggtcttactgataaatattgtgtttcttacgaacatggaagctgagtcccagagagttaaattgatgagtctttggtttagaggcagaatcaagatagaattggagactctgtatttctaggttactttgtgstctttgtattatggtgcctatgtctttgtcaagttcacggtgrctatggagatcctgagctttgagggccatgtgtgaaagcaccatgcaacagtttgccttatgaaaattgcctgatttattcttgtttccaggggcctattttagaaatgttatctcagtaacgcgtatggacatacatgcatggacttgcaaaggtcctaaaagctggacgtctcaaagacctcacctttatgagtaaagtagacattgattgccactgcctacctgacatccatgtcccttcctctttgcatctgttcatctaaattccatttattgaatgatttctttgtaacagctgttgtgttacatgcaggggataggatagtgaccaaagcatacaaacatgcttgtccttgyggagcttacgttctactgtgggaaacagacaaagagtaagaagtatgttgtatgatgataagttctaaatagaaaacattaaagcagggaaggggggtttgagaaaatggaaattttagagaaggtgtgtgcgaggttcagaatggcccccataatccccacttccaggtattcacacccttttttagtcttgttaaacaaagagagctggtttgtgtgatcagttgacgatggcagaggtgacactgtgtgacttcttaagaccaggccgtaaaggaattgcggcttctgcctttgggcttactattgattgtttcctttggaacaagctcactccaatatcattagaacgctggggaagaactgaggctccaccaacagctggtaccattttgctggccatgtgattgaaccacttaggaaatggatcctccagtccatgttaagcctcagataactgctgacccagctgacatcttgactgcaatctcatttagaaaacttgtttcagaactgcacagctaagccattgctacattcctgacctatagagatggtgacagataataaatgtttattgatgttctaacttagtgagttttgggggatttagttacacagcatatgacaactaagatgcagagtgctaggaaagtctttacataaaatattccttttggggaattcactgtgacccctttgttttctcctccaagttgatgtgttctggggtgagctgttttccttctctgggctctaggaatggacacatgacccaggtctggtcatttaggttgttaagattgctttgattggattggagatgaatatgtggccatggccatctaatgaaagtctcctgtgctttacttcaaatggccacatcaaagtccttcctgtgctgaggcttctgtgcttttcagaacataagctcagaggaaccggtggccattcaaaagagaaaggcctgtttgagagtgcagccagcactggaatgcagaactgagttgacagcaagagaatgagatctcttgagagaacagcagccctgtgctgctagaaggtagcagtactacacacatgcacaacagatgtaccccctgaatagttaygtgagacaataacctccttgccctttggttttcttttgtttaggccactttgaggtgggatggtttcactttaaaccagtgccctgagttttcaccataattataaaaacattgagcctcggtttcttatctgtaaaataggtctgatttcacctattctcatctataggctgtgagaaattaataagggaagacaggtaaagtacctggcaaaaaattgattcctctgtcttctctatttactctgtttctccttcctgcaactatgtaccccattttgtttgttctcctaaggtctgtgcctgttcagtgtgtacacatacatattcatggacatatgaatacatgctttttaaaacgtgcactattagggaaactgtactggtgcactgtaatatacatgcagcattgtcartctgctggcttatcaagcactgtgctagtggactagatatagatgagatacaggaaggtcttttcccgtaagaagagcagtctcatgtgagtgggcaatacttacctgaggtttaaactaggtatcaggtaagattatagctatttgaagatccacatatcctaaaaacctgtaatatgagggtcctagagaaggataatgctgacagtgtgatagagaaggttccgttatattgctggcttattaataaaattgcatattacaattttgaatttaagatgccaaattctatgttttagcatttttttctttggtgcctaaatcgcacatttgcattaatttttctagtagagggaatgccgctggtttatagtggtatgaagtatttttggagatggctgtgatttaatttcttcttattttcactgcatcagaaggtgaacgcagttactgagtggttctcttgtttgacaacaagcctttcccttgcctgttttgttcccagccttgtacttaggtccctaaaagtgttactaagctctctgggattgcagctgctgaccttaagacatgagccacctgtaaggtaaaagtaatagtatagaaagctttcataactgggctcttgttctagattagccgcctttccttttcttgtaggaattcttcctcaagcagttctctcagaaccatgggttttgtagtcatctcattgcagattgtaccttcagtgttttgtaattaatctcctctagactttcatggtgtagagaaagatgttctcataccccttccaaaacagcaggattcttgcccaagtctggtggttttcaaagtgtgttctggaattctgtggttgcttggagtcttctaaaattttactttctatattttggtcttccatgtaaaacttcaaaactcagtttcaagaaaagcttctaaaatagctttaaaatgttcatgttaaagtagacttyatagtcttgtaatgttttactaaggggtataaaataatatgaaagggtaggccttttttttttttttttttttwaaagcaaagcactgatttaattatagtaatttcttacttttatttctctcttagtacttctcatactcttggtttactggtgcttcaggcctcacattaggaagcttgctgaggtgtaagcctgaggtagttggaatgctgtcttgctggggggctctgggaccttggaggttggcattaaaccaaggaagtgtggagcaacagccactagatgtcaaggtgttgtggaatgggggagtgggtttcccttgaattaggaagaaacagatatctctatatccctctggccacataacttaaattttacttcttcctatttccagaagaactttcccttcctcccatcatgttttccttattgattgggaggatgctagtgatattgatgggtgggtgctagtgacagtcaagtgtgatgccctcagtctcttgtacttacgtagaacattaagactaagggtcttttaaattgtaaaatacacataacataaaatttaccattttaaccacagtgtacctctcagtggcgcttagtatattcgcagtgtgatgcacccatcaccattatctagttccagaacattttaatcactccaagtggaagcctcatacccattgagcagtcactccccacttcccatttcccaccgccccggcaaccactgatctactttctaagaccaagaattttacaaggtattttagaaattacaaaatttatattttaagctctagcataagaacaagccaaaagaaacagttacatggaaacgaagcccacagtttgcaccatgatttcattcttcttttcatcatttctgatttgccayctcaaccttggttccaaaacattttgaaatatatccttccatactttttttctcattgcatgcatacaagtgtattcccgtattttgattcattttctgcactgtttataaatatagaactatagtgtacacatccctctgcaactagctttttctgaacaggttttgttaacatgtctccaggtcattaacaaacaactctaacttattcactctgtagctgtgtaatatttcataaggtggctgttccacaaattactcattatgctgctcttggaggccctttgaagaattagtaattaatgcttagaaagtcttatgaggaggactggacaggtagaattagcccattttgtatgttggggcactgaacctcagagggtaaaccatttaaagtcacataagcagtactgctatatgatgtcttgactgctgtcgctcaagctgatgactttcaagtcttctactgcattttctctacatgaggctcctttattttcaaagaaaaaaaatgccctttatgtgkgctatttctttttctgatcatttcccatcctattttcctatttctgtgtgtgtctagtatctttttttttttaccccctctctcaacatagcctcatttagtatttggcagttttgcagttgaggtaaccartgcctcatcactccagaaatctcatattgtaaaatctttagaattaaaaaatccttatacaactgaagaaaatacaagagagtttcaatgacttgctcaagttcatacagacctccagtggccaaggcaagacttgaacccacctcttgtgaattcatatcccatcataggagacagatacacagcagctcccacagcaacattcaacaactggtagtggctctctacagcaccatgtgtgaataaatctgagactttgattgattaatgatgtctgccatgaatgggatgggtcagggagtagactagagagataactaagtggtgatgcatgtgccatgggttgcctttgccccagcacagcgtattgacagtgatgattcttgagtgtgactcgataattattttatttcaagggtttaaaaggtcagcctggggaccaatcacaaagtcagggttgagatcctatatatcacaaggctttgagactacctgaccaacatgkgtttaattactaatcctgcaaagactaatatagttcctaacgttttatccatgttttattagtatgctgatgttgaatgttgggtgtgtgttgttggcgtcttcattttttttctgcaatcaaatatggctttctttctcctttggaagaaatgacgtaaggtgggtgaaattgggctatcacagtctcagcattatggacattggggatagctaattatttgttgtgggggctctcctctgatatttagcaacatccctgcctctatccactggaagtcactgacacctccctcttaacaccaggtctttaatcttgacaacaggaaatttctcccagacattgcagaatcccgcctgtatgagaaccactggcttaaactgatacatgttttcaatgggttgtaataagttttttaaaaggtaattttctctatggcccatttgtattgtgggcgttggaatagtgacagaaaagcatgaaggaaaacaaatgtttattatcttttgtaaggcagtgggaagcttttcttttctatagtactgaataggaaagccacaaatacagaagtacattttacaacaataggtggcacactactaccagaagcctagttcagaaagtagatggagacagttttataagtgaatgtatttcaatcgttttttattaacagtattcccaacttcttcattttatttctcttaaaaaagcatattctgctttaacagtccttctaaagctaattttatttttaaaaatgagcrtaaatttgccatttgctttgcaaaacaaacctgcaatcaatatagtatttataatagagatgtcatataattgtgggattaaaccagattaactttgatgtcaattattttttcaatgcattatagaaaaaggcatttttttaaagcttttctggaatattaggtgttctgtatgtattttttaaaacaagtaaatggatgtttagtctctattagtacttaagaaacactattataataaatatgacttctgttgaaaacaggtcatgagatatcaattgagggtagctgaaaatagggcagctcaatgccttcttttcttttaaaaactcttaaacttttaattatgatgcctcagtgtgtatttggagaagactgtaagttgaaatttaaagattataaccatggtgcttagagctagcataagagactagtttattacaaactccttttaataaactctctgcccatacattgaaaaaataaatgctctcygttttcttcctgtttgagtaaatagcacttccaatgttttaagtatgcagagcatgatcaaagaatgaggagatggagacaaaaagttgctgagtgaatatttttatttttgtagttgtgtctctgacttgtttaggagttgatttttttaagactttaagcaaaataaagcttaatctagtggagactctcaaaaggaatgatgtgtcactccttttcaaartatatgtgctttaactatatagtaatgttttaaagcttttattaatgctggggttctttataatgagaataccattcattggtcatttattacaaacctattatatgttagatatgaaagaccttaggttattttctttctttaatccataaaatgatgggaattaggacattatatcccaaggaggattattaaatagttaatgtcacggtgttagtaagtcacagggctgagattcaaacccgggtctaattttgaattaccctttatctaaaatcatggaatatcaccacaagggaaaatcagagctgacatgaactttcttccccctatgcctctgtcccccttttgttccttcctttggctttggaaaaatttgtttaagcgaaattctatgagcccccaggacaaytgacacaaggagagtttcttatttgagatcttggtttgatagtccatagtttttttttttttggtcattgttgtttgtttgttatttatgagcaaggaacttgagttacagaaaggcaagcaaatgacccccatattgaactgctggagaacttatgacctgaacccaagtcttaggagagactctttcaaaattacctttctgttggcctaattttaattaataaaatactgctgcccacaacatttaaactgtgtggtaattattgtttcttttcttgtttttcttccgcattacaacataaactctcccatctgctgtatatttatagcacttaatataatccatggcacatagatgctcagtaaaccagtgtttcattattctttcataagcaactgctcttgtgacatcctttattgtgatcaatagaatatatcatgtattaattatatttcctttataatttagtaaactctaggaaacactgagggattcctgtttgtacaccaatccataaaatcacgtgtgattgcttagtcctgttactaaagatgttgagacacagaagaggaaatattgtatgtacatttcagagtgaaaagtaattcctcagggttggatatgaaattgaaacagttgatagtaagagtgctgcactaagaagggaatccttcccctaaattttaatatgtcccctagtcatgctattccatcttaatgagaattgattttgtcctttcacctatcacagacccttacatgcttccttcccagcccgtgaaagccattgtttgatgagaaaaaaaatacatgacttttctccccaggcatagaaggataatagctgtgcttttttttgkttttgttccttttttttttttttttttttttttgagacgaagtctcgctttgttgcccaggctggagtgcactggcacaatcttggctcactgcaacctctgcctcccaggttcaaatgattatactgcctcagcctctggagtagatgggattacaggcacgcaccagcactcaccggctaatttttttgtatttttagtagagacagggtttctgcaggttggccagactggtctcgaactcctgacctcaagtgatccacccgcctcagcctcccaaagtgcygggattacaggtgtgagccactgcgcctagcccattttttaaaattaaagcttttcaggtaactgttgtttcacatgcagttgtataaaataatacagagaggtcccttttatacttttcccagggtgtgtgtgtattaagttctacacaattttatcactggtgtagattcatgtatccgtcaccacagtcaagattctgaataagtccagcaccacaggcagggttgccacagccaccccccttccctgtccccatctctgtccccaacccgggcaaccactaatttatcctgcatttctaaaactgtcatttcaagatgttgtataaaaggaatcatagagtaagtagctttttaggattggcttttttaattgtctggttttctggacaatcatccaaattgttgaagatatcaatcattggtttctttttattgccaatttttaaaaatatagaatgttactttaagaagatcgtttaggaagctgagcctgtattatgatagtttcagtcacacaaggtgtaaagggaggtcgtttgctatgattgttgttctccagagtctccaatgagtagctttttcttagtggggaaaaaaaaaattggcacagtcactgcttctcaaagcttttgtcaagctgggggccaaaaacaaaatcccacgaaggcattgatcaaagatatcattgtaggaggaagtcctagagggcagaaaatgctgtcttccttttgctgtcttgccacagttccctgttattagagtcctgtcctttgtcttcaaagctttggaraagtgcttcacataaaagacaatgaagcaggggccacctaagaggcttgtctttgttgttgtttatgcagaaagtactgttctctgctattggcaaagtaattttcagctctagatgagcccagatcagtcacaayagttttcacaagcctgataggaaggcctagagtggtgttaattagtcagagatgggagaaggaggacatgtgttagcatattcaatcaatgcagagtttcttcaactggcatgggggcattcctcagcagtcactgctacagtagggcacttaatgcatgccgatgcccgtgggtttgattgcactatttaaattttctgccatgcatcccaatggtggcgaaatactgctgttttagagatgcattatgagttgtgaaattagattgaaagaaccttatgggggcagaattaagatatgacacaagcagaggtgaaaatggtaaacatttgtgtgcaagttgtatcatcatgtaataatacaggggtctccaactccayggattggtaccggtccctggcctgttaggaactgggctgcacagctggaggtgagcagctatgagtgagctccgtctcctgtcatatcagtggtggcattagattctgacaggagcgcgaaccctgttgtgaactgctcatgccaggggtctagattccttgctccttaagagatgctaatgcctattggaaaaagtgtcttccacaaaaccaggctgtggtgcccaaaaggtgggggaccgctggtataatacatttattgaaacttttggaagttgtcatgtagtgtagtggcctcctttggccaaggaaccataactartattaaagattatttctaatgtaggtattactcagacttttttttttttttttttgagatggaattccgctgttgttgcccaggctrgagtgcaatggcgtgatcttggctcaccacaacctccacctctgcctcctgggttccagcaattgtcctgcctcagcctcccgagtagctgggattacaggcatgcaccaccacgcccagcacgcccactaattttgtattttcaatagagacggggtttctccatgttggtcaggatggtcttgagctcccaacctcaggtgatctgcccgcccaggcctcacaaagtgctgggattacaggtgtaagccaccgtgcccggcctgatgttactcagacttaaagagtagctgcatacagttccctttcactcttctggactttgttttccagacctgcttgtaaaaatctatttcagggagttctctcttgttttcttagtgtctgtctgatgtcagcctacttagtatatctgcaaagactcagagtggtttatcggaaggttccaagtccctcctactatgtgacattgggcatgacatttaactttgtggggtcttaattgcctcaagtataaaagcaaacgagcagatttcagtagatgatgcctaaactctcatctaggtttaacagtcaataaaatctatgagggcgaactgtaagacctggcacctttttctgaagagagattgattatgcagtgcagttgtcttgaatgcactgcacaaggatgtgcagacccaggaactgcttgtctaatgaaaggaaccagctgaatgtctctctgggctgccagtgcttagggcctgacccagacggggcttccccctctttgagcagtggattgtcttggactgagacagtgaaatctcctttcttcactcctcttctttaaggaggatcagtgtcatctgcctcacctgtatgccttccttggagatgttcatgagagcatttaggtggtgggtaggtatataggcatttgctctaaaattacttcaactttgttttatgtttgagcattttcatagtattagatagggaaaaaaaactagtggaaattgaattgcttaaactttgggagcaagkcaattagaatgtgtgcgtagctgcagatcccagtagcctagacttaattcctggccttctctcagatgtcaagtgtccacaggacaggaatttgtaatgggtgaaggatgccttcatttccccttgccttttctgcttatttgctatgcaaagcaattattccagattttcagtgtgggcctcaggagcccctgtgttaccttgggcaatatgactctgagttcctaagacagggctctgctccctgctgctccttgcaagccttgggtgacttcagtgtgttttccaggttgtcatagcattctgaacataccatttaagctggtcaaaggtaaggccacctttgaatgtgcagttcaaccttttcccactttccatagaaaagagacagttcagcaggttgagggaatgacctagtatgaacstcagtgttgttctatgtatttagcagaactcttttaacaacatcaattctgaacaagttacccaaggttaagttcatgctggttgaggagaatagtgctggagccagatagctttgaggtccagccctggatcttatcctctcctaagttagggaattttacgcaagtcacttaacttgtgaatccacagctcttcacatttgtacaatggggagagtaaaaataccttacctacctcctgggttattaggagaacacagtcaaacaatcccttcaaaatcctctctttgaacctgtcatggataattctcaataaatgtcacctagggtaataagaattctccctgctgtataagtagaaccttttgtatcattttacccttatttacccaggatttctatatgtaccccaggagacacaagtgtcctaatatctcacagaaatgtcaagactttgtcttgtggcattgatctctaacgatgcccatgtatgataggtggataaggggacagtgcttctccttgtgtcccgatcgctgagtatggagaatcccgggcttctaattctctccaackgcaagcaaagtaacggaactgagcattcaaggattttgggagaattaaggcaaatcccagggggattaggaaaccagagtcatttggttgtcccttgatctttctttaataaacgatcaagttcagctttgcatggtgaactgaatttgtttcagctcttaattttttaccttgtagctataattctctggctgctgttgctgtctttaaatccggttcaccagccaccyggagcattccaataacacaggcgttttaaggttttcacttcaacatctgtgctttggaaattgagaagagaccacaatttaggaatatgctgagaaggaggcatggaagaccaggggttccatctcctcgtaatgtgtggtatctgttctctcattcttcccagwttgctccacaatgttcctctccccacttctatttaaatggtccaggggaagctctgtcatgatatttcaatgtctcaggaaggcccaccatgccagcatgccactgtcatggggtcacattcagtcattcattcccttgctcacgtgctcagagaccattttatgttttgccygttcctaggctgcatgttcaagcacttggctgtgtttgggtttctggagactggaagtcatttttgctgattaatggggatgatggtatttttgtccaggagcaaactggggagttgctttaggtatgtggccaggagagaaatgccttggatatttgtggggttaatactgggcttattagaatgctgtcagtcactccttgctctcaactctagccacccatgccaaacccccacaacaatagtgacaacaacagcagtaataatagcagctaccagttagagagctacatgtgaggccttgtttgagcgtctcatttaattctccaaaaatcccacaaggaatgtgttgttattttttacttgttctagctgaggaaacgggatattagagttctgagtccaaagcatgtgtcttgtaaatggtgaagctaagatttgaactcagataaccttgacctagtacccaagtttgtaccaactgtgcatcattccctatcaccctaagctagggagtaggtcgaattaagggtactaccttcatatggatggcccgatacctggtcataatgaaatcattctttcttggccttggtctctccacctgccgacagggcaggtggcagcaagctgcttacaccacatgagcatgacagagcccctttgtcttctcattggccaagttcttcttcctctcttcataaataacttcagatttcctagcccactgctctagaaaatgtatttcctctgatggccacacagccggagcaaccccagaaggcctgtggtgttgtgctgctctttattttctgccagctgcatctgtactcttctagaaaatgctgagattcagcagttgctcaaaaggcactgacatctaattatcatcctataggctgttgccacaagtctgcatagtgaagtcaatgctgagacaggcttcctttgccagtcagaggggctctggcttgtttacagatagaatctttaactcctttgaagggccagcgtgaggatactgggaaggttccngtgggacagttttataattgaaccagggaactcctctgtgcctgctcatwygtgatatggataagtcatgcagcaccggtcctcctgcatccaggaatgggctgacattgatctgttcactcttcagggatgctgtctcaactacttgcacaggtataattttattatattacgctgcatattaaatacctgcacttcccttttcycatcctgatacagatgatttcattttgcccacagtaacacatgcttctgtttgcacgtgaccatgatcattttctctacctctaggcttacagaagggccagaggtggtgctaatcaggaactggaaacttctgaccccactgtgcaggctggagtagggttgaggctgtggctgagaaccagaaggagaaagcaagggcaagtccccattctagaatacctggctaggatgtgggggagagaggtgagcatagctcctttctgtaaaaattacacttacacagagcttccctggctttggaactgtttgctcttttttttttttttttttttttttttttttttttttgagacggagtcttggtctgtcaccaggctggagtgcagtggtacggtatcagctcactgcaactttgcctccctagttcaagcgattctcctgcctccgcctctggagtagctgggactacaggcatgtgccaccacgcccagctaatttttgtatttttagtagagatggcatttcaccatgttggccaggatggtctcgatctcttgaactcgtgatccatccgccttggcctgccaaagtgctgggattacaggcatgtgacaccgcacccggccaaagtggttgcttttattctaacaacgtctgtgtttgcaacggaagagagaccacaggagtgctagagcctgagttcagggaagggtttgacaggagtttcaaggcttcttgttggcggggtagaacatcatccttccagccaggagtagctcttcatcagattgcccgggattggaaagggatcagtaccagatggcctcctggccccagaagttccttctggagcagaacagagttttcttgtcgctatgattcagcaacagcaggcattgatggcggccccactgggtgcctggcatggcatcataccccctgcctcccagaacctgcggccctcctccatggccaaggagcaattgcatgtggagccataccagcagcccccattgagctgacttggttgcctgaagtgagaatggttaaatgggtaattgatggaagcaaaaagccaagggaaggaggtacccgctgggtaactggttagtgtaagaggctatgtgtgtgtagctgaagttgatcaccattccaaggcgagtcttttcccctctcttctttccctcctttttatttaacaataataataactttattgattcattgctttttttgaggcatgcattaagcccttcacatttattaacttgaaaaaataggggagttgagggcccagaaaggtaaaatgaagtacccaaagtcacacattttagtgagtggcaaaaatgggatctcagggcatggttcctatctcttgacaatctaagctcttcaccytgtacctcttttccatctctgcagccctctctccctctcttctttatagatactctgagcgtttatcttgcatccagttagcaatgcagtttcagagatagaggacataggacgtcccttacggaactcaaaattgagtttgcagagacaaccttaacctttgtaaggtgagggaagcctagagtckcatgtggtgtgtggggcccagggatgcgtttgtaaagcttgggtgcagtggtctttcttccacagggagtctgagaccttggtctgcttacctttctctagggcacccagggcatgagaaggtggtggtgttccttataaccttggccatccagtagataaagttcaacaagtaggattggttcagtctgatacctgtagtcccctattttacataagcccctccccacattctcccttaaacacatgaagaagtgcagaggagaagggagagggcatgtcttgagacccagttatgtgaaggctgtggattgagagtttacagtgttagtgatctcttgtcatcctcacaacagctctatgcagtggaccctgttagatcttatatcacggargaaaagctccaagatcagagtttcaggtatcttttctgtttcatctctgcttacaatcttctcacaatttcttgcctctctcagatttgattccgaaatccctgagtgctagaagaaaggcatcatatcatcttgtccctggttatctcattgagttcattttcctgccctctgccccctgcccccagctccctggcctctctgctgcctgatgcactgcgtccaacctgccttgagcctgggcattcaacactctgccttctttccctctgcctttccttgttcactttcccccttccaatctcttttcttcctccttttaaattttccttgtgtgagtttgattttaaaggttttgttgggcaaagtgaacacacttggcttatagaatcacccttagggtaatttgttacagaaaattctgtgtaatgggacagtttttttgtttgagtcagcacaaataaagcaaactctccagggttgtggtcaaatgctgtttcttacagttctcaaggtttctaagtccaggctctctagttctcatgttatttggaactcctttgggcattggtctttgtatctaaaatggtctcatgtttaattcaatgtgcgcatttataacaaggtctgatttgatgacttgttcagaagggtgttttttttttttgaagattttggtagaattgtatgattttctggtctttggactagtcacttctaataacttttttttggtgagtgagtctggtcttctccatagtttccacgcttcataaagcattaggaggacggcatttcacttgccgttccccatggtctaatctcctgctgattttattttaactctgagggatttgctattggtccagctttaccatcagttgcatctccatcaatgaggctgacctggagggactggattcaaatagggagcagcatccagttccctctacctagagattgccaacttctctgaagcatttccatgamatttataatttaatttctattttggctcaagagcatcttggtacaaatccttgggtgtggccctcttttgtaagaagtacagaatgaaagaccatcttgcctgcaaactgtgtgcagatctttgtgagaaataaagtcatgtttcattattttggctgcatgacttaaaaaatgtcatgacccagaatgaatattgcttttcagtcaggtggttgcacgtttcaagatggctccagtggcttctgaaatgtgtttaccctgcgaacattccaaagttgtctgtgctttgtccagaatccctggatgccattcattaaccctcccctcccctcccctcccctcccytcacctctttgtctgacagagtcttactctgtcacccaggcgggagtgcagtggtgcattcatggcttactgcagcctcaacctcctgggcttaactgatcttcccccctcagcctcccgagtatctgggaccgtaggtgcacgccaccmtgcctggctaattttttgttttgttttgttttgttttgttttgttttgcagagatgaggttttcccatgtttcccaggctggtctcaaccttctgggcttaagcgatccacccgcctaagtctcccaaactgttgggatcacaagtgtgagccactgcacctggtcctgggtgccattcttgactacgtcacctaaatgctccttcttgtgattcractmtcatcctatatacctagtgccaccatgaccccatcaccctacgtcccctcccccttcgacttgtcctsatcactgcatattgagctttcacttggcaaagtcttcacctcccagtaccatcaccttggggcttaagtttcaagatatgaattgtgggaggacacaaacatttagtctatagtggtatgaaatgcccagcattattgtttctgtgaccttaggacaaaagggtacatagatgctattgcataaaatattatgtttcctagcttttctgttggggaactatataaaaataagttttggtacataacatactttcctgatgctaatatttccattgtcaactaggaaaaattattctttttttttttttttggagacggagtctcactctgttgcccaggagtgcaatggtatgatttcaggtccagtgcagcctccccctcctgggttcaagcaattytcctgcctcagcctcccgagtaggtgggactacaggcattaactaccccccctagcttttttttttttttttttttttttttgkatttttagtagagatggattttttttttttttttgtatttttagtagagatggattttttttttttttttttaaccatgttggccaggctggcctcgaactcctgagctcaggtgatccacccacctcagcctcccaaagtgctgggattacaggcatgagccatcgcacccattgttgggtaggaaaagtaatgattacctcccagttttgagcatcaattggtaacaaaatctgtgtaagtgttgtctgtataaatggtaaagttctattgaaatgttgaataaaatagaggcattcatagtaataataactgcgtcatactaggcttctttctatgaaataaattaggtcatttactaaaagctcaattaatgaatattactaagaaattttcagaaatcactgcttagaaatcagcaacggggtagagtgagttacttacagatgaatattcgaatcaggggtttcaggaaaaactgatgagaattgtttgtttagactgtcagtctctctgtgcctcagtttcttttttctagaatgaaggggcaatcaccagagtgtcttgaaggtcccattcagtattccattttccctacattccctgttatgttatgttatgttatgttrtgttgtgttgtgttgtgttgtgttgtgttatgttatgttatgttrtgttatgttatgttatgttatgttatgttatgttatgttatgttatgttaatgttatattttaagacagggtcttggtctgtcacccaggctggagtgcagtggcacagtcacaactcactgcagcctcaacctcctgggctcaggtgttcattctgcctcagcctcccaagtagrtgggaccaaggcacatgtcaccacatctagctaattaaaaaaaatttttttttggagagatggggtcttactggtctcaagcaatcctcccaccttggcttctcaacatgctgggattataggcatgagctaccacacccggccccttttactgtttaaaagcataaaactgctgactctccctgagtgtttgattctaataggaaaaagttcatcctctgggccctgttggatcatggttgatgtagtatgacaaaatctgtagtagcttccatgaaaagaggaaagttttgttgatgtgaagatttgtttctctttagttttatattttagaactcatcttgggttccacttccctttgatttgggggttgtagctttggtagtcagggaagcaggacctggaaatcacaaggccttttggaattgcagctcccaggcaacacggcctgcttgccttcccttttgaaggagatcagttgctccctctctctttcttagtgtttctcagcaagactatttaacatttaaggccgtaggcattaagaatccagggatctgtgttttagagctgaatgtccttctccaagccaagctcagagccaaagctctcaacagctgaaatacctgcttgctctattctttttaaccagtgcagcagtgcttccttctaggataacagagctcttctcatatattccattgactgttgaaatctcagtaagggaaacacttttcaaaatgtcttgttatggaaaggattgggccaaataaatatatttcctgttgaaagtaacgtgtactttcactgaaggatagcttctctactacagctactgtttgaaagacaataagaatgttgattctggccasgtgcagcgttgggcacctggagttctggcaactcaggaggctgaggcaggggatcacttgagtgtgctgtgattacacctgtgaatagtcacttcactccagtctgggcaacatagtgagaaccagcctcttcaaaaatgaaaaggagaaagaacgttggttctggagtcagaatgaattggttctagtgtttggctcttaggctcagtaacttgtgatcttggacaagttacttattttgtctggccgaactccaaattccccatctgtaaagtgggaatcataactctgagaatggcttgccgatgcaataagatgagataggtagtgcttgtgttgcctgaccctgagtaagtgctcactcaatattaatcacaattttttttttcatgaccatttgtacagtgtattgtcatgtatatggaaagggtttcagttctgttttagggatttctcttagaaatctccagcaatttcacttagggagcttttgaagccatctgccttagtgagctgtgctagtktgctctttttgaaaggtaagcaatctttgggccagtttggatatgactcttttacatgtccagtccatatattcccagaagaatccagaagtcatggccatcaaagtaaaatacccagccttttaaaaccactacatttggataggaagatgctctccttgaaattaccttttacctttgagatccatctagaaaaaaatctaaagagttgattgtgggtcaggcccatcagagtgtaagaatgaattcgagctgtaaaaaatgtgattctttttctttttttttgaagagccattgggcaggagtaaattggtagaaccattttggggagctgtatatattcagtaaagttgaagatttctatgctgttaggatcaggtaatttcatttgtaatttagagaaattttgatacatgtaacctgggtgacatgtacaagaatatttgtaacagcagtttgtaagcggaaaactggctacagcctcaatgacattcaccaggcagtaggtgaatttgatgttgtttattcataccttgggagaccatgcaactgctaaaatgaatgaataggaccagcagatcagtgtggatacatttttagctttactcataagatgtcatatcttaaaacatctgatacagaaatagaaaaatatgaaatcatattttaaatatagtagcaaaaaaatatagacatagcaaaatacggaatcttattttaactatagtagtgactgtatggctgttgattctgttgtttctgggcatttgcagcatttcttacttttagatagctgtcggaaaagaaaaatactataggatgggttatgggttgcmtttggcatttatttttaatgttatacaatattgtatttttgaggaaaataaattggtaatgtgtggaattgggtaactggggggaggggtagtttttgtccactgtattctctgcttattttttatttactttttaccattggctctctggtataagaaaaactgaatgatgattaagttcagttgacgcagtataaatgattagctaagtgatcagggctctgaggctgcctttctgggtttrtgtcccagctctcattcttactggctgtgagataggaggcaagagactcaacctcctcctgccctgttgcttcccctttaaaattgttcagtagagcagtgaggattgaattggattattcctgttgattcaagtactggacagtgtttgacacagaataaatgttagctgtttttgtattattatagtttgatatggaagaaggaactgtaaaatgcagttaattatgggatcctggtaaaagacactcaaatcagactctcaggggcacaagaatccagagtgcatcccattgagcctgcaccatttcctcgatcctcaccttatctttccaggttgagccctccccagacagtataatcagcatgcactacccctgttttctttctcttttgtaccttgagactttagggtggcctaaaagcatttgctggatcccctcaacctcctttgggaggctcatgctctcatggttgaccacgtcttaccaaatatgtttatcctcacaatttatctagccaatgcaaatgtcttttcagtggagatgataaattgggtatttaaaggcaccaggataatttcaaatttgtgacttccactggaatggggtacattttaaagcagagaggtaaatgtctttcttttcacttaaatacccaccattcctttttctttcttccttttttttttctacacataaacacagatactcaaccactttaaattcgtagaaattgatctaggacagaggtggttgattcccagccaggaatgggtctccttctccctggaaatatttggcaatgtttgaaggcaattttgattgttaggctttgggacarggggagtgtgctgttaacatttagtgggaggagtccagggacgccataaacataaagcacaggacagtcctccacaacaaagaatgatctagcccaaaatattaacagagctgaggatgagacgccctgccctaatttaatgagagagatgtaagtccatacccgtaactgaattcccagacttcttcaccatggcattgctccagcgttgagtaaatctggcatcacaaaatttgtsttatgtagagctggagacaaagcagggaagaagagaagcaaacctgttaagtcccacgtagtctacaactccatcaggtatatgggatgagcaggaacagaaagctgttttctttagaaattctcactcttctctttcctctgccgcgagctcttatctaaagaagggagattcagagtggataaagatctcaggaaatcttttgctctagcttttgatccctcttctcagtttcttctcttttcagtgtgtagaagtcatatgtcaaagcacagacctgtttagaatatcaagagtgttaatagaggcttcagccttcttttaggccacattctggttctgcaactgacacttgaggaggtatttcctgttgataccattcaaggagctgtttcaggagggccctggtgctgcctggggatggtgttctaagtacttgattccatctgcaaggcaaaacgttttgagagagagaggattctcttttaaaggaatcataatgtttttaatgttaattatacaggctactcgattaatcagttaagtgccatccttatacagaagggaaactgggaagtgtttcaaaatgaagagtacctagcggcttgaaagagatgtttgctctatatttatattttgggacttgggtaactgacgattcagacatctatcagatggagggctgtctgcttggagtcatgcctcagctatacacacacatgcacatgcgcacacacacacggcacacacacacacagcacacactttataggccgtcttcatgcctttgccgaggtctttctgttccttttaagagtgccatcatttctcgcagagatgtaactggagaacaaagcttgcagaggcagttggatatatattctttttactcccaccttctgcctggaatgaagatgaggtatargctgcactccgtttcatttttgacccactttgataagaatccaaggtgagggacccaactgggcctcactggtttcccactggggaaaccttataactgaaatctagtctctacttttgaaaatcttagtcatgattgactaaaggcagtctttctttaaataaataaataaataaaagcacattacaaataaagccttcaagatttgagcatttggtagcccaatatcagtcagtgaaagaagtgtttacaattaaaagtagtaattagaagggacatgacatgatttctgtagtattcttgacaaaaatgcataactgtactccagtcctgggatgacatcatacaccttcagattgagggatattctacagtaagtgatctgtactcctttgtcaagatcatgagagacaggagactgaagaactttttatagattggggagggctaaggagaaataacagctaaatgtaatgtgggatcctggataagatgctggaattgaaaaaggacattaagggaaaatctagtacaattcaaataagatttttcattcagttkatgagttaattctgtcacgctcgtgtcaatttcctggttttgatcattgtactgtggctgtgggccacagtcaacatttggggaagctgggtcagggatatattctttgtactgttttagcagcaacttctctataaatctaaacttctctcaatacaaacttatttttttaaaaagtaataattagtatgcataacaaaactaggttaaacaatttcttttccgggctgggcgtggtggctcacatctgtaatcccagcactttgggaggccgaggcgggcggatcccctgaagtcgggagtttgagaccagcctggccaacatggtgaaaccctgtctctaatacaaaaaggtataagcccttctattaatataactagcttcctcctccttccccactaccacttaatagtaattcatgtttttttcccaatatatatacttctgcctaatatcatttatctgcctaaaatattacatttttagaatttgtcataatgtatttacttaacttaagtagtctgtaacagagtgaggtcataaagtgttgaacattctcgttcttgtggttctccctttattccttttttttttgacattaagaaataccgcctgtaattcaggcttacatttttgtgtcaggaggatttgaggtctttgccttgtgcaatctttgcattcctttttaattcttttgtttctaaagtgtagcactccagacattaaatatctgggtctaaatataagaatattttgcattttaatttgcagggaagaaaaattatattttaaagtccacagtttctggcttttatttacatattttggactactttggttatgcagggagcacagaaacatgccttagcatttggatatttattattttctaagtattaagaacgtggatgttctgcagcaktggagagatgtttgagaatgctggcctggcctggccctcagaagttaatttagggtttttaactctggtgcaaatgcttaggttaccggcagggggttaataagtaaaccacagagaagccacaaaggtgcctacatgtggttgttgtgtagtttatcattagaccagaaagcgggggaaacagctgaccaaccaattcacagaaatttatcataattgagtggttaatgcaagcatactaaacagattaaatctcaatagtttttgtgtataccctggtagaaaaagtagtaactgcttacttgcacatcggaaacatgctcatgggatgttaacgtgtttgcatgcagaagcttatgatgcaatgagactgaaataatgaaaatgatgacagtaaaaaggagaaaatgtaaaatgcatgctagttggtaaaagaaaaaagtcttctctttgcttccaaggtatttaaactctgaacaaactgtgtgtgttgtggaatatattgggttagcgacctttcagaattaggaagaagaagttgtatttttgaatatagaaggccagcataattactcagagtacagtaaatgtccctatcattctttgagtttaatcttaacataattagctcctcgcacaatagagtgtttaatttgaaatgctgccaaggctcattaagtgagagaagtacttcctgagatctctgttgttaaatttgggattttttgtatgagataattttctcaagaagtgttagggtatcagaattgttgttcatattctgacatttatcacccaaactcactgaaacacttaacattttctgttttattgatggagccttttattaatattggggaatttgctatgtcacatggaaagaaattaatttccgaagtcttgacaagcgttctgagtgataggtccatttgccctgctgtgccttccccacacaatagcgatagtaaatatgagctggaaggatttatatgagctggtaggatttaattcttctatctcttcttttgggttctgtttgattattgatttctgagtcaggataagcaatacaaaatgtgaacaccagtgttttgttgttgttgtttgtttttagtttgcatttctattttggcttgacttgacatctccccaggttgtttttggtttgtttttgtttttcattaagacaggtagggtatcgctctgtcacccaggttgcagtgtagtggcaggatcagggctcactgtagcctcaacctcctaggctcaagccatcctcctgcctctgtctcccaagtaactgggactacaggcgtgtgctaccatgcctggctaagcttattttatttttttatctttagtagagatgaggtcttactatgttgcccgggttggtctcgaactcctgggctcaagccatcctacctcctctgcctcccaaagtgcttgcattacaggcataagccactgtgcctggcccccaggtgtataaaacacaatagaaccgtcctatatttttggaatgagagtacagaatattttaatatgctttgatagtttattacatgtatcaactgacatggttttactagtaaggcgtcttattttataagatcactaacctgtgcatactagaattccttggtctttgtaagtacttctatatattaacaggaggtaaatctaatcgagtataaaaaactgaaaagtaatgattattaagaaccaatataaatttactaggaacaaatcctgtgacattaaccccatttccttttttgataagtaatgaaccaaaggtgtaaaaattgctcagaaaagtcattggacagtgtgagctgcaggactataatgctgttcactttacatggtgatcagacaccctgagtgttgattaccaaggcaataaaaacctagagagacagatttcttgctatgcttctaggctgtgtttttctctgcgtcctcacgatcagctcatactgcaatattagagcagttttaagtcttctgatataggaacatgggagtcttttcccatttatcgaggtcttcttttctttctttctacggttttctgtagttttcagtgtataattcttgtattttgggggataaacttattcctaaatattttattctttttgattttttttaaacgaaattgttttcttaatctcatttttaggttaaatgagattaatccaaaaactgaattttattcagtcatatgttacttaatgacagggatatgttctgacactttgctcaattagtttattggatctaatagttgtttagtagattttaaataatttctatatacaagagcatgtcatctgtgagcagaggtggttttaattcttcctttgcaatctatatgccttttattttttcttgcctaattgctgtaactagaacctccagtgcagtgttgaatagaatagtgagagtggacattcttgctttcctaatggattttagggtttatatccttctactatctgtatgtatatttttatcctagctcagctccgtatggtgctttgtataagcctttacgttataatgaaacaaatcaaaattccttttacaactgagaatgtcaaaaactgaaccaaggattgtcttcactacagcctatggtttttcacatgaagtattcacttcaaaaatgacctagtgatggttcctttgacaggtccctttgtatgcagctttactgcattctgtcatgagacagcaccactagtttttgattccagtaatacaatgtcacatctggcagggatttttaaattcatctgtttatcacatatttattgagtgcttatcaaataccaggcataattgatgttctggggaaataacagttaataagaaacttagagtcttgctagaggctgacagattaagaaattgacaaatgtaaaatttttagactatctccccactgctaccttttctagaatttgtattttagaatacatttagcaacggaccggccgtgcacaatggctcatgccgcacacaatggctcatcccagaacttcgggagaccaaggcaagtggattgcttgagctcaggagtttgagatcagcctggccaacagggtgaaaccccatctctacaaaaaatacaaaaattagctgggtgtgttggtgtaggcctgtggtcccagctacttgttgggggcgctgaggaaggaggattgcttgagcttggaaagtcgaagctgcagtcagctgtgtttgcgccactgcacctcagcttgggtgacaacgcgaaccctgtctcaaaaaaaaaaaaaaaaaaaaaagagagagacctatggccaggtgatgaggtatgaagccatttaatrcgaagaagagctaaaagaatgagaacgtgattgcatgaaatgtttagccagaaatcttgggatataggagaagagggggagacttgattgattaggttgtaaatatttgtcctatggaccacggtaacgtggattagcattcagagtagtaaccagtagtgggagttggagtcatagagtattgggtctctttatcccaggagatttccaatggggtcagtttctactgaccttttagagagaccatgctatgctgtcttttttttttttttttaattttaaattttgttatagcccctattaatcttcattccactcatttgttaccctcttggcattcttaatatcatttgtggccctgtccttatcattttacaagggttttttttttccagatataaaaatgtttaataaaatttaagcacatcaaatttaacatcatawacaaagaacagtactttataacaaagtgaggtttacaaggggcttgctctctaaaaacagccttcttctttcccgatagattgtaagtctgtgcttgtaaagtcatgattctctgtgagaagatgaattgtatgcatgactgttttactattggttactactgcatctatcaacttggggagaaatgtattagagacaaaataaaatggttttaatcttagagagaacaatggtggtggtaacatctgccttgccagcctcccaggtagaatcccaggtggtgagtcagacgactgtgagtttacaaatatgcaacacagcagcaatcgatgaaccttcatgatgtgctggacgctgtttagggacccaaatagaccatttcaccgtcactgcatgcagatctgaaagctcctgttttctaaaggaggtttttctagccatttgggttttccatgagcaagttagtaatacagtgaatgtgataaaagcttctatgaagttgactagatttattttaggtaaagaacactttcctcaaatacatttacacaacttccttcctctcctctccctcctatatatagaaatgaagagagaaccttagcccagatacctatcctcttggcttccttttcattgtcttagatggtgcctgatgagcctcttcagaaccattggacacagttggaaaatcacaggytctgatatactttgtagatctgtattcctccataatagtgtttcccaacctcaacactattgacattttggttcccctgacagtcctgcccaactctttcagttccagtcatcatgtatataactagacccgtgtatagcagagctactgcttttcctcatggagtctcatgctgggggtaagagcttatgcgaagggagttctacatttgattgactcctagttacatgccattacaactgacagtatacccccttttaaagaaaatacatgtcaagtctttcatcttctgagaacaaaaactgtgaacaactttctgaatgggaaaatcactgggcattttgaaatatagttaaagagtattggggtaacttataaatggtgggtcagtcaactgcgtgtgttgtttacacaattccagtgactagttgggaagttgtttcctctgaaaagggacttgctcagctggaattgcttgctaaaaggctaggtttgttaaatagatttgtactctgttttgggaagccaaaatgtccctgaaactatactgttctgagatgacacagtttgaaattaggtgaaagcatttactatggagttgctcttaattaaatttgaaagatgagtcattgatcttggagatgatgatttgtcataattctatcttggtggcagagttagtatgaggtactaagggcttttatttaagctgtgtgccatctcacttatttgtgyttttctacaaaagtcctgcatacttccatgaatgtcaaaagtgatgtcttagaattacatatctaaataccttgcacatcatgctagttggcctcttaattcagagtattcgtctctggatttgaatccctgtgccactgcttgttcacctgtctgtctttcccattggattgagtagtccagagtacatgtttttgtttgtttctgtatcatacgtgtttctaaaaagactagacccacaggaggtatttgctgattaaatgggtgccccattctcctctgttcttcttctaaaatctccttcagtattcagccttcattttccatttcctctgctgccatctcaggcctctgccatcttggctggggattctactagatgcttaatggttaccccagtgccactcttctccttagcagacagagctcactttgcaaccttcaacccctgtgttcaaaacttctcattatggctggtgacatgcacagatggtcaccaacagctcaatactgtggcatttcgcacaggtgaggtgttcaagctgggcctccagggtgtctgtccttggggactttttccttttatctttaattatcattgtaaaggtttatctttacaatgtaacttgaagaagcttagaataatgatgaaaaaattatttgctgaacaccatgcactgtcttctgaccaaaccacccctccacttatggtcttattaatacatcaggtcctttgtcacctgtgtactggggaggctcctgatgttccttgtttctgtgtgcccttccctgtggttctccacctggggtctaacggtgcaaaagtcctgtcctccagaaacttttcctggattgttccaggaggaataacttctcctgctaggatgtcctttaaaaatacctgtaaagtaagagtccttatttagtaattcaaaactcctctcgttccagaaaaggaattaaaatagcttacaggaatatgtaagagtcaataagaattccatggggacaaaaaaatagtrtctgtgtgttaggatataaaacagggccagaaatgagattaatataaaaatacatatcatgaagtttgagataccttttatgggttgaaatagttaccttgtcaaagtcgctctttttttggaaggcagggtggagtggggccaggtctcactctgtcacccaggctggtagtgcagtggcacartcacagcrcactgtagcccctacctctcaggcttaagcaatcctccccaccccagcctctcaagtagttgagactataggcatgtaccagcatacctagctaatttctgtttttgttttttgtagagacagggtcttaccatgttgctcaggctgttcttgaactcctggcctcaagcaatcctgccaccttggccttccgaagtgttgggattacaggtgtacaacattcttagttgtatgcttgttttctttgcttacaagcttttggtggtttaaaatggcagaagacattggacaatccatgacatacttaggacatttatagtcacctctttcttcttgrctctgctaaattgttttgggagttttacattttttctcctgagccgtttctttatccccctttcgaaacctagctgtatggttgctaaattgataattatgttactccaatcaaatgctgtaagtggcagaatagtgatttagtaattgggttaaagttagtgtgcttcactttaatatgaaggcacatggtataccagctcggtgaaatgaatattaagattataaggttatctgagcatatgttgggtcagccctcagggaattgagtctggtggggaagatagcaaaagttatataaacaaacaaatgcattaaatgattagaaattgtgtcaagtcatgtggaggaaagttttgatagagttgacctgcctagaagaaaagactatggaagttcttttcaagattgcatttaaggtgaatcaagaaaagtgagaagatacaaggttttgcttgttttcgtaggatgttgtccttggtggaggaccagtttacacagagacttccgggctggcaatggtttgatgtgttcagaaaggtgaagaatgtccacataattggaatgatactttaacttttcttctttggaaaagttgaaattctctttaagggcatgaagtttatttacctttcaagggcctcgtctcttcttgatttgaaaaagcaggtacaaggctacattgtggttcaagttttccacttgccattactactaaactctaaggggagtgatcttcaaattggattcctgacagatttaaaattcccctagcaaaagaaaaccccaggggaaaaacatggttaaagctaaggaaagtgggatgcctcaggtttaatcagagtacctgttctcctgcccagagtcgcttacagatctgtcctgcgtgtgcatttggtaaataatcttgatgtgtggtgtttgctttcattgtcggctgtagtaaaatgtcatttattgcaccctgccaatttgaaaatcgtgctcttttatgaaaatacaagtagatgaggtgtagaggtgaggtttttgctgtcttttcactcaatttgtaaatttcatagatcatataacggtaaactatgacagtttgcttagaagcagacactgggcaaaatgtattctgaattttgactgcagatctctattctgctgtttgtttcaaaaaaccacctgtgtggatttcttttttactactgtagaatatttggaaaatatgctgaagattacagaggcaaaaatgattatccatacttctgcccccaagagctagccactgtcggtgttttttttttaatttcttttcctatttgtacatatgcacattaattcacgtgaggactcgtgtatgtgcagtcttgctatcctacttcgttgttatcnnnnnnnnnnnnnnnnnnnnnnnnnnnnnnnnnnnnnnnnnnnnnnnnnnnnnnnnnnnnnnnnnnnnnnnnnnnnnnnnnnnnnnnnnnnnnnnnnnnnnnnnnnnnnnnnnnnnnnnnnnnnnnnnnnnnnnnnnnnnnnnnnnnnnnnnnnnnnnnnnnnnnnnnnnnnnnnnnnnnnnnnnnnnnnnnnnnnnnnnnnnnnnnnnnnnnnnnnnnnnnnnnnnnnnnnnnnnnnnnnnnnnnnnnnnnnnnnnnnnnnnnnnnnnnnnnnnnnnnnnnnnnnnnnnnnnnnnnnnnnnnnnnnnnnnnnnnnnnnnnnnntcacccagactacagtgcagtggcactatcgtagctctctagggacttgaactcctggactcaagtgcagttcccgcctcagcatgagtaactgggactataggcatgtgtcacctcacctttcaccacctttttgttgggtctaaatcttgggacctgtttaatayagagctggggtaggtagggtagattcttattcagccagctacactgatagtcattttcttacacttctggtgccttcagaatggaccacaggtagatggaagacaccacatgcacacacagggagagagggaaaccctggacactgacccaggacaactcgagcaccaccccctgacatgtcatgtactacttggagaaagagagaggagaacctatcatggaaaagttatcccacagtttagataacttggaagataacttcgctattcctgctcgatccttccttccaatttcaaatcagaagaactatcttccttctgaggaagaaaagtgggtaagtggattcaggtggagaaattataaccataaccctcctcttataggagatggaggttaaaactgttactttttatggctacttgaggagacacacaaaagtaaacctttctgcattgagttttcaagtctcaatgactacctagtagttcatttacttacctatatttgtatattcctctttttgtagagagtatttttgaatattttggtttgagatcatggggaaatcgttgcactgatcagtgactaggagtcagtaagatagtgttgaaggatattgatgtctgatgttggatggtctacaacttgtcctgtatgccttccccgccctgccccttgccacctccactgctgttaggatctgcagaagtcaaaggtggaaagacagaaagcttcaatcaggaagatggggagttaacaggtagggctgtttgatgcaagacatattgctgggtatgtacctcctagctacccatggccccaaactattttgaactacattaactagcttttccattttctgtttctttccaaatttgtgttttatagataatcttcttccaaatagaaggtttttattttctgcttaattgggtgtaaacagttgattacatgtttgcttcatagactctctgtatcctggaatttttctgctgttagagaattgatcagaagaggactggactttttttttttttaagtgaagctttgattagggacgaggtcaaacagcgcacagtgttcatggacgatcaagcaaaccagtgaagcatcttgtgtgcgctactaatatcttgtgtgcgccactagtaagaggaaacatctcttattttctgattgttttccacttaagcattatctcggaaaactatttttaaagtataaccatagcatatatatatatatatatatatatatatatatatttttaatgccatcatcaaacactcatttcagcctggtaagacaatttcagcccttggtgaggagagaaggaaagttgaaaaagaaaattcacaggacgatactctgctgtgatttctaagcccctggcaatcatttctttgctctaactaagagccattaaaccagttctaacaagagctctagacatagtgaaaaacacatgctaagaataaagagtccagcaaaactttgaagattttctcacttagagatttcccagtgtactgtttacaaacatgtccccagtcttgaagtgtattcagatttctttaggctaggaaaacaaaacaaaaaaccaaaccaaatgcagacacacaccagaaaggaagttcctttaccaattcatgaaattctgggaactttttatgtgagctgctatttaaccttttgattgctgtgtggtagttttggacagtaatcacattacgtggtttgactactgttgttttgcaaattctatgccatatattaccagaccttgattatggatgatggctttcagtaagttaaaaaaaaaaaaaggctgatggttaaatcatccatatttatttagggcaaaaatgaagacctcagagtatctttgcatatattctttattcttaaagaaaaattaatacaccactcatctatattgctgaggtcacattcctggaaatgcaaagatattagaggaacattacttaaaatctaatttttcacagggacaacgttatagattcagtcagagagctctggagaataccaaaatggattaaagtaagtccaagtaaaaaaaccaaaaaacaacaaacatagagccaaagtcaaagacacagaaggcgctaaaataggtattatgtgatggtgaatcacgtcttcctctatactgtgaagaggttttggagtacctttgtattattttataatttcaaacttagagaaargttgaaagaaaagtacaaaaaccgtctgtatacttttgatctagtttcactaatttttaaatctttgtgtgtgtgtgtgtgtgtgtgtctgtctgtccgtctgtgtgtatttattagtgaagttttagacgtattatgcccctttacttttaaataattttctatttctgttctaggaaaatgggttgttttttttgtttgtttgtttgttgtttttgagaggggctcttcctctgtcrcccaggctggagtgcagtggtgcaatctaggctcactgcaagctccacctcccgggttcacgccattttcctgcctcagcctcccgagtagctgggactggcccctgccactatgcgcggctaatttttttgtatttttagtagagacggggtttcaccktgttagccaggatggtctcgatctcctgaccttgcgatccgcccgccttggcctctcaaagtgctgggattacacgcttgagccacagtacccagccaaaaaaaggtattttcttacataacaaaagtatagttatctgaattgaggagttcagtgttggtatgattttattctctcaatccttattctaagtttcaatctcagcctttgtctctttgttcctattataggagatttcttcccaagccagatcatacattgcattttgttgtcatgtctttttagtctctcttaatctggaactgttcctgagtctgtctttgaatcttatgaaattgacattttgaagagtatatggcagttattttgcagaatgtctctcaaattaggtttccctgatacttctttgtgatttgatttgggtcatgcaggaataattattagtgatattgtgtttttctcagtgcatatcaggaggcagtggatgccagtttataaaatttctcaactgtaaagctaataatgttttctcaagttaaagtgacttgtaagatgatactttgaatctgtgtaaataccatatttttcatcgaacctttacccattaacttgaatatactttgataattgttgctattactattatggttgccaagtggtggttttctaactctgtgatttctatatatgtatttctgtacctttgttgtcattctactggaaagaagcactttatttcctcctctagttatttattcgtttgactttatcattggggctcatgtattcttgccttattcrgtgggttataatatattactattgttattttgctgttcaaattgattgtcccagatttggcgagtgtgctctcttcaagctgatcattgtgttatatatccatgaccctaacttgtacatgtctaacttgattagcaaagttaaattttaacatgatagtgacatgtttacatactcagtaatgtgaaaacttagccattaaagtgttgccgtgttatctccgttagtatttttatgttgcccatatgaaaagctgttgttattatttctggtttgtatgcttgagtcgttagctcatttgaacattacagtctacttaaagctaatttacattgttttaaaatggaatcttcctgtaggtggatggtttttaaggagggatggcatcacactcttccccagaaatcaatcatgccttcttaaactatttccatcmtaaactgcagatgtgatttagtgtgtattttcttcttgttattttaatgttkagcttatttcccttgtcagttctggagaaggccaatattcgtaatctggatttaattaaaaacaccaacttataatacagagacatacctgcaaacaagaatgtcagagaaacggatgatggggggcattctctctgaaacacatggaattattttagcaagtattctgttaaggggcctccaaatcaagagattttgcacataactattctcatactttttgtacgaagatattttaagtttttcccacttaagcttttctgcagagtatatgaggacagctgttgcattctttttagtaacaaagtgtgattcattttgcagtctgaaggtcagacttgaaactcaattattatccttaaagtatttattagatggaaaattatccatagcttagtatttaaggttaactgaatggccagatttaactaaagtaacaatttagtgaaggatgttgtcattcattctttggttctccttttctgtgaatgtatcttagtctgtttgattaaccaagcgcagcactttgctgtgcaaggcgatggtcagtggaagtatttatgggttttgggcgggtttcttgttctttkttttttttttktttttttttttttttagggtcaggttttttcaattttcctttcaggtcctaactcagtaactccatagtctttgagcaaagatgcctggaagctttggcaacaacaaaagaacaaacattccttgaagcagctatttttatawtaatgttaatattttaacaggtattttactaccttctatccatttttgttctaaacatgcagtgacttgaaataatttccacctccaactgctgaatttgagaaagagttttcagtgtaaaaattgacttttaaaaaaagtctaaacccaacttgagccctactccagccttcaggtttgaaatccatgtcagtgcttgtcatttgagagcatgagtcctttctacctgccattcagcttttgaaaggagacattgcttatgtaagtgtgagagaatgcgaagcattctacaaataatgttttgttactttacatccatatgaaaagatagctctttgttttataattagtaagtacttttgccaactttgatgagtttaatattacattttattcttgaaaatttgatgtttttacggatagcaacttttttttccagatatatatgttgcatgtttaaaaattttttaaggctggttgcggtggctcatgcctgtaatcccagcaccttgggaggctgaggtgggtggatcacgaggtcaagagtttgagaccagcctggctaacatagcaaaaccccatctctactaaaaatacaaaatttagccaggcgttgtggcatgcgcctgtaatcccagctactcaggaggctgaggcaagagaatcacttgaatcagggaggcgtaccattgcactccagcctgggtgacagagcgagactccatctccaaaaaaaataaaaatacaaataaaaataaacttaatctcagtgacctttgtcatcctccatcctaccctgcgtttgatcccagctggcttgactctatcccttgaaagaccaattttctgaatcccctgaaagacaatgtggagattttctatgtgtaaaccatttaattttagtctgttcatggaaacacatctctacagatttaaaagaattgtttcattcatagccattttttggtgaatcaacctgagaatcacctaatgatggtgaacggagacagaattgaaagaatgaactttaaggtcaagaatgttgttacagatgcttaccctctggaaagcacatgaggtagctgagagcagtggagatcatcagaggctagttttaaactagaaaacgcattttaatctaaagagaggcaaagtgttttgtaagccattatacacaaagtacttcctgaaatatttttgatcctctatcatgggaaggctcagtttcttactgtaatgaagatagtctgtgtaagatgttcacctacttttgtgttgttccttgtggaaattagcattatgagaaaaatgtttgtgtgatttcactaagttttcttttctttttttttttcagtaaattaatacaaactgatatgcattttcagtaaataaatttaatctttaaaataattttatagctgmctttatgaaaataatagtgcaaatttactaactgctggtaatgtgctaggcactggaccattttgaagaaagatttttcattcagtcttcataatggctctgtgaagtagttaatactgttatctccattttacagatgggaaagtatatctcagagagagagagcttatggaacattctccaatccattcaactagttcaagtagtagaaactaggtttccagcccataccacgtgattttttgtttcttcttttgagacagagtcttgctttgttgcccaggctggagtgcagtggcacgatcctggcctactgtagcctcagcatcctgggctcaagtgatcttcctgcctcagtgtcctgtgtagctgcacaccacgatgcccagctaaccttttgattktttgtagggatagggtcttgctttgttgcctaggcacatctcaaactccttggctcaagtgatcctctcacttcagcctcccaaagcgctgggattacaggcatgagccaccatgtgatttcaatgctgaaataggtacctgggtcaggcgcggtggctcatgcctgtaattccagcactttgggagggagaggcgggtggatcacctgaggtcaggagtttgagaccagcctgaccaacatggagaaaccccttctttactaaaaatacaaaattagccgggtgtggtggaacgttcctgtaatcccagctactcaggaggctgaggcaggagaatcgcctgaacccgggagggggaggttgcagtgagccgagatcgtgtcattgcgctccagcctgagcaacaagagcaaaactctgtctcaaaaaaaaaaaaaagtacctgggtccctttaattgattattgatatgtatgtgtattaatgaatgaaataaaaattggggctcactttgttcagtttttaataagaccatcttaaggggttaggctggttaataactaaagagtagatmcaatacagcataagaatcaaactcgattcaaaaccttcattcccagtttctaatgcagggatgtaacagatgttcttacatttagactgttatcttgatgggtggcacgtcattatcgtcgactgctgatgaggtgcagatgaatgctgctgggagccatgtgtgatagtggaggaagttctaattggagtgctctcagtacagaaaatttaagaatttatcaatgttttaggagatagcatattttgggaaagtcagtgtgtctgcaagctgctgaaagatgttcttgtagacttgttgaagaattatgaactgcaggatgccagtttttgaaatcccaattcctttggtaataagtataaaaatagccactataaattgagccccaggtactgttaaactaacttaattctcataagaaccccataaggtagtcaatgtcaatatctctttttagcattttgggcaaagtagatccagagtgattacccagagtgattgattattgactgtaggtggaagagcccattatctaccgttagctttggtagtcttaaccgctatggcgcagctgcctctgcagtttggatggctcatacaaaaatccacttgaggactgggtgatactttttttggtaagacaggttttctttcatctaatgaggtatgttttggagtctttatgtgaaacattttcttctaaaccatgattattaagggcaggagctacgtctgtgtgttcaccattttatcatcaggctttcagtggtgtataataaatatttgttgattggacttggattcttgagcgggggcatccagttggtatggttagggaacttttaagagaaacatttcgtttatgcaaacaactcttaaaggatgtatctttcaaacatttctttggtgctggtcaggtcacttactactgggctaataggagtggtggtttcctccttgttaaagttgtctgttacctgagagtatttgggactgatagagaagctggtggtgggggtgttatttgcagagaaagcagctggcactaagtttacaggctaattagaaatggtcacgcctctaatcccagcactgtgagaggctgaggtgggcagatcacttgaggtcaggagttcaagaccagtctggtcaacatggcaaaaccccgtctctactaaaaatgcaaaaatcagctgggtgtagtggtgcgtgcctgtaatcccagctactgggagctgaggcgaaagaattgcttgaacctggaaggtggaggctgcagtgagccaagattgtgccacttcactccagcccgggcaacagagcaagactctgtstcaaaaaaaaaaaaaaaaaaaaaaaaaaaaaggtcagcttttatcttatctggtgctggaggagttggaaactatttaaaagagtaaccaaatttaatctgaaaaagatggtttactctgttggcagctgagaaataaaaagactggagtaaaaattggaaagagttcattagtaataacaaaacatttatttttgggatccatgctatggtttttgacagtcatctcttatttattttcatttttctaacagctcttagggtgaagaacagtcattaattcccctttacagataatagagacttactaaaggtaatcgcctaacttaatgtcacccagatattagataytaagtgtcaaaactgtgatttcaacttgggctttatggctccagcaatgaggctcttaaaacatggtcacaaagaaaaccttcttccttgggatgaatcagatttgagaagatcaagggagtaacagctacctttgcccttggagatcagatccacttagtagctctaagttattaatcttgcttttatttttttttttaattgtatgttagcgatccttttgttaaatgcaatgctagcatccctctctgtcaggagtttgaatctcagcaccattgatatttggggccccataagtctttgttgtaggagggtatcttgtacattgtggaatggttagcagtatctctgggccctctgcccccatagctgtgacaaccagtgtctccagatggacgtcgttaaacatcccctaggggcagaatggatccctgatgagaatcactcctcagcaggaagaagacagcagtaaattataaacaggtaagtgttctaacagggcttctgaaactcatgcgtatgagtcacttcatagcttgtcacagtggttttttcaagcattactctgacttagttggtctggctgggagccaagggatctggaaagtgattgatgcagggtgtttcttggaccgtacttttaggggaagtagccacaaagrgctgaacctcacaccctttcatgtaaacttcctgcttagcaacagaatagagtaccttcatggttattaaaatgcttttctccttgtctttttattttttcttagatctgctggcctatcttgctagtgattaagtttacagttcagctaatcatttgctccaggtttccgagcttgtaaaatcgcatgctgtgcatataaatgtataggattttgaccttagaaactgaggagcaattatccacatgtcttaagacagagtaggccaccttttgactttgaaagtatcaccaggagggcattttatttttgaaagtcaagttttgtgtttcgaaatatgtttgttgggcttcttggtagcagtttaagttttattgtgattaggggctgaaacaagtgataaaaaatgaagtttcctatttagtgatgtgatgtcacctgttgctgcagatgagagttggttctctttaaaaatttgaaagtgataccatttatatttcaggattctcaccatgtaatttctctcttctggctatcaacctgcactttttaaatttaaatttttattcagattgtaggttcacatacagttgtaaaaaataatacagagatatcacttatatactttgcctagtttccccaaaggtagcattctggtaaaactatggtatatcacaggatattgatatggatatagtccactgatcttcttcagatttcctgattttaatttatacttattatgtgcattatgtaggtgtgtgcatgtgtgtataaattctatataattttgtcatttgcgtaggttcatgtatccactatcccagtcaagatactgaacagttccaataccataaggatccctcatgtttcccttttataaccacgcctacctcctccctcctcccatctctaactcctagaaacctctaatctgtcttcatttctaaagcttttgtcacttcaaaaatgttacataagtggaatcatacaatatttaatctttgcagattgcttttctttcacttggaataattctcgggaactcatccattttgtgtatatcagtgtttgttctgttttattgttgagtaatatgccaaggtgtagatgtgccacagtttaacctttcacttattgaaggatatctggactgattccagtttttggctattacagataaagctgctgggaacatgtgtgtacaggtttttctatgaacctacattttctatttctctggaattaataaccaagagtccaattgctgggttgtgtggtagttacgtatgcagttttatgagaaattggcaaatggttttccagagtggctgtaccrttttgcattcctgtagcaacatatctctgcagccttggcaatttttgacattacaatttgatattgatattgatactgatttttaattttttactttagccttttggatcaccaatgtagtgatatctcattgtagtttgaatctgcatttacctaatgggtaatgatgttgaacaacttttcccatgcttatttgctatctgtatgtcgtctttggtgaactattcgtgtcttctgccgattctcttttctaattgtatttttttccttcttactattaaattttgagaggttttttttttaatatattctgaatactagtcctttgttgaatttgtggtgtgcaagtatttttcccagtctgtaacttgtgtgtttatcctgtgttattttgtctttatgagctttcttggcagaaaagtttttagtttttattaggctcagtttatcaaattttccttttatagatcatgctcttagtgttcaggtctaagaacactaagaatgtagggcttagccctacgttaccaagattctctcctatgtttttctgaaaattttatagttttacaattgaaatttaaatagatgatccattttgagttaatgtttgtatgaggtgtgaggtttaggctgatcttctctttttttttgcctaaggttttccagttactttggcaccatctgttgaaaagggtattcttccattaattttatatcttcatcaaaaatgagttgagcatatttgtttgagtctatttctgggttctctcttctgttccattgattgatgtccctatctctccaccaatatcacactgtcgtgattactatagctgtacagtaagtcaatatcaggtagaaagattcttctctctcgattgttctgtcaagatttttgtagccattctagggcctgtgctattctatagaagttttatagtcttgtggatgtctgcaaaaactttcctgggattttaataggaattgtattaatagtatagatcagtttggggagaactggcatttttactactttgagtctaggaacacactgtatctctccatttatttaggtttttgatttgttttcaatatcacattgtaatttttagcatacagatactgtacatgttttgtgtatacctacatattttctctagagtacagttataaatggtatttttgttccatttattccttttttagtatatagaaatgtgatggacttttcaggttgatcttttattctgtaaccttactgaactcactagttttaggaggttttttttcatggattccttggaattttccatatagacaagcctgtcatctgcaaacagagatagttttatttcttctttttttctttctgtatgactttacttctcttttatgccttattttagtggctagaactttcagtgctgtgttgaatacgagtagtgagagcacacatccttgccttgttcccaatcttagaaagaacacatttggtctttcatcattaagtatgctagctatacttacgttacaaatctctctgtaggtgttccttctgattctttggtaattcctcttagtgagacaaggtctcactatattgcccaggctggtcttgaactctggggctcaagaaatcctcccacctcagccttccaaagtgctgggattacaggtgtgagccaccatgcctggctgtatacatctttttaaacattgcrcagaggtgctccggcctcattgtttgcccttatgctgctgcttttttctgtcttcctcttcttctgactttatccttgtttctcttattgtatctctagaggttatgctttagataatttgggcaagaaaagttgaagcaggttctattagatgatacatcagaatcatctgagttcatatttaaacctagcttttctggtttggcagttgaaataggcatgataggttacattgcgttgttttgcccaggcattacctctcctcattgtatgatttttgcaatggagtctcttttcttattgaataaagcatgtggcaaaggtctttaaatggaaagaaccttcttttgatggtctacttgctgttgaagtgaataaataaagaagaatgaagagccaaaagaggaattcaaaaagaaagaaaatgattctgttgattctggggtaagattaatctgacttgagccttggttctggaaataagtaacattgtgtccctggacaacttgctcaatcccttgttatttatttgtctgtctgtctgtttagagacagggcttcactctgtcacccaggctggagtgcggcggcrccatcwtggctcactgtagccttgagttcttgggctcaagcgatcctcccacctcagcctcccaagtcactgggactataggcacattccaccatgcctggctgattttcactttattttattttttgtagagatggagtcccattctgttagccaggctgtaagttttttaaatttgtgaaatggagacatctctctgggtgggttaaatgaaataatacaasttacctactctgcctagtgcctaggttccttgtgtgccctccataaatgatggttagttctgataatggtgtgttagttacacatggaatgggtgaataattctgacagggaagaagaatgaaaaataggaggtggttttggaatgattgctgagacagaattgctaatatttttaggtaaaaggaacgtaagggaaatattttcaggaaaaaatccaaaatgactgaaacagttgtgtttgagagtgaacatggtgaaaacttgtgccttgaaagtgatttcatatggccttttaaaaggccccttcaggagagagagctgtcggtttctgctttggtgtcatttcagtcttgcttggaacattgctctctgttgttgtgctgtctatggaaaaaagggtgaacctccagaagactcaccaggaatgggtcccaaaccacacttccctggagactcatcggggaacacctgctactggattttcagaacctgtttgtggattccaattcagtagatttgggggcagggggacaggcatctgtatatagtttgaaacagagatcctaggaaattctgaaatggggccaatgtgtcagtgggattcatcgggatgtcgtgggatttagcagctgtagtagcatcttcagttctgctaccaactttgtgtgtaaccccaggaaaatcacttaacctttttgtaccttctttaactcagccttctgaaagaggaggcataagggataataactctgacctactttacatcgttgtgaagaattactttaaaaaatgactgcaaagcactttgcaaatagaaattgctctataaatgtctgttttttaaaaaatgtaattttctaacacagttttaaacacaaatagtcttgttgagtgcatcagctcaaattacaagtatcaaatgacatggtatgatggctagaaatagtgtttttttttttaaatacccaaagttagaggcaataaggaaacaacacaaggttgtaatgtcgtcgtttatctgtatcatcgttaaaaaataatgctgacgctaacctctacatccacattttccggtttgttttgttttgtatttttaataggctactcccatgaatttgagaatttaattagaaaaataaatgacttctaccattgctgctgtgctgttaattctccccctccttcccaatctctcaatgaaaggcctgctcctcctgtcattagacacatctgtggatctgttagaagtctgtaaatggacgcacacctgcagagttggcaaagactctgtaagtccccatcctctgatgtaaggtgtgttttcctgtcattcatccatccctgcaggagcaccccaaacacctcctcttcaaatctgctgcagtgcagctcccaaaccaccctgtctctaaggctaagtaagacaactggaggcccattaatgcccaggtccacggattgtaagcttattttccacctccaaatttggtggcaggatggttgaggtggtaacaaatatcagacaagttagaggacagagtccatgtgaattcagaacacataattttaggcacttgtcactatatgtgtgtactgtagttaaaaaaaaaaatcgtaggtggcagtacagaatagttgctctggagtgtcaccagccaggtaaaaatcctggtcccgctgtggttttaggcaagggatctaacctcacgaagcctccattacctcatctttaacctgtggatgctaacagcaataatctcataacaatgctgtgaaggtcagtggaaataagcatagaaacttgttagttcagcgcctggaacatactaagtgttcaacatagctgagcgctcttaatctgctgacaaaggcagtggtgcccttgtaggaatagatggcaaaccatatggactaacgtggatttcagatgttctagtagtctacatttaaatatttttaagctcggctaccaataaacttaatggcttatgttttgttgggttttctcttaagttatattttgctaccatgtctgtatatatctgtagtttttcatacagataacacagtatgatgctttgtgcatccttcagcagtgtgttattgcaaacaaggagtgtgaaggttgggttggtaagcaaagaactgcctccatatttgagttctgtgatgcaaaaaagttactggatggctttcaactcttaattaatgtttctattgactgctgatgctaagaaagtattatcacttgttccctctgggtggtatacactgagatgaggtagataagaacaaccttggatgtactgtttcagttcccttggaaactataaatccaaaggtgaatttgcacgctatgtgcaagatgtatatgcttcccaatttcaactgcagttccctcagtccacagagaagtgttcttgttttgtactgtctattgactgggctaagcgttaatagcatcccagattcttcaatccagcaagctttagagccttttcacactgattctgagataagccaatttgccaactgctttcctagggtgaccacctgctcctggggtctgaaccatctgattttagataaattcaggctccacaatttgtagaatgccatttctttttcctttactttgtaacattgatatcactgctagatatctggaccttaaaaaagtaaaagaaacctctttaataaaaaggatgttttaaaatgatattacctgataattatgcttgcctatttttatacctcttcccccatttttccttgatgaaggtttttgtcttgtaatgaaacgtggtaataaagagcatattggatgggaaggtactctattgtcctaccagcttggtgtggagaaaataaaaygttaggtatacactgaattgttggttatcacccagtatgaattgtccttstcaccatggggtgtaccatatgcagactgttagcctgctctggggacctggagagatgccacattcttctgtttccaggctgattggaactgaaagggttgggcatgaatgttagggtggcctaaggtagtctttctgcctgcttgtttggaaagaattaggtgggagaacatgctgagagctactttccattgtatggttcttaatacctcagggctgattatagcattggagggagaagcaggtgcttgctagacaggtgcatgtaggcccaagggaacaaatgtaattcattgagccttagtttccatcacctgtgtattaagattcatcaaatggaagacgcccttgaatgtaagacctgctatcttttatgtacccctaaggaagaaaactcactaccaattaaactgtgctatattgctaagttaccatcaataatagtatctgtcctgatttcagagataaaagatgtaagttgtaaaatataaaagcacttatatcataaatttctaaggaccacattagatagtatacctgtaaagtatcagcagtgtcttaacatatagtgagcactcagtaatcattaactgtcttctctcagccctctctcctggtagtatttggtaaatacttcctacctggtaaatctttattgagcatgtaatatgtatctatcattgttttgtgtatctggcatatatcagtgaacaaaatagtacatagatcctagctctgttgcttatttttgatatcagggatataatgtggacttagggacctgccatcttggtaactaggagagtcgcccctcaactcagctctcctttcccaccaggggctgctttacttggccttgtctttggggttgaatgtgtgtgccagtagcataggcacatgtaagacctgccaaactccttccagtctcattgccttccagtgttttctgtgtaccttacactctgtctaagctgatggcataccttgcctcaaacaaaccatgctctctcccctctccctttatctgtcccgtgctgttctctccatctggtattttgtgtcccccaccatgaacatgcagattccccagcgaatcccatgagctgctgctctcctgatgccttwcctcgtcctttcatctgagtgtaatttaccacctcaggctttctgcatgacactgctttacatctgctcctctgagggtactcacagaatgcgatactgatactgcagtcacgtggctattggcttctttttttatttttagtttttgagacggagtcttgttctgtctcccaggctggagtgcagtggcacaatctcggctcactgcaacctccgcctctcgggttcaggtgattctcgtgtctcagcctcccaagtagttgggattacaggtgcctaccactaagcctggctaatttttgtatgtttagtagagacagggtttccccatgttggccaggctggtctggaactcctgacctcaggtgatccacccactttggcctcccaaagtgctggggttaattgcgtgagccaccgtgcccgggcctggctgttattggcttcttaaggaagcccacttaacagtaattactggccaaagatacatgtttttattaatgcaaatcagcatgtcacactgaattatataaacatatagtgtgtatattaaacaaattaagtcatgaccttacaatcaggtcatatggtggtctgtacttaattatttttatattttattaacaggaagtgtgtaattaagcacggatggctcttcccacccctttcctttttacatatgtctgtyctgtcttctcacatttctggactgacttaaacttgtcagccagaaagatggatgtcattcaggtattggcaggaagagatgcktctgtaaatagtctctttcacatctgggtgttcagttttcctgctggggctgagagaatctgatgagctttgggtatttctttccacagccgggactgatccagcctgtgcctcctctctggcgtaacctcatcctgtccttcctcatttttaacacccaagtgcagctgcaggggctttcatccgcctcagacttgccagtacccaccacttgaaactgggccctgctgtgattgtaagtctccatccagaaggagctgggtttttttctcaggactcaagagactgtgaaagtctgaaaaaattttgtgccaagagaaagaagtgcaaacatcctctgttttctgtctctaaagcagggtcagtggtttccagtgctgtgtttttatgtcatttgactaaccatctccctacaggcccaagcaaatgtgggcagtgcagatcaagcctgcttcccaggactttttgagagtgacggtggtacagtatttcactgtttgtagcatgcctatagactgccratttacaggatttaaaaccttcctggcagatgtccagaggcctctggctcatatctacctagtttcatggttggctttctaactcttacataacagctggggtttttcactacatttaaattgttactcagaatttaatgtagtctttctaaaatgctgtcccctaggtggcttaacaaaggtgtaaatccagtctgtagaagccaagaaaggcattgcatatgagtatagctggtatttacatttcacatatgtatttttttccagttgacaaaaatcagcccagtaattttaccctgggttttcatcctagtaaagaaaattgttaaatattaccaaagtataaagtgatctttgattctaattggaaagcctttttttttttgatgctcaaaagtaatgttgtaaatgggtagaaaattgtccatttggttcctgctgtctgtcttttcctgcactttgatgaaggaaaggctttttttcccccagtccctagaagacctcaaaggagctgctttttgaaggaaaaggcttcattctccctgctcgaaagattgccacactatagatatttgaaaatcagatgcggtaatcagaaagctattctgatagtctgactgctctgccgatacaggttatattactctcacacaatatgttatcacgtaagggctggggaggacatacatacttcagtgggtaaactgaggttagggacatagggagcttgactgtgattccaagtatgtggtgagctcacaacccccaagattatcttatcctctaaacggtcttgtcatgcgcttttcaggagtcacattagaatctgctttctaagaccatatctagtggctgggctgttttttaatggatcacttccccttccatcttttgacactatctatccaattctcaggattctttgtctttcaaaacttcatgtgctgtattgaacttttcattttctcagattaaaggtggtcttttaacagttagcatacttgcttgttcatccatttctttgttagacacgtaacacaaattcaatccccaggagtatttaagcatctccggagcattctgtgttttggtctgtatttcagttaaagatctacaaaatcaagagagaacttctgaagtcaaaccaagcaggttcagatatctgcccaactttgttgattttcactctttctatggtgggataaacagggacagctgagaggtgttattagaaaactttcaactgagtcaaaaataaaagcaagggccaaagcttcttcaccctttgtctgtgtccatttaacttcccaaaatacttcttctctagatgaaatagaccattcagtatttcatcactaattttacatgtattatgtctccaggattaagattccttgtacttaggagaaaatattctcttatgaaagaatcatgtaagtattaattttttcattagtgtgttttatttcagagagacatgaatacatggagttttatattttaggtttttttagctctaaaagtacatgtgacattattaaagttggaatgcttcctttttttgctgtggagaaagtgaagtcatatttgaagaaaacattttaagaccttggatttaaaaattatagggacttggggctgggctcggtggctcatacctgtaatcccagcactttgagaggctgaggcaggtggatcatgaggtcaggagttcaagaccagtctggccaacataatgaaaccctgtctctactaaaaataaaaaaaaaattagccgggtgtgatggtgtgcacctttaatcccagctcctcgggaggctgaggcaggagaatcatgtgaactgcggaggtggaggtttcagtgagccgagatcatgccattgcattccagcccgggtgacaatgctcaactccacctgaaaaaaaaaggaaaaaaaaacatatatatatggacttggtgtggtggctcacacctgtaatctcagcactttgtgaggtcgaggtaggaggatcactttagcccaggaattcgagaccagcctgggcaacataggtagaccccatttctccaaataaaaagtaaaaaataaaaacctaaccaagggtggtggcacaggcctgtagtcccagctcctctagatgttgaggtaggaggatcacatgggtctgggagatcaagtctgcaatgtgttgtaattacaccactgtattctagctgggctgggagacagagtgagaccctgtaggtaggtaggtagdgtaggtaggtaggtaggtaggtaggtaggtagaattgtgttcatattgtagaaatccatatatctgagttagatttttaaaacgctgtctgactactgttgctcctggctacaacattaaaaaaaggtgtcctggttttcttttcaggaaagagcgatatttttatttttttcatagaaaacagaattaaaccaataaatgaagttattacacttttgagttggacaacttaaaacacacaatgtttgaaattataaagcatttttgcaagaagttgttatttggggtaacatattctgtcacagtatgctacttattccttctcttccccaacttcccccaccccttttttttttatataaatggtgtcatagtaaatatttattatagaatatgataactactggcctggttcttaatgcctggtttatactcttgctaagaaaagctcgagggtgactctcaaatctcaggctaattctaaaaccaacaattgagaagcctcctttctggatccaaaggcacatggtctctctcccctgcctccatgatcaaggaagacatcactagttgatcaggccgtcttcccagcagagcccagatgtgccctcctgattcttctcagcattgctctgaaagctgcctccatcagtcatgtcgaattggtactcacgatgaaatctctttgacatccttgaataaaagtgtgtttttatggaaggtccttttatgagcaaaaccctgtgctgaaggggattgcagaaaatcctttcttctgggaatttataagtctagtaaggaagattattgcagcactgggtagaaccataagcaaaatgcagacaaaagttcctgtaattaagggaacacagatgataacgattggcctggaagaattcttggttgctttgatcttatctgaaatcggactgtcagtgggacttctttctcaattgtggtaaagctaaggagccgatttcctttgtaactgctgagcagagaccaaggtacaggtctgaaggaacttataaagtcagtattttggractggatgcagcggctcatacctgtaatcccagcactttggaggccatggtgggaaaaatcacttgaggccaggagtttgatgccagcaacatagcgagacccccgtctctgtggaaagtaaaacaattagctgggtgtagtggtgtgtgcctgtagtctcagctattctggaggctgaggcaagaggatggcttgagcccaagagttcgaggctatagtgagttatgattgtgccactgctccagcctgggcgacagaacaagaccacctctctttaaaaaaaaaaaaaaaaaaaaaaaaaaaatcggccgggctcacgcctgtaatcctagcactttgggaggccaaggcaggtggatcacttgaggtcaggagttcgagaccagcctggccaacacggtgaaaccctgtctctattaaaaatgcaaaamttagccaggcatggtggcgcatgcctgtagtcccagctactcgggaggctgaggtggggaatcgcttgaacctgggaggcggagtttgcagtgagccgggatcgtactactgtactccagcctgggcaacagagcaaaaaaaaaaaaaaaaaaaaaaatcagtttttcagaagtggaaatctagttgtgaaatatatattgggaggtcattggctgcatttggccacagttccacatgtaagatttggaggacgtggttagagtttgagtaatttaggatcaacagttcaatcctgtataatttagtgactcagtgcagcaataaaccctggaaccttctgcttctgtgtttctcctctgcaggaattaagggcagatagaaagaaagcaaacatgaattaatttgattttatgtgcttaaggagacataatgagaatctgttggtgaggtagaagttaccaccaatctacataaaaatgaataatactgacattaaaagaaagaacatcaattatgttgcagtgattgcaggtttaaatcatgttagggcttaggcttaacacgtaagagtctccagttcccgaatttgttgggccttacatggaagctgagatatgacagaggggtctgaaatactgccccccattccaagtgagatttcctactgttcctttcactgacttgccctttcactagatatgctatcttttctcagaaacactaaaaaggatttttgtgtttgcaaagartaggaatgaaatggggtttttctaccccttctgataactgggtacttttaatggcaaggctattcttggtttcattccttggccaattttgagataattttttaagcacattggagcccacgtgctcagtggtggttcttcagcagaaaattcaaagatcagctactgagaattttagatttcctgttgtaagaggtcaaacaaatggtacaagttacataagcgtttcttcgatgataaaggagctgttttctctagataggtgtacccttttcagctagctaatatgaatctgtgtcaacacaggttttaattttttaatttttatgtattcattttttgagatagggtctcactctgtttcccaggttagagtgcaatgstgtgatcatggctcactgcagccttaacttcttggggccaagcaatcctcccacgtcagtcccccagttagccaggaccacaggtgcaccaccacacctgactaatttttaaaaatttttttgtagcaatacagtctcactgtgtttcctaggctcgtcttgagctcctgggctcaagcagttctcttgcctcagcctcccaaaatgctcaagcagttatcttgcctcagcctcccaaaatgctgggtttacagttatgagccatggcatctgacctcaactgaagttttaaaatctgtaggactatacagtttaaacctcaagggtagcaaagtaataatataaaaactacaatacatgaggtttgttagagaaatcgaattgctaatattgctgccatggtatttgtatacaataatataccaagtgagatttttatcgctgataaatattaaagtctgttccaaaatcatttaaacacttttttaaaatttggacatcaggttcagagagtttagtgatcatactcttcatggcatactgtcctccttggtttgtgaaggggctccttgtggtttgttttgctttacttcatttttctctttcactcatattccattcttttttccccaaagatgctgattagtagtatttttaattcacttatttttgtgtgatrtatctcattatgctgttatgcattttaaatcaatgccaattttcaaagtctgttcacatgccttacgtacctcttcattgcttttgaatgctgtgtcctatttcgtgtattgatccatcccattcttacccattccccacagggagacactttgtttgtcctgatgaattttgcaaatttagtgaatttgtttgttgccgaatgtcaccaaaatgtgctccatcacttcctaggatgactctactgttgctctgcaccatctctgtttgaacatcaagagtcatatgagcttaccaaagattctcattgcctcgtatcctaatgttgtccaacccagtgggtatgaaatggtaactcactgttttaccttgcctttctcttgttgctggtgatgttgagcatcattttacacctttaaccactggattttcctctcctggatattgcctgttccaatttgttcctgttcctttcctttctatgctggtagtgactgtgttttcttaattatgtttaagaaattgagagtgaagccagccttgtagtacctggtgcaggctttgtgtctgtgagataactcccgaggctcctcctagaatttctttttgtcttttaacaatccaaggctgtcattttccctatgctgttgattcccacctgctttccccacagaaccccctgcctctgttcggtgcagccaggaggaaatctgagcaagccccagacggtccctgctttgattaaaactgtcaggggcttcccttggcacttaggtggaaggcctgaatctttgccaggtctcagccccacctcccatgattcaattcttgactctggttgtcccccattctttatgttctggccacagaagacctctgccttattcttccagcaccttctctgggctcagcacctcttattccctctgctgctcctgttgtcctctctgcatcctctttcacctggataacgtctactcttccagtttctcatagtgtctttaggaaagcccctcttgaccttcatactcctctctcctatgacaacctctatttccttctttcaaaccctttcaatacttatgaactgatacttaatacatttttggtttcaagacaaagaggggaagggggcagagacatttcccttgtgaacttcgtaatcatgaggtcagtacctgtgcctttgtttctccttactgtattttaagtgtctggccaggcaccagagacatagaagtccaattaatatttgttgagagtgggataaaagagtaggcaaattaaatgctaattccatcactttggcttcctatgttatttttactaaatatttgaacctatttttccatttgggactacttttgattctgcttttcacattcactatgaaaatacatttaattgcatttttcttgttgattgaataaatatacttaaatacatatctttctgttaatattgtctacaagtgtatttttaataggggatgtattttacatgtcattaccttaaatgtcattatataccatgctgctgcgtcatggtttgtatgattgtttccccattttgaagcattgttttcaatttcattattttataatgaaatgtaatatttcttggtataaattaatttcttttttccccaagttacttctttgaaattactgcgtttgaacagctcttattaaaggctgctagatcatttaaagaaagattgaagttggtttcattgccagcagtgtgtacctgtttatctagagctctaccaaaaattgaattttataatttcattgtattttaatagctgtgaagtgtaactttaaagttgtttcaatttgcatttctttcactcctggtaaatctgtgtatttttcaccaggatgatttacgcccccaatttcttctattttaattgtcagtgtgcatcatttgatgtccttctaatgtaattaaatcttttctttttgtgagtggtgtaaggagcgagtcctcaggatcttatctagctgccttctatttttatgaagtatttttgtagcctcataggatttccttctaagagtattccttggtactcttagaaaatgcgcaacagtatagtcagctttagaaataccccttctttatatataatttccatgggaatgtagttatggccccttaccactattaagaccaaaacagtcagcaaacaaaacaataactcttctatttacttgggtgagaactagcccactgagaaggtaggaggaatttgcataatgaagagggtgttttcttggttcccttttaaatttaaaaattactcatggatttgcattctgtagtgtctcagcatcatttagaattaggctttgcttactgaagtcaaactgcaaagcttcacttatgtatgacttaattaccctttaatgttaaaaagaggaaaaagtaaagaaaaaaaatcctttggaattggtcatcatgattgatttttgtgctcagaagaccgacagtcttttctaaaagttgtatagctgttttttgatcttttgcctttttgtttgatattcttgaataatctgcatagttttgatatttaattccccttattcttgtcaatcgggaccaagatttgggaggttggcatttctttattctccatgcagttaggagtttcttgtaaaacatttgaattaygcagagcctggaatcattttaagagtggtttgatgtgggtattttagtttactggcaggaaacagactctggaaacaagtcattgatgtttaggttttatttttttttcaccattttttagtatttttcttccaatttctttttgctttactggtttttctcatgctgaaaataacatgaacaggtgtatgtgaaggactgcagtggacagctgggcaggctgctcactgtgtgagagcaccagccaaggagaccaatggcggctgcatatcagagcaagggacaccttttcttttcatttaaactttagattcaggggatacatgtgcagttatgttatatggatgtattgcataatgttggagtttgggcttctgttgaacccatcacccaaatagtgagcgtagtccccagcaggtactttttcaacctttgaggggacaacgttttcttttttattttttttctgagacggagtctcgctctatcacccaggctggagtgcagtggcgcgatcttggctcactgcaagctccgcctcctgggttcatgccattctcctgcctcagcctcccgagtagctgggactacaggtgcccgccaccacgcccgcctaattttttgtatttttagtagagacgggatttcgctgtgctagccaggatggtttcaatctcctgacctcgtgatccgcctgcctcagcattccaaagtgctgggattacaggcgtgagccaccgcacccggccgagggacacctttttctgattcatacagatgcactctacgagtgcatatgtatgtgtatgcactcatatggatgtgtggcttcagtggttgctcagagttttctagatcttatatttctgtatgagtttctttacgtctttttgtaaccttgcttttgtggtcttcacaaagggatatccagtggtctgtgccttttattccattgaaagcatattccttactaagtctgcacccatggctggatgagcattacctcgttcattacacctgaagtgaacatacttggttatgtgactaatctctaagggaaatctccccagcttttagttttgtctgatgctttcttctcaccagtgtgaatgtctgggtttctaaagctgtgtaaactgagaggcgtggtcttagagaagagctcagctctcagagatcggtccaaatttactaaagaatcctattttgtttcagtgttataacaaaaggaaaacctccccccttttccagcctaattgagtatacttcacagtgggatcacaaaggctctggtttatgtcccatctgagtggaaaccttggttcatggagttacttttcctctcatctacagttcagtggtcctagaactgatgtcatgattaggtcaacattaaagattccactgatctctggctttttgacttctttgacctacgtttcctgtttggaaagggttaattacacttgacttaagcgtttctttttgtgattccatgtggggtgctggaataaggtataaagttgattaatagtcttggagctgggtcttctactttaagacccagttcaaatctgtgttccccatggggactttgaatttctgctccctgctcatttctagagaaatgttccagagaaatgtgactcccggcaatatttggtagctccttgccatctggtagtcatcattgactgcgtctctttcctgctatgaatacagcagtgtaggaggcagatacttgcctatgtccttgttttcacgttccgagtttaagcatctgaaagtattcttcgtaaattagttagaacggtcttggcctttatgaataaacatgctgttctgaaatgatactagttttccccctttagagtcaagtaccttcctggtttcattaattcaatcttcttcctagcttatttccaagaaattacaatattgacccatatcgaggtataattacctcaatatgtaagtaattttaacatgtagaaacaggttaggaaagatacacacaaaacaaataaattgtcatgaactctcctttgatgaggaggatgggcataggcagagaggaatacgtgggctttatatgggatgcattttatttttctccaaatgttaccatattgtttgagtctttttaaagcatatctattacatacataataattaagtgggctgggtgcggtgactcacgcctataatcccagcactttgggaggccaaggcgggcggatcaccaggtcaggagttccaggccagcctgaacaacatggtgaaaccccgtctctactgaaaatgtaaaaattagccgggcgtggtggtgcgtgcctgtagtcccagctactcaggaggctgaggcaggagaatcgcttgaacccaggtggcggaggttgcagtaggctgagatcaagccactgcactccagcctgggcaacagagtgagactctgtctcaaaaataaataaatgaataaataaaaattaagtgggcaagattttgaaacttatcttaagataaatagctctgtcggttctccatttccttttctttgcatgtttggaagcagggcagtgtttctccccctattttcctgttctgtgttttctgaatatttcagaacatctctctcacttcttttctgttgacttcaatatggcagtggaggggtagttgagctgaaatctgattaatgtagcaagagacggtgtcaagttagaggaaggcattgttgttctgtaattagagccgtgaaatatatcttatttgtcatcatcttattattctttggcctgtttctagagatcagcacaataaagtttgtaaatccttgttcagaagctatagtttaagccttgctgaatgaggccttttaggaacatattttttctttctttcttctttctattttatttttttgagaagtccaggaagtatctgattatgtttcagatgctctatgtaaatggaaattaattcttcagcaagaagacgcaatcacagagggtaagattggtgtttgcaaagcatcataatatcacttgatttaaagtcaaatatctgaacctgaatactataggaaatcccaaatagtgacactgagtttaagacagcttgagttgcattttataactcctggctgaacagcacaaataattgcagcccattcctgaattaatgtgtctgggtgtgggtcactttgcacagatgagggaaaagtagtcaagtaaactattcaactgcttttaattcttatgcataaaaatatacagagtgctattaaattagatatgaatcttacagcacttaaatcccttagcccaaatgcagtcagttacatttgccrtgtaagacattttgatttaaactttagtcaggaagctgaggaaacagtctcctcttgagcctaaacattaaaagttggctgcatgtttttctttgttggcatttgtaaattgagtttttcacaggattctagacttatttttgggtgtgtgtgtgtatagagctacactatttaatgaaaatatagtttgattcagacatagggtggtgttgaaaattattttagtaatgagattatcatagttataaattgattttgaaaattctaattttcgtgttagatggcaccaaagagactattttaacctcctactccccaccttgtatgttttaaaataaatgatttctagaggttaagctgtgacaaaactgtgctgagaaaaaaaatctcactgtcaaattaggcacctttctgtgtgtgctgtaacatgagatcatgataatttagattaaaaatggagtttcatagatgcctattcgattgtttctctttaaatctgttattgttattattatatttatcttttaatcattatatgtttttaattgcttgcatgtgttaggtttcatacatgttcaaaatctattttatcctcataacagtcatgtagcatataggagctattatgatgtccatttttcaaatgaagacactgaggtataggaatattaaataatttgtcttgggttaagcaaactggtatatggtggctccatttccattacagatctcaagcttttaatcactcttgataaaaatcctacccagtgcctttttaagtttaaacattataacattctgaaaatgtcaaaataataagtcgaaattgatggtgaatgatgcccattcttgtggataatttttccttgcattctgwgctgttttcttctgaagccttcgacctctcttcatcctagcgatgtggggactggaatgctacggaatcagctctactggctgatggcagatgcgttttgggtcaaggtggccgccaatgctttttgcgtcccctgcagctgctgagacaatatgaatctgtacggtggaggcctgccaagttagacgctcggctcctcattatgctttgggaactcacacgttccacaaacctcctgccctgcagtggctcacatcagtgcattgctatgtcaggctgaataattcgcagcatttagcacttaaattggctcattgcagacaatccaattagaataaagtctattatcgttttggtaccttggaatgaaatggagtgtttaagcggtgaacatgccacgttgcctggcagttgctccatgtctaactcatattcgtcttgcaggttctttgcgtgttgctaaaatcacaccctaccttagtgtgagccatgtatgaagctcagtaacatacctctcacacaggcgttatcttaatgtgtcagcattcagagggtcctgagagctagacaaacatgtcttaaaatcttggttacgtgtcctgctaacaatggacatttaattaaggttgcttttcagaagaatccaagcaaaggcggggcgtggtggctcacgcctgtaatcccagcactttgsgaggctgaggcaggcggatcacctgaggtcaggagtttgagaccagcctggccgacatggtgaaaccccgtgtctttactaaaaatacaaaacattatccgggtgtggtggcggacgcttgtaatcctagctaccaggaggctgcggcagaagaatcacttgaagccaagaggtggaggttgcagtgagccgagatcacgccgctgcgatctagcctgggcaacaagagcgaaactctgtctcaaaaaaataaacaaataaataaataaaagaagaagaagaggaagaatccaagcaggcattgataaaggacgaggcaaactaatgaatcatgtagcttagagatcagtaaaacagaagttagaagaagcagtttatagaactcttgaattttttcccctataacttggtcagtgataaatgagatgaggaggaaaatatgaggcaaaggcaggatggtggagagaagttccaaggaagacactaatcaaaaaaatacttggattgagaccaggatagaatgatggaaattttgatgtcaatgtgaaagtgaggcattctcaggggactaaatcagagagaaacgagaattaagtacaagttgttcctaacacatttatactcatcaggcttataaatgagaaaggaaatcagttattgaatgggaaatatgtatatatatatatacacacacacrgagtatatgtacataaggtgagtatatgtgtgtgtatgtatttaattctcctatgatgcattgtggtactctgaaratactgttgggtgtttgagatactaattattcttttggagccacatgtaaaaataagaataagatcgccctgtacaaatagtactgaggataggaaatagtatggaaaagctccttatatttagtaaaagccatacatgttgtctaattattgtaactttaagctcaaaaatcacatggmcaagaaaggtggcaaggatagcttcctttactcctttaaggttttgaaagggctgtatttgaattagataccacaggtggactggggagcggtgatgggaaatgcccttactgtcactgaatatggcagggatttaaaccatttctcgctacctctctcctttgtttttgtctgacacaggttttatattgccagccaacttatccttattgatttgttttacactgtgagtcaaaaggctacctcatttcctggtgggagatcgtggttctgtaaatactcctttatccctttgtaaatgctgttaaaggcttcttgaggagaattcggtggttgtgagggtgggactaggcaatctctgtagtcccttcccacagtgtagtaggagagttggttttgcacttggttccctgtgcctaaaatgttcccaaaagtcggggcattgatgcttgtaattcctgtgattcctgcattcccagtcagagatctgaactagcatgcttggtaagcattgcttttgaactgccaaggagtactggtttttacatggagtctagccatcagataccggctcatctcctgcttcattttcggtgctgcgttgaggttggagatacagatgtggttgrtcatgcacagttaagtaggggagtgttttgggtctctgcaaagtaaggatgtggtagaaatagcaatacatctagagaatgatcacatggtgagtctgtttattagccaacaaatagaaagcaaatcaaaatgcagacagtatccatgtggtcatctgcgatgtgtgcatctctatgccttaggtgaaattccagggtctaaacagctttgtgcctccctccacgatggagtttcctacttaatgatgagcatgaattggaggagggttttgcccacagctgtcacaatccagtaggggtcactggtccatttggggagtgaagatggacaaatgggaatggtcctgagcggtcccattcatctccctagggaatcatggttgcatctcgtcatggggagggttttctgtttcatgtacctcctctaaaggaagatttttttttctctgattgatttatctgtggacctgcttatctactgttctacctagccatagagtttttaaataaaaaagtttctggaattgcttaaaaacttgttacatgtgccttccctcacccttacctctgcagctaagaagcctgtccttacaaaaggcgaacagtccagtcgtgggcaaggtttaagtaaaagcagtcactagtagctgctgtcttctaatcctattggttacccaagagaagaagaaaaatcattatatgatggtatccaggattccaggcactagttaggaaattttcttgatttcttacccataaccagctacagaagtgcttgtgacatactattgtggaggaggaagatgatccctggttgaggtgtttttctccatagggagatcccacatgcctgcactcgtccccacatctcagttctagaacaaactctccctcacttgtgaaagactcaaaacactcccctacttaataccaaccatatctgtatctccaacctcaagacagtccagagtctttccagctctgtgccttctggagaccatgtctagaaatgctcatcactctcaggctcctcccaaaatgtcatagtttgtacatgaatgagcatctactgagtgttcggatagttgtagttctccattttgaagtagattttttttaagactttttttattttttatttttgagacggagtcttgctctgttgccaggctggagtgcagtggcacaatctcggctcactgcaaactccacctcccgggttcaagtaattctcctgcctcagcctcctgaagagctgggaccataggcttgcaccaccacccccagctaatttttgtatttttagtttagacggggtttcaccatgttggccaggatggtctctgtcttctgacctcttgatccgcctgccttggcctcccaaagtgctgggattacaggcgtgagccactgcgcctggccaatactttatttttttagagcaattttaggtccacagcaaaattgagaggaaggtacagagatattccttatgccccctgagatacacatattttcatattttagcattttttaaatgtatgtgatttttaaacattgatgtactgttcattaaagaattggaaatacttaaaaaatttaatgggacatttaataaaaatgaattttgagttgatggtatcttagatttggtgaaatatgatgttttcctttggtgtctcctattcaatggtaagctttctttcattggataccagaaatcttggcttataatagttactttgtgtctcagcaaaccgtgagggtcttgttataataaaattaacaattaattactttcttttctccttccttcttgtcttccatccatctccttccatccatctccttccttccttccttccttccttccttccttccttcttacctatctacagcttagggaaaaagatgggacagattactatttagctttaggaaagtcttattttcttttattttaatttaatatttaagatattggtaaagataaatcttgttgaagagctgttgaaaacaaaatgatgagagaatgagaacatatcgaagtaagatgatgacagaaagctgagatggaaaatagcatgctaaaatctagtaggataacgggatggatctttagcccttggtgagtgacattacaggttaagcgtccctaatctgaaaattggagctccaaaaaacacttcaaaatgtacggctttttggctgccagcatggtatcaaagtggaaaatccacacatgacttcatgtgacgagttgcattcaaaatacagtcacaactttgtttcaggcacaaacttattaattaaaaatattgtttaaaattaccttcagactatrtgcatatataaggtatatgtgaaasttaaatgaatttcatgtttagacttggctctcacatttagactcaagatttctaagatatctcattatttatttgaaaatrttccaaaatttgaaaaaatccaaaatctgaaattttggattttttggaaaaggttcctcaacctctactggattctgtacttacaggttaggaaattgttttttttctgtaacatctttatgtgaagcaaaaagcagagtttatgcatattgagctttattaaaccatgccttaacatttgtacatgtcaccttacttgagtttccacaacctctgtttaacataataaattaagcatccagatctgtctttaatgtatcaagcatgaccctagatttagtataaaggaagctcttccagaaatgtaaattttactcagttagtcaacattttgcagcttgttgagtttccttctgcaggcatatcctgcttgtgagccctgtacttttaagtgaatgtgatctgccctgaggattccttttccccagcagtatgctatttctcagccaaaagtactaaaatcacttcaagggacttgattcataggtaaaatacaattcacaagtaattctggaaagcattcttctcctggatatctgccctgcatgttcacttagaaagrtcgtttagtcattcaacacacatttcatgaatgtttgtgctaaatgcttggcatgcaggcttcctgccttcaaaagatgtgcgctctggttggggagatggacaagaaagctggcaatagtagcagagatgcacagggagtgacaggagcatgtaggtgcatacacttgtgtaggaatgtgtctgtgtgagtgtgtgtgtgtgtacgcttgtgcgcgtttgttattgctgcaggacctaaggggaatccttctttggtacagactcaggagcctgcacttaactatttcttgtctggagcatgctctccctcaccctcagctgtcatataacttgctccttagctcagttcaggtcttttatcttttgaggcaggctcttactctgtggcccaggccggagtacattggtgtgatcatggctcactgcagcctcggcttcctgggctcaggtgatcgtcctgcttcagcctcctgaatagctgggattacaggtgcgtgccaccatacctggctaatttttgtatttttggtaaagacagagtttagccatgttgccgaggctggtcttgagttccagaactcaggtactctgcctggcttggcctcgcaaagtgttggggttacaagcgtaagccaccataccccacccaaattaacctctttaaaacattatttctatcctgctctattcccttatgccccactacgccttgaattttcttcataaagattatccccactaggtattgtatcattgttgtctcacactctccaatagaatttaactctttttaccctgttcttttcccactgcctagagcttagtaggtactgattaaaatgtattaagttaatgctgtgacataccagctctgacttttccataatttgagcccattaactattgtgtcttccccaaacttcacaaaattaatcattattttgcacgtgtgtcagtggagaccctgagctgtgtgaaaataagcgatggctttagaaaagtgctaagaattgatttaaccgtacatcatatttgctgttcctatgcatatctttacttgctccgtgaaatcgccagcgttttcccaaaagcagacactctttttttattttttatttttattattattatacttcaagttttagggtacatgtgcacaacgagcaggtttgttacatacgtatacatgtgccatgctggtgtgctgcacccattaactygtcatttagcattaggtatatctcctaatgccaacccttcccctccccccaccccacaacagcccccggtgtgtgatgttccccttcctgtctccatgtgttctcattgttcagttcccacctatgagcgagaacagttcccacctatgagcaccaccatgtccagtttattttttgtatttttttttttttttttttgtagagacagggtctcaccatgttgcacaggctggtcttgaactgttgggctcaagcattttgggaggcccacctcagcctcccaaaacactgggactataagcatgagccactgtgcccggctttgttggtttttctatcactatgctattatgctataaaatatagtaaaggggatgtattaactgttaattttatcaagtaaacgattcatcttcgagaataactaggagaaacattcatttccattatactatttgctataagacaatttcatagacatttttagaggtttctttaagatatcctgtattagttcttatgctatagaaagctagggcttttcccatcgttggatctcctactggattttcctttttttctgctattcaaaatttatgtttcctcttgggctcactttcctttcctcaaaggtgtactgctgtagtgtgttctctctgtgccatggctccagttggccggcagtcaggtggcctgtccttctgtctgccagaatggtcctgtgaccatgcagatcctgacctgcacttgcaggtcacagggtcagctgcttctggatatggcaagtcctaatttggaaactggattccatcctgcctaccaccagcccagaaggaaggaaatggagtttgtggtggaagaaaaccggctattgttattaacaggaggttatattaagcactgtcatttttagcacattctaaataaatgccttatattgaagagccagagaaggaaacggaaactttgaagcaccttgattaaaaagtatgagcttaattacaattggcacaaattgttcagcatctcccacgtgctgtcactgtgctgagtacttacatgtagtagtgaacaagacagctatggaagaaataattgctcctgctgaaaatactatggcagtgaaacagaagatgggatgaagtatttgagtaggtgatttaatcctctggtccaggggtcagtaaagtttttctgaaaagggccagatagcaaatgttttaggcttgtgagggtcatatggtctctgctgcaactatttgtctttgtcattgtagtaaaaaagcaactgttgtggactgaatgtttctgttgctctgaaattcatatactgaagccttgctccccagtgtgatggtatttggaggtggggcatttgggaagtaattaggtcataagcgtggagctctcataaatgggattattgcctttgtctaaagagtcagaagagagatgatatctgcaagccaggaaggttatattgaaatctttgtaagaaccccacagaacacactggtcccctgattttggacttcctagcctccagaactgtgagaaataaatttctattagttaagccacctagtttgtggtattttgtcatagcggctcaaggtgacttaagacagaatcataaatagtacacaaatggacatggcttctttcagtaaaactttatttataaaaacagatggcagtctgcatttggcccattggccgcattctgctgacccatcaccttggtgctttttctgctttttctctgttgtcctctgtgtgtgttcctttgtcctgatccttgtcaccttgtgggtccaaaatggttccactagcctcatggagcctggccttacattgcagagtccaaagcaggagctgagggaaaatgaaaaacaacttcttcatcaccggaagcccagcaaacttctccttaaaaatcactggtcagggctgggtgcagtggctcacacttgtaatgccagcactttgggaggctgagatgggcagatcacctgaggtgaggagttcgagaccagcctggccaacatggtgaaacctcatctctacaaaaatgcaaaaattagccgggcctggtggcgtgtgcctgtaatcccagctactcaggaggctgaggcaggagaatttcatgaacctgggaggcggaggttgcagtgagccaagactgtgccactgccttccagcctgggtgacagaatgagactctatctttaaaaaaaaaaaaaatcatcattggtcaaagttgcagcacctgccaacctatacgccagtgttcaccagaggggattaggattcttataactggcttgtcccgagcatgacttattccttgggatgaatacattactgttccaacaaaatccctgttgatgaggtaaccagcagtgtttccataggaactcgagctcctggctattcctagcctggttctctgaccagcagcaccagcgtcacctgccagcttgttagaatggcagaacctcagacccttcctgtaactactatatcagaatagaaaccgcattttagcaagatctgcaggtcattcacagacacagtaaagttttagacatgctgatctggagaggtaatggagggctattttaaggaaatccatggaaataaacttggagaaagagtagcttgagtggttggtagctgatatggttcggatctgtgtctccccccagatctcatgttcagttgtagtacccagtgttggagttgggtcctggtgagaggtgattggttcatgggggtggcttttcatgaatggtttagcaccatccccttggtgctgttcttgtgacagtgagatccagttgtctaaaagtgtgtagcacctccccctcctctctcttgctcctactccagccatgtgatacgtgtgcctctccttcaccttcctccatgattgtaagtttactgaggccttcccagaagccaagtaggttgcaataccatgcatcctgtacaggctgcagaactgtgagccatttaaacctctttacttcattaattactcagtctcagttctcctttcagnnnnnnnnnnnnnnnnnnnnaactgtagaactcccccctacctactcaggctcactcctcctttcttccccttccctccctccctccctccctccctccctccttccttccttccttccttccttccactaacatcataaggtatttttttatatcagtgcaagaacagattaatatggtagcccagccttgactcccattcatataaatgccattataattccagtttgtagtgatatctcagatttaatccacatcttagtacattttatggtgtttagtgttcatagtggaccataattatttagaggatcctctttactcctttttgcctccagcaagttctgacagtgttcatagtgttaggaggttgaaattaaaacaaaaacgaaaaaaacagttcggggggaagaaaaaaaaaatctgtacatgttgtccttttctacctgtaatgtagtgcatgcagatgacaggacatttcttgtctttattttgaaaatcatttgccatcgttcatgatgtgcaactgcatgagtacatatgactgtcaagtgtctggattctatttctgaattcaggaaactccagagttaagcaaccaaattccatttcagaatccgcttctatttttgttctgttcatttgatcttttccatcggtaggcacattagcttactaagcataaagaacttttttttcctcccagctatatattctccacaaaacactgagggcttccctgggaaataaatccctggctaaatggaaatgtggttggtttcatggtatatcttcaggtcttggacaacagctctgtgcttgcagtcttctttgtgtgacatttggaggccgagctctcaaatgtcccttgaatttcattaactggtgtgctgttttgagttaactgtggagagaggcctattggagatggtccctgccagttgggcagctctcccacttggctgttttgagaattgttatatcctgtactatggaaacaggatgaacttggccatgagtgtgggccagaagcctctatcccatttatgcggacttgctggctgagttttgagaagtgcatgatttcatttgggctgtggtttgctgctaaccgtgtgagtctgcaaaatgatcccttttaagtagaaccaggacagaataaccctggagctatgtttggtgtggtttgtctgcaagggttaaaagctcactacaggatgttgctgctttataaaattgaggcctccttgaaagttgtgtcatttctatgctttatgaataggattatcttctttatgcagcagtcatttgatgttgaatagaagctgaagatacagttcctctgtaaagatttcatcattgtttgattggtaaaggtggacattttcccccctttccaggtgaggtatacgtgcgttcaaagagggatggggcaggaaggtggttggcggtggtcagaaagccatctgtaactcaggtgattttcctgtaccggtcacctagctgaatctgaatgagagttttttgtaaagttgtggtagaagataaattagcctgatgatggattatgcactatttctcttctgctataaggggtatgaggccggaggttaggagactcacacacagtcatgttgtctgtcagagggaggatgaagccgagagttgagtggccttcaagctccctctggttgctcataccttgtttctttctccttcttatgagttgggaacatgcccaagaaaccttgtaagtgtgaaatacagcatgcctagtctctcctgcagaataatgcgaccccatatttgttaaccacacagaccttagaatgtgacagttttctagcttaagtgaattggaatgaaaccctatcacattttccaaaccagacttattttgcctgagtccatttttttaatcccctactttctacttgaaaaatgaaattgcttgaatttactgaaagaaaaagtcatagcaattgtcagactgcatgaggagggtatttattcagatttcatggatggggccagtattttctggaacatgttgctgaagtttatgagcatttaaattataggatgctatttgggattctccctaaaacaaaagcttttatagtgtgatactatgcttttaagaagacaaaaacactggtttgatttttttttcatttcagtttttacttctgttttaaaagtttaaatatattttctagagatactggagataagggggatgaaaatgtcttatctcttttcagggttgatatatatttatagaaaggtatcagatgtattgtgacagtctatagatgtaataaaatatttcactataaaacagttgattggagtcatacagtggttctcaactaaaggtgatttttctcttcccctactcctggggacatttggcagtggatggagacatgtgtggttgtcacaacgggaaggatgttgctattggcagtctagcgagtagaggccggggatgccactgaacatcctacaatgcacaaggacaacccccacagcaaaggagtctttggccccaaatgagaaaccctagagtggcataaccaaaaccaaatgctttaataaatacccagccctgaggttttggtatttaaagtgacatttaacatcaccaaaaacatgtcaaaaatgtgtcagccatttaacacatgcataaagccttcttttttaaaataacagatgtgagacttctgagccacatttttcctagaggttgttctctctctgggaatgaataccgaggtgctatttcacattataaaatttttagctactgaagaattatgtttaaatttgaaaaaaaaaatacttttgctttttaccagatcgagcgtttctttagtggcattctcttttaatccagtgattttcaagtgaccccgtatttagtcctaaagttccatttctcaactgaaactcaacatttagttgagtagcccattctagttctatatgcttttcataatgggcttcctttgagcaaagttcatgcattgcacctaaccgtcctttggatgtgagtttttcattgtggattactgcccaaagaagtgatgaattaaattgttaaactcatttagctgtgacctgagatgaatagagtgcatttgaaaaatgagcacaggttgtttatgagccgtcgtgtcggcatcacacttcagagtcggtgtagatgtctaccgctctagccctatggrctgcagtgattcaggagcaagagcgagcagtgggttctttctaacgtgtcagccttttgaccttgagctgcattaaggctttcacatgtgcagttgattaagatttttattttcttcctttatttcatttgtaccatatgcacagagagtcgtggataacagtttagactaaataaaggacattgaattgtcagtaatgaaatatcttgttttaattaaaactattagtaatgctctttcttgccctggatactaggatattgacatacttaatggtagaataacagataatgcggtatttttttttttttttgctttttactcctacaaattgcttttaaattctctaagatctggttgacaattgccagtataagtatttatagagaaagataaagatggagctacctacactgtatctataaatacagctgtacatataaaatttgatggtgacagccatcttgcctgtttcagctgtgtgtgtttttaggaagatttgaatataaaagatttgtatttatataaattattttttgtattttgtgtggcttcataccctcaagggtgactttgaaaggtatcttgacccagggacaccaacgagtttattccaacaattccacgtggaagaatgtcagtgattccctggaggtcagagttccgtctccccctgtcttctcagcagtgtgatgaggggctcccagcacacagattatcacttccattccttttgggatgtagacctgcatcttatgtgttgcgtcttacttttgagttactgtgaacaactgttttcttcatctgccagttaaagacaaattacaaggaggaaaggatggaaaatacaggaaaagagtgtgaaagcccaagaacttaaagctctggatgtacagttgttcttttttgtggagtcaagcgtcattgtggcatcctctatgggtgttycaaaattacaattatagttagagaaataatataggtaattatgctgtcgaaccactgtaaaggagagcacgtaaaagaaggcagtgcggccaggcgcagtggctcatgcttgtaatcctagcactttgggaggccgaggccggtggatcatcacgaggtcaggagttcgagaccagcctggccaatatggtgaaaccccatctctactaaaaaatacaaaatacagaaattagccgggcatggtggcgcacctgtagtcccagctactcgggaagcagaagaatcacttgaacctgggaggcagaggttgcagtgagctgagatcacgccactgcagtccagcctgggtgacagagtgcagcgcctaattcattgcttagaagggcccaaagctccttcctgcccgtgggccatgtgctgtggttcctgcagcctccccaacctgatcttctctgtttgcttttgctcattttgcttctgcagcactcactgctgggccactttgctctgttctgatttgcattcttgttctgtgctacctgtgcctggaaggctctggaaggttttgcgatgttgagcgcattttcaccctcaacagttctgcttaaaggtttattacttgttgtggctaactccaagttactttgctgccgtttttctggaatcctgcttgatgatatttggtaaatagaataatgttggcacagacacactgctcttctgtttcatgtgtggtagtggtatgtccacagtcttttttgattcttcccttactaagtcatggccacgttacccgtgctgcctccggagctaagctaacctcactggatctgctggcgagggactgtgtgtcccgggcccaaatgggttactgctcttacacaagtcaagaccccgtgtcctcttagagctgccttcccaccctcttctaaccttgactttactaatttaagtttatgatctaacatgatcaaacgcacaactgagtctatgttgtttactttctggtggcttcaaagaatatccaaccacctccattcccctcaaaacaaaaacaaaaacaaaaacaccaggagattcattcaaggatgatgaccatattatcatttttcattgtctgatccatgttatttgttgagtggatgttatgacaaactctcatgtttaataacaaaatcgtgtttctgttcttagctccaaagccagacctttggtcctaaagtttttgaagcttctggttgaaacattgctcttctatgttgtcttcctttcttaggaatggtcaacctttattgtactcatgacattcatcatttgtattttcattttttatttttttactatttaaaacatgttttttgctaacaatattttcccctgccaaaatctgtttgcttttaaaaaatgaattagcttagatttactctccaggtcaattatatatctaccactaagtgtgtgtcagatggggtctgcaggtgtgggaccaactagctcctttctgaagccaatggtttggtaaagctttgtgacctgagagctgcatctttggattggatattacatagattcttgtaatgcagcactgcatggaattatcccaatgtgggcatcggtgttgaacacaacagaccataaaattccatttcatttctgttgcataaacataggatcacaaatagtgtgattatttctrgcagcctcaggcgtcttagccagggggaacatgtaggagactatgaatacttaaatatattataagcttccccacatgagctgaccaagtacctttgacactagcctttaaaagggtcgaatataaaaacctctaatacggtcacttgctgagttcttactgtgtgcaaggcgctgttttcatgctttcatttgcattatcacagcaagtcttcaagctagcattgtagtgcattatattctcacttcacagctgagggcatggaagcccagagaggtcatgacacttggcagaattgcacagtaagggcaaaaggtgggttttgaacccatgtcttttgactcaaaacttgtaaccaccaccaccaaaatcttggtcagaaacaattcagtttctctcacagttgctttgatcttgattggctttcccttatgggtttttcaggcgcagcattctcgtgttctccttgtctcagtatttcatgggaggcaggcagtgccgcagagccttgaggaagactaatctggaccaagactggggctagaataaatgaatgaaaccccccacttgctacttcacttttagctaaaaagtccaaaatggttaaattggctgtctgaaacccatatggctgagaatttgtggtcagacaagcaaaactgagcacagcctctgctgcgatcctgtgattggggtccccaaagcaaatgtctgttggagttcctcagaaagcataaatatgcaaaacaaaaaggtaaaagacagtaggaaatagtggagctggggtctatgtggaaaggtacatttctcttttcaacttcaggttaaaaagtagtaacaaaatcctaaaaacctggtggtgaatcaaaatgatgctgagatacgattttgtcccctctgcagtaagagtgctgatctgtgatggcagagatcttttttattcttttttgctctcaactattaattgtactgggtacctgatgggcactcattaaatatgttgtgaacaaataacaaaccactgtaagactcagttttctcatctataaaatagtcatgatgagagttcacagctcagggggtaaaatgagattccccaccaagcatacgttgcttctggtgtctggtgagtgtaagtgataatggaagtgctgactgttaataacaatttccactaattgattaattgattattaccatgtcactcctccatgctttacttggtagcaatgaccttttgtaaagggtcacctaagaccatcagagtgtgactcaacattgacggtggccactgacgccccttccactgctctctagtcccatggtttcctctccattttctagagtgttttttagatactgtatctcaccagtagccataggaaatgatgagataatcaaacagatttctgccttgtctcctcaatgataccagttttttctttctttggcatttatatcaaacatgtaatcagtagatcagctagtttgaaaatagtctccactgcagaaattcaccccattagatatctgtgccatcaagcccagggaaagcaaatttcctctctgcaagtgagccacatgtgggtcaggcaggctcatgctttcgctcctgcacctgtgttttcgtgtctgaatattttatgggcttaaagatgcagctacaatttcctcactttgtggggacatttagcttgttctacagggtgtttagactttcagtggtgtggggatgtgtattctaacaagaacaaaagaaaggtgccagtcttaagcgtagctctcatcacattaagttttatatatgcatatatagagatgtgtatatatttttaaatgtattaattagaatcactgacactgcatattctggtgtatgtcagaatgccctaggagatggatgcttaagtaatctgcagagtggattatatccttgcatttgctctaaaacttggatttgctaatactgactgtgctattcacaaaatttaaatatcttttctcggtgtgtgcatttgcaatcctgtttttctgctgtaacaatagtccaagtaacagtgacttttaacgatatgctgaattttgttctcatctagtagtctgtcctccagcaatttagggctgatctggtgactatgttgagttgatcctgactacgcctatcttgctcctgtgttgtccaccacctgtctcatgatcacaggtggggaccccagttcctgccatcatatctgcattgtggccagctggaaggtacaaagtatagagtatgtctcattcccttttaagagtgtgtgctgctcccactcttgtcctattggtcagaatttattcacatgtacatmcctagctgcaagggaagctgggacatgtagtcttaaacttgggtggccagcagccacygacctgggggttctattgcttattttgttgaaataaattgacatagtcttctgaccatggggagcttatttgtcctgttgtgtatcatgcccctggtgctcaaatcagtggctggcacatcatgatgcatgggatgcgttgcttaaatgaatgaatgaaatggagttcatctcctctttggaacttcttgagtgcggagttcccaacacgtcccttccaccttcctttcacagctcttctttccattccaggggtttacagacatcctcctctccttcccacacatgtgcctttactggctctgaagagagctgccacgtgcagcccccatctccgcctctccctacaccaggcccagcacccacattccctttaactgttgtgcattttcataagctgaggtccttcccccatccttgtctctcacctccaaacacattccagtttgctcatttattctttaaaagtgtgatctacataatggagcacagcttctcagttttgcaagtaacagatggacagaatacgtcctgcttcgtgtgcttttgatggacatcctgtcttctccacactcttgactacaatttctttctgtgtggcacagaacatggcaaaattacgcacgtgcacacatacagactcacacacccaaccccaccaaaaatacatattaaacaaacttcatggcaggcagaagaaaggaactttcttgatctttctccagatgcaaaaagaaacactacctaaagcagtgtagacagtttaggcataagggcagctggacagtggtacattttataccactgttagtatacttgtgccatgtagggctttatattgaccactgactttactgctgatatctttttttaatcgtattcttattctcggagtcccttacctttttttttttttaatgttgtaatttctgtatatttgcaagatgtcccaaatccaagaagtcatcatatatataaagtatgtatatcttagaattatattaatattagccaacctcacctaatcctgtctgtcctgggcattgttctgagcacttcatatagaatatttaatttaataactgcttggtttaaatttaaatgatggtgttcccttcaaaatgcgtgttgaaacttaatccccagtgtaaaagtattaaggtgtggccttggatggtgatgaggtcatgaggactttgccctcatgaatggtattactacccttataaaagagattaaagttgaatgaagtgctgtcttgcccttctattccctctgccacatgaggaaacagcgttcctcttctctggagattgcaatacaaggcrccatcttggaagcagagaacagctctcatcagacatcagtcctgttggtgccttgactttggacgtcccatcttctaggaccatgagaaatagatttctgttctttatcaattactcagttgcaggaattttgttacagcagcacagacagactaagacarttaccctgtgggacaggtactagttctatcctctttaagtgaggtgagtaacttgcccatgaattcttttcagagatgagattcagtaccaggtgacttgaatccagaactcatgctcttgagtaatcattaagctctactgtatttatttgtgacttttttagcttggctttgaccaggtgggaccatgggcatcatcatagtttactgtgcatcaaataaataaaagccagaaagtagtcacattcaaccccctacccgccccctactggtcaaaacagagctgtgctcggtctgctggaggtacagatgagggccagagcaagagctgtgtgttgagatgggctaattttcattgtagctgtgtagctccaattttttccttaacatgtctactatgaaaggggatcatcgctttttagttcttcctaacactgtgagggctttaggttatggcgtctgaaatccttacgttttggatgtggaaattgtgtgttatttatagctgacacatgaagagaattaccagaagtgataatggaggaggaataccttctgtgattttactttatcaaaagcaaccactgcgaaaacatccccttataaaagccatatgagggaataggatgtttggcttagaagcagaacttgatccttgaagaagttcacacaagtgatgtacacagcagaaatgcttttaatccccacaggtatcttgcgaatcagatgaccaggcagaggaggcttttttttgagacatccctcggggatgctatgaactaaaatgggaatcgtcttctctaaatgtagtgcaccgttgccctgtcatttagatgagatgtagcatcaaaggaaatcactggggatattcagttgctaaagtctttccttgaaagatgcaaaccttcaaggagacctaacctgtgtgagagattgctttctggagagtcaacctaggcaagcaaagtgcttgaatatgcccaccagatttggcrtccctggccttccttttaatgtgagaactgctggccatttcattttgaccctggtttcactgctgtcgcaaagtgtccttttgaatcccgtggtagcttgtgcaaggttcctcgtgctctttcacatcccagacatggagttaccattctcttgtaaaccaaacccagtttctgggtgaggctgtctctagatattatcagatcccaagtcttagaagccatttgaaatacccttcattgaggatttaaggctgatcgtattttcattatttagaacaaatgcttaaaaataatgtaaaaccaactttactctgatgaaggcagctgaagccatcatacttcataagttctctcttcttttctttgaggcctggaaacttggaaacattttcacagcttcttgcttattttagaggcaagaaacatgcagtcagagtgatcacagtttcagatttataacaggtgacggcaaaaggagaacattgtgctcatcaaactgctgtgccacttccacctcccagctccagtatatttattaacgtcttttgagtaaagtcttaaaattatctattaagcacaatttttcaccctttctgatagatcactggtgctgccaagaagcttttaagctgtaaatgaaaaggaaaaacaatcctgcatttgatcttgggktttttttttttcccccttcagtgaattatcttagaacagaattttgccatgagtgcttttattggaatttaaaactataataccgacttttccttcagtctgggcttaaggtttcccactgttctaagactgcatttgaagttatctatcttatcttagtgaaagtttaaaaaatactcttcctttgcatttaaatttctttctctgtggttaactaaatccgaatgagtcattttatcaaagctttaacatgtatgtttgttttctgggtagcttatcacccctttttctttttcctttttttttttttttactttaaaagtttttttatatttggttggataaccacatgatacgggtgtataaagttgtttgtatgaccataaactttgaaaatgggttttaagaaggcatttgcaccatcttatcctgcaaattagtaactttctgatctggaaaaggacttttgctatgcctcatacatttccctggagtttgatgtaaattgaaatttattatgaatcaaattcaattttaggtgttcttgaggaatctgtaaatgccagttgagaggggaaattgatttygcgttcagccctctatgatgaatatccccgtgtttgacacgtgtaagtgttccgcttatgttagttatttttcctaataacctttcagaagtgtctgctaatgaaagttgtacctgtttttttcacttaaggtgcggtcagttgaaatatttgctgttgctctatattttatgcagagtctaatgcttacgctacgttataaactgagtctaaatggaaaatgaaaattttcattatagttgtctttttttctaggagaaattaacaggtacatcttctggaatgagaaaaaagtaatagcattgcttaacattttcactattcaatatccaggtataattggtttcgagatttttgctttgggggtgaaatatttcatgagcggccattaattcccataataactgatgtaaaaactgagctttatgaatggaaaagtagattcagacatcaatcatatttgcttgggatcaccccctgcagttcagcataaatctgtgatttccattataatacgtttaaattactgcagcacctgggaaaaccggaactgggtacaggcgcgatgtccacactcaccattttgacagttgtttggatcccgttcaaactggcagtcacacttgtagtgtgtttaggagcagtttttgcacaacttaaggaagcatttaaaaataaaacactgttttctgatagaaagcagccctatatttactcacacgaggtttgcaaagctcagtggaataatttgacatgaagtgcctctaagcagacctcaaacaagctccttgcctcccataagcttagaaagaggatgcttacatagcaaaactgagtaaatatgcacagggctcataaaaagtcgtaagtgatggaacctaaagaaaaagccagtgcttaataaaatcgcagtgtgaagatagattgctaaatctgtcatcctaggaaaatgccaggcaaatacacagaaactgctgaagattttataagattgtttaaggtttagccatgtaaaagaagtaaggtgctgcattttgggagaagataatccatactctatttctgaaatgttgggtttctagttttcaataatagtacatgaaatggtttgagagttatatttaactttattctcctgcattgatccaaaaggtccaataaaatgttagattttattatttgagaagtaatcatttattttgcaaagctaaatagggaactctgttttgccctttcatgaagagatggagtttctgcagctggagcaccatgtgcagctccatgggctttgcaatgtccacccatgtttgatggagaaagagagtaacattttggataacttttgaattgaatggaaagaagtattggtggggtccatgtcttggcttccttactgacttgtcttttttttttttwtttttttttttttttttttttttgagacagtcttgctctgttgcccaggctggagtacagtggcgacctatctcagctcactgcaacctctgcctcccaggttcaagcaattctcctgcctcagcctcctgagtagcagggattacaggcacctaccaccatgcctggctgatttttgtatttttagtagagacagggttttaccaggttggccaggctggtctcgaattcctgacgtcaggtgatccacctgcctcgctgggtggatgaagtgctgggattacaggcgtgagccaccgtgcccasgcactgacttgtttttaatgtggttgcattacttacttttctgcaccttctttaactttaaatgaaaaataacctttcctagcaaaatactgagtgcgtaattagtagataggtgagatagcactgctggcagaggtcatgcatgaatgaatgaaacttgagaaatgctggacttcagaacaattaatctcatagcagtgaggatactctgaaggaagtgccaagattttttttctccttcactgattcctcctttctgccctggttgtttttgcatctgatttggcatgtgctctgtgtgtcttgtgatgatttcttgttttgttctcttggtagaattacacatttctcaaggggattttattctggtttttattgatttctatggattcagtagatgcttttatttatttatttatttattttttatttttttgacagagtctcgctctgttggccaggctggagtgcagtggcgcgatcttggctcactgcaagctccgcctcctgggttcatgccattctcctgcctcagcctcccaagtagctgggactacaggcgcctgccaccatgcccggctaatttttttgtatttttagtagagatggggtttcaccgtgttagccaggatgatctcgatctcctgacctcatgatccgcccgcctcggcctcccaaagtgctgcgttagatgcttcttatatgatggtcaaaccaatgtggtctggtggaaggagttctgtagttgagatcagacacattgacattctgatcccaacagcagccattacttattgactcttcttaggcaagttaatttacagctctgtgcactcttcttcctgtattaaatggaaagaatactgccatctcacaaacttgttgtgtggatccaaggtgataatcattcatgagtgcaataattgccatacttgtcataataatccagcaaccattgtcctgcagtcgtccaacatgcttcatccatgtaaagggcttcgcccagtgcctgaaatctatgactctcattattatgattctctatcagggataatctcagagagtcagatgatcagttaagaggtcagtgatttaggccaggcatggtggctcacgccggtaatcccagcgctttgggaggctgaggcgggcagatcatgaggttaggagatcgagaccgtcctggccaacatgatgaaaccccgtctctactaaaatacaaaaaattagccgggcatggcggtgcatgcctgtagccccagctgcttgggaggctgaggcaggggaatctcttgaacccaggaggcggaggttgcagtgagccgagagcgccactgcactccagcctgggcgacaagcaaaactccatctcaacaaaacaaaacaaaaaaacaggtcgtgatttatagatgccataaaatatgacattttgctgaactaaccattgaaatttgatcaatagtctccctccaacttcccctttttttggtctttaaaaacagtttttttcattcttaagaagtttgactcacactctattggcttatgctttgtttataaagaaatatttgatttgctaaccagcatgtaagaatagatttttttttttctttagaaagccagaatgctggccaggtgcggtggctcatgcctgtaatcccaatactttggaaggtcgcggcgggtggattacctgaggtcaggagctggagaccagtctggccatcatggtgaaaccctgtctctactaaaaatacaaaaaattagccaggcgcggtggcaggcatcataatcccaggtacttgggaggctgagataggagagtcacttgaacccttgtggtggaggttgcgtgagcggagatcgcgctactacactccagcctgggcaatagggcgagactctgtctaaaaaaaaaaaaaaaaaggaaggaagttagttttgcatcataaacagaaattggccatggccatgttggagctattccctttacctgggtgctctcccaggagccatggtcctcagccatctgtactgccttctaactcagaggcagtttctatttgtcaccacatttgctgtcattttccaaacagcagagttaagaggaagtgaaatgcctattttcttcatatacctattaaataagagaaaacaaaaattagaccaagccccattcactcatgtgagtgtaccccatggcccttttttcattttgtctatattattgagtcaawtttaggttcaacaaatatttattgttcacttcataatgagacctgtgttaggcacatttgcatatcttatttaattctcctaaccgttatttgagatagttaatgatgatgaccatgaattcactttttttaagagatgaagaaactgagactcagagaggtttgtgaacacagctattacacagctattagccagaagagctaagtcttaaactctgacctggacaattctgttacatttatgtttactgtaacatagaaactttgccccaaatctcaaaagtattgcttctctattaaatgtcttttttaaaattgtcccagagaatagaaaatataatttttatatgacttagcaaacttccttcccaaacatgatatgaagaaatgagtgaaatctcctttaaatagacatctcagtctttctaagtattgtatgccagtaggaagaaggctagtattctccctaggatatgcaggccagtgtatacagatttgtctcacatctgggtgcagatctccttgccaggtgcagaatggggactttacgccaggtatgcttgttggtcattataaagttcaagtgaattgtgtataagtctttgtgttttcatgacaacttttttttcctgatgttcaggtaccaaacacagaaaaatccttacgtgaaaaacagatacagattcttgtagtaggaagggaattgcattaggggttggagttctggagtttttggtctaaccacatcctgtcttaggaattttgccatatcagttgttgtgaacctgttttctaaaaatgctgacaaaaatacatgtaataggctggacgtggtggctcacgcctataatcctagcactttgggaggctgaggcaggtggatcacctgaggtcaggggtgttcgagaccagcctggccaacatggcgcaactccgtctctactaaaaaatatcaaaagtagccaggcctttaatcccagctacctgggaggctgaggcaggagaatcgcttgaacccaggaggcagaggtttcagtgagccaagatcgygccactgcactccagcctgggcaacagagtgagactctgtctcaaaataataataataatttttaccttgtaagtttacattgcctgggcaatactgaagaacacatggcagtgaaaaagttcttaatacaggggagcttttatcatgttaatgatttactgtcaccatcatgccctaaaatattactctcttcatggggtacgtcaaaatttcttatacgagtcacttagtgtgggtccctttgaaaaagcatgaatgaaatggcagggcctatgctcccagaggattggataactgctgcttaactaatgggatagaggtcatcaccctccctagtctgaagaatagagaaaacagagaagccagagtgtaggtagcagtttcagatctgggttatctccttatacttcctttagttctcttacattaaaagtaatttaacttttttttcgttgaatatatattgagcaggtgctatatgccttggttccagcagcaaacaaagtaccacattttgtcagttacatcagggtttctcaacctcaacactattgacattttgagctcattttttgttgttgttgtaggggctttcctgtgccttttaagggagttctgcagcatcctgggtctctacccactagataactgctgtgacacctcccatttgtgacaacgaagcctccctaaacattgcccagatgttcattggtgtgcagaaccaccctggctgagagccactgagttgttggatgtacagttttcacatattgatgtccctgtgatcggagcgcatcttacaactgatgccctcctgttcttaagattggcagtgggattcttcttggcttgtggcattgtacagcaggtggacaccgtgcttccatcgtcttcctcatttcccctagccccttctcagagctcacagtcagctggctgcagtggaagtctggggattagatgaaggtgaatttaagtccctctcagtttgaagagctctatgactttatcacagtctgaaattccccttttcacagggccagacagcctcgcgctacatgataatctgtttgtgagttcgagatcgttggattcattagggaatgactaggatagttgtcagcctctgctttgtcaaagtataatcttgaaaaaaaaattttctttttcaattttaatatagtctatcccactggaatgtactatcactggcaataaactggctctggttctttttaaagaaattactgttacgctgtagcatttgtctgtataattttagttattgaattaaaatcttttgggaccccaacaggatgagatcattggccagctggcttcctcccacctgcacctggactgaaattccccgtggcattagaggtgtttcgtaaggtgctccctgctgtctgtcctacagattgcagtggctctgctggaaaagaacggaattctatgcaagttgcgtgtgtcatgaaggtctctgcacagtgggtgtgtttctttgtcgtcttttctccactctgctcttctgtgaaatgtgccagcagtggacagaacaggggcagaggtgatcagtgaccattgcacagaatatcagtaagtgttgtaaggtatatagtcttggccaacaaattgtaagcaaaataccaggaacttcctaatctagtaggaaattttgtatgcttttgacaaacatctgatcctactgacactgaaagtccttagaaggaaaaacttgaggccaggtgctatggctcacgcctgtaatctcagcactttgggaggccaaggtgggcggatcacctgaggtcaggagttcgagacgagcctggccaacatggtcaaaccctttctctactgaaaatacaaaattaggtgggcgtgatggtaggcgcctataatcccagctactcgggaggctgcggcaggagaattgcttgaacccggaaggtggcggttgcagtgagccaagatggcgctactgcactccagcctgggcaataggaatgaaactccgtcaccaaaaaaaaaaaaaaaaaaaaaaaaaaaaaatggaaaaaacataaatggaggtgagctggaagattgagtgaactcatctgagccagaaaggatacatctacaaatttttctgggagagtrtaatagcaggctgcaaacataaatatgtcatctgtacttaagtaattttgctaaattaataagatcaacaatggctaccatttagagaacacattgcataactaggcactgtcctgagaactctgaatataaaatgaatactgacagtgactctgagaggaggcatggcagcagacaagayggctatttctgtcccattaggtgagaaaaacgaaacacagagacgtgaagtggcttgcccaagctatatgctcattaaacatcactggtgaaatgagctttcctctgctcagccaactttcttgattgattgattcattcattcattttttttctttactattatctctctctttgtatgagactacaaattgttatagtaattgacttattgatacagttactaattatttaaacagcacaaaattaaaaacttggccacaatattattaacacacagctggggattaatattttgtgtcttcctcatacaatcccaaagtcaacttcaccttccctagcaataaataaaatcacactggataattttaaaattttctatcaaatgtgtgatcaagtctgtgctctgacagcaactctacaattggcaggagctgagaaacaaaatacattttttaaagtaataaataaaaatgttaattcctgccatgcctgtgaggtttgaagctgggaacagagaaggatttaatttagggaacagagaaagatttaatttagaaatgacttcataaagacttaggttctaattaagaagactgaaagaagagcatcaaaccccacagcctacattcttctgtgggcctgtttgatagtgagctctcctgccttcagaagtgccctctgtactacatagattgtgctgtgcatggttgaatttacatgggatgcctatctacaggtaaaccaagtacaggtatgatattccattccagtggatttagctccatcttgattttgtaaatgagatgccaaaaatacctgtgttcagtaattagtgtcgctttctgcatcagtgtgctattttggcattgctctcttctgttgcagaaatttgaagacatctgtttactttcaactctcagagacctttttaagcacactgaatttgtagagcatgagcttgttcttatgttagagctccttacggtatcttccctcttctagaactttttaacaaaattattgaaaatcagtgaaaacatttgaacaaatttagacatggtatgatgagaaatgacagctcttattaaaaggaagagtgttctgctaaaatctcttcttgggggatgtatgtttggggttaagtaaggaagagtttcagaggtttccagcagcgatgtaatcctttatagaaaaggcccatcgttcttttaacaatagccaaagtggaccgaccagggtggcagcgttttcattagcaatgataattagtccagcttaatcacgtgggcatttgagcttttgatcccatgctaatttgtggacctgcataaggagataaactaagtggactaaaggtcagttttgtggttggcctgtgtaatgagcatctgttcaaagtatataaaagacttgtttaaaaattgacaacaatttatgaaaccagttacaatgtaaaggatggtacttaatttatacctgagaaattatacatacaaaatacgtgacataaggaagggttcatttcagcagcaatggttctgaccggtgccagggcaatatgggaatgataaattgagataaagtgcacagagtatgcagtgaaggaatgtcagtgatatataggaaatctgaagctttggaggttgcccagatggaggtgacttgtatccgttaggatttattcaggcatgtataacagaaaagccaggacaagcagggtggaagcaaaaaataggaactgattgactgaagtaactgaaaagtctggggctggttctggcctttggcttcctgcctctgcctgggttggcttcctttctaggcaggccctttcttcgtggtggcccctggcattactgggctgaaatcgtcttatagttgcaatgccaaaggaacaaaatcttctctccctaaaatttcttgcaaaagtcttatccttggaccagtcaccgcatctagagggaaaaacttgtctaattgccaagtgtgaatgtctgcctgcctcctttttcagaggaggccctgaccagaccctgcttgcctttcagaaggactgaatatggaatgaggggaatagtttcttaaaaggaaatctgagtgggtcctcagaatgagaagaattggtgctggccaggcacggaaaacacgtatcccataggaaatcaagaaggaaactctaaggccaggcgcagtggctcaagcctgtaatcccagcactttgggaggtggaggcgggtggatcacctgaggtcgggagttcaagaccagcctaaccaacttagagaaacccggtctctactaaaaataaaaaaattagctgggtgtgttggcacatgcctgtaatcccagctactcgagaggctgaggcaggagaattgcttgaacccaggaggtggaggttgcagtgagccgagatcgctccattgcattccagcctgggcaacaagagtaaaactccgttttacaaaaaaaaaagaaggaaactgttgactgctcataaatgcagtcattcactccctcatccttcctaccaagaattattgagcacctgctatggccaggcattgttctaggtgctgggaattcagtagtgcaccaaacacctcaaatttctttcttcatgaagcttaaaacatttttcatgctagtgttatggggggcggtcaagggtgggttatgtcctccagatatggagtgattggttgctatagctacaataaaaggcagaggggttgacggattctgtagtgggaaaagtaatctagggaacaggagattctattagagaaaaggaagggagggatggagagaggtttgaatacctccaaagtggagtctgactttgggtacctggagtattgtatcaagcacagagggatttagcgtaggtgtgtaaagagcctttttgttaattgggagtgagagttaaygtatttacctttgagaatgcagtcatgatactgtgttattttagatgctttgcctgccctggaagaagcactgagttgatgatctaatagcttgttaccactgttaatgtctatgattatctttgtcacagtgggaatatagctgtcagggaaagagaaaggcatttcttcttcactttcagtaatcgagctcaaactgctgacactccaaggaaaagagagaaggcacttaacaaaaaagacaagccaagaaaaaaaaaaaaaagccatgggaccttagcatgtgatggcttttaatgggaatgctcagatggtcttgccaayggcctggttttcgycaccaagggattagtagagtatgacctgatggcttaaaaaaacaactcaaaaaaaccaaatcaaccaaccaaacaaaaaaaccaggtgtgctggggtatttataaccgaaggaaaatggatttaaatgaacagatggaaaaataaaaataatgcagtttttcttgttgatggtagcgtaatgaggattaaataaaaatgtagccttttatgttttgaggggtgcaatatgaaggagaggctctgatacaggctgtctctttaaggaaagaagcaacaaaaattaattatgtagaggagaatcagggtcttgagcattggtggtggagaaaccacaattgaagtgaggctttgggtagcgtttactatgtgccacatgcctcaatgagggtctagtatattttaccttttatgcaactcacctgcctggaaaacagtattgtcctaatttcacatgggaggaatttgtaacagagaggggttaagcaaccaagtttccatgactgtcaaatgccagctcaggtgctgaaacctaagacattttttccccttcctaagcctttgggtttctgttttgtttttaaagcctttggattctttgttttttttttktttgtttgtttgttttggagaagaagtctcgctctgtcactctgtcacccaggctggagtgcagtggcgtgatctcggctcactgcaacctccacctcctgggttcaagcaattctcctgcctcagcctcctgagtagttgggactacaggcacccgccaccgtgcccggctaatttttgtatttttagtagagactggatttcaccatgttggccaagatggtctcaatctcttgacctcatgatccgcctgcctcgccctcccaatgtgctgggattacaggcatgagccactgagcccggccaagcctttagtttttaatcactgccttccaggcccctcctccagaaaaatccctgaatggccttgcattactagtaatataaagttttaaaatactttgtgtggcttacaaggtcctttttagctttctctgggagacagtttccaggcctgtgctgaattcttttgtctttcctcacattcttttcccccagctctcccccatctgactttctgccatcttacttacttcctcttatgcccctgcagttttgcttatacctgtgttatgacacctatgcctccaaattgtctttttctgaatgcttgattgtgagaacttctgggagttccagtcttgtggaagttgtatcttatgttttttgcccccatgattttagacatagtaggtgttcaatgaagtaaatgctgaaagaaaactataaatggtaggtttcagagggttaattgttcttggtatttctttcagacagaagcccagaggaactttaggagcagcaaccatgccttaaatggtttttttttaatacatttttttaaagcattggttataggttctttctgtacagttgtgttagaggcagattacatttactttcttgcacctctggtaactggataaaaaaactctttgttcacctaagaagtcttgcttcatatttgaactggctgattcgaccccctttagtattttaccatgtttatgcctgccacaggaaatgtgaaagtgagtgttttttgatctttatgtttaaattattaatgtaaagtcaaaactgggaagagagctcagttgctgcatggcatatacgtaaatattatcctatttgaagaacgggatttctggaaaaactcatggggattttgcagtaatcctatgtcctgtcrtgtggacaagtatttcaacccagctgtccccaagacatgccatcrctccctttcagcccattggctctgtggaattttcattgcaggaacatggaactggttaaaatatcattttcgtaagcagtacaagaagctgtaaattgccccctagctcttaaagacagtaagtcattcattgttagcagtgataatgcatrcctatacagattttaggagtgtttcagttctgatctttcrtgttagaaaagtaatctcccttcccagttgaactctttttcctagttactagaattggaagtggcaatcacttctattccagcctgtccagtgttttctgctgaaactatttagaaagtgtgatgtcctaatgggacctggctaacttcttgaactgtagcttttaatgttcttggttttgtaataatctcatcctttcaaaatttgcttgaaatttgtgtttctttgacctctggtagactatactttggtgccctttgtagaaagattttctttgactcaatattgtagatagttcaggcaaccttttaaagaagtattcttctttgtatggttctaagaattctttacacatttagttctggattatttcgtgggaagatggctcccaatctgctctctctagtctccttgagggcagaggactcccctaatttcctgtgtatttccagcgcttgtttccgtgtctggttctgagatagtctacacagagtgttttttggggaatgtgcaagggtttcttcttggcaacaattgacttctactgttttacaaagtacagagaggctgtgctctgttgctgatggggttacttgattctgtgaagtgctcttttctgactggtattagcaagtaacgcaaacccaaattttaaaaatgatagaatcggcctggcgtggtggctcacgcctgtaatcccagcactttgggaggccgaggcgggcagatcacgaggtcaggagatcaagaccatcctggccaacatggggaaaccctgtctttactaaaaatacaaaaattagctgggtgtggtggtgcgtgcctgtaatctcagcgacttgggaggctgaggcaggagaatcacttgaaccagggagtcggaggttrcagtgagctgagatcacgccacagcactgcagcctggcgacagatcgacactccacctcagaaaaaaaaaaaaaaaaaaaaaaagacagtatcagaatcccagtcttcctcagacctcatatgtggaggcagtgcatgtttagcaaacctggggccctgggagccaccactgactgttaggaccactttagtgcctgtgctgtaagccaggattttgaagttcttgggggcaattttgctttaagcagtgttagggaactctttacaggtttgtgagctgggagtgacaagccattattttatccacaccaaagctttgaatgataaaggggttgaaccactgtcattcattaaattcattaactgttggaattcctctaaggatctatctgcaggccccttctcttctcactctgtacacggtctccccaggcaacttcataatggctaaaattaccatctattccaagagcatgctcaaattgatatttctggctgaaatctcccttttgagattaaagcccttatcacctacttcctccttgacgccggagttctcaggacaccttaaaaccaagttcagtatctctgcccatttctgcttccttacctttaaacctgttcctcattcagtcctttctgtccccaggagtggcagaaacataatccatttgccctagcctcaaacctgggatgtctgtcttcctccgtctacaattaatcatcagccagctcctatcagtgtcacttgaatccatattttctcccctactcactgccaccactaaatagtaatctcttgccttctgtggaagctgtagaacatcgcttcaagtttaccctcttgtgacccactgttgtctacacagaaaatctggaggaacctttaaaaatgggaatatgaatgtatcactcctgtgtcagtaactattctgggaccatttttgtggcttccaataggyctcaggatacatcctaggatccagcaatgacttttyttaatttctcgccctttctacttaccgtgccccaggtcaagcccacaattttccctacacctactgctgtctctactcagaaacgctttccctcctcccaacctgcttcacctggttgaattctagctcctgtttcagaagcttagctttaatcacttccttcaggaggcttttcttgcccccagctaagtcagagccttactcttctcccacccacccttgctctgctactgacaatgaagaattgcttgaaaggggcaaaaatagagagaaactagatactgacacaggcacgcaggcaaaaggaatggttagaaaaaaggaattgctggtcaatttcgccattattgactttgtcccttggtatttaaaaacctaggcaggtcccctagtatcagtgcctctaggaacgtgagcacttctggatgccgggcagcacttctaaaggttacctacgggctccctagtaaattaaggttgtatattgcaatggcaattaagcagtgtaataaatgtgattgttgtggtggttctatggggaggggagactcttcccacaggctgggttcctttcctgctgcttgtctaattaacataatttctasccccaaggctcactgctgcattttcttctccaatgtagaagggtgatggagatgcaccttccattctttcagcacgtcagtcatactaaactacactctgtgagggccaggggaaggaaacaaaaacccttctgtgtatgtagagtaagaagttctactctaaagcacaaatgctccagagaaaatacaagggagtgtattttctgctgctgtayaatctgctgctctcttcagatgctttgacctgttcctatagtgactttgtcacatgattctgaatttaaggatacatctacttcctacataagactaagttgcaaaccagctgcaaatatgtagtactcccttggatgaagagtgttggattggaaatctggggagaggacagactcattggtcttccagtttgttttcctagagatttcttgagagtaattttgacgatgccctgcttggtttcatgttacttgctgacttcagcacctaaatcccttccctgcccaacttcccgcctccaccaaacatactggttccttactgaggtttgaatgtaggtttgaatgtatgcatggttccctgttaaagttctcttgtttgaggttcattttttaataacccttggcagtgtgctgggaaatgtgttagtggtattagtggtggtgtgctgggaaatgtattggtggtaaatttgtatatgtttgtttaaagatgagtgtaatgttgagagaggttgggctggtgatggtgttgaaacacaggatctcagactcttagggctggggaaagctattaataccatctgctctcatcactttgatgttctgtatagggctggtttgtagagcctttctattagatgaggtaagcaatagggaccttcagagattcgtggggagacgtttattctagccctgaaaaaatggcacagtatgagctggcaggattggagagaggaggctagactcaagcgaagccagggggagaatttaaggtgaagatttgtcagacactgacacttgtaagatacttcccttgcaaaaccgcatactacatccattatttttccttaagttatagcagtggtccactggaaatgttttgtggtgatattatgggaattctgcagcataaggatgaacagatgagaatatctcaatgagatgtggagttggaggacttaacaaatcagatgagaaaggacaagcttgaagacagatcagtttaggtaaaagtgattgcatgcatgtgagtttgattgaacagtaccaacatgtcctgagcaagatgggaaactttcctaataatcatctgatggaatcaagttgtgataaattgttatcatcatagtattatttcaatttaatggccatacataatggcatctcccagcaattaatctaacattaacctccaccttagttattgaatgtatactgtggtttaggctgaaaacatgatggataagaattactgactgctttggatctgtatacgatatgtcatagccttgaactttattctrttctgcttcagtctttttcagaccttcctgtacgaacccaagtctttattatttgtgacccaatagcatgttagatgtttttaactggaaaatgtgaatggccactttttttttctcttacgcgaagtaaatgctatgtaaattgatttttaatgcttttattgtcccacaggaagataaaaaccattagctaatgacaatggtaatgtttaaatagtttttaattttaaaataatatttgtaacctgcaatgctatgctatctcattttggacttagcgaaaatgtgtgagcatctacagaaatgtatgtgaattaggctccaggaataaaattgcataaaagtacaactgtggcttaaatctatttatatgtatgcttggatcctgagcaatatagatacctggctagaaacctggctgttccattataactgaatgtcaaattccccacagttagtcattattaaaaatacccttgtcttaaatttactttggcacgggaatgttcttggtgattaccatactgtgttactctagggagttaaagatttatattatgtttcagttctactgaaataatagcattcgtaggcacacagatatctctatgtgtatactgatatacttgagaaagttctcctttaacaacaggtgattttaatattatctgaaawgaaataaaaatactttgtttcatagcactgtggagtgtcaacagaaatcttatttgttctttactcctaaaataggagtataacacaaagtaatatgttatgctcactaaagaacagaatctcaatttcagagatagaattgccaagttcattatttctggagaaaggaacaaatattaaccccttagtttaacctgaaaatgaaagagcatgtggactaaggggaaaaaaattatatatatatatatatgaaaaattgacttttctgtcttttagttgtatgtctttatctccaacagatatgtgattatcctccagagaggaccatgagaatttatttttaattttcattcygttaattacttgtgtaacatatgtatgtccccataacagccagtgctcactcgcgtgcacgctgtctctctctctctctctctcacacacacacacacgcttactacatattcatacatttattctacagggaagaagagacagttggagacactaatattccagctgtcggcagcagaaycatttcacaaccttcttcccagaacttttggtcahtactattcttgcccctcagcctcactactcactgaaaaaatatttaatgtggatctagtcagttccagtttggttagtttaaagagatccaggaagactgagcaatcatttactaatctgtattctaaaaaaccagctcaagaattaattcaattagatatgccagtcaccatatctggagattaaaagcaggcaaacagaagggaaataaggaaaatgaagcagggcaaatgggactattactgatatattaaaatgaaagactatactaagacttctcatatgcgtatattgagatttttcctgctggcaatgatcaagtacaattacataccttttgtatgacatttctgattggaaaggttatgtgacatgcagggaggggtcttagttattggctctttagctatttccctctttatcctggaatagtaccacagtgtgtttttcactcctttaaaacattctttaatgaaattgctttgagtcatccctgtctctgtgctttgcctcttttattccattgacttgtttagggtacataggaaattaggttgaaaatgtgttagtattccacattaatattaacttgaagtctttcccttgtatcactaaatcactacagataaaaacttgtactgtgaatgcatgctgcttgtctataaatatcacctgaaacagcaaataaagccatgtatgtttaactgagaagagytgagaattaatgctaaattaaaatattgtcacacagattaggagaggcatacacacacacagtctctgatgcctttctctttactgtgaacactgaataataattatttgacgaaggtagtgcgttgtaaatatttataaacagaaatgtaaaacagtgagaccacagtgaataaattattttgaaatattttaaaatccagtttttatatgctttttagtaaaaattattcatggtgatcaatatttctttctcacttgccatctgctccacttctttgcctgtgcagttctaggtgaatgatgcactgtgctgtataatgtactccacaaatttattgacttggatgcagcatttttatggagagcaggcaaacatgtaatcactaaacacaagtcttctgctgttgtaattgccagctccttcctaaccacgggaacaattaggtgatcattaaatggcttccaaggggatgccttcctctcctgtcttactgctggtgtcatttagtagcttctgcaggagaaggtggaagaaatctattccacgtagtcctggagtgactggtcaaaaggatttcatcttgtgtcttacaggcaatttgtgaagagcccctgttttcatgcgattccattttaattcagttgcagcatccagttttgcactattgaatcaccccacttgaaagcctcagagaggggcttttgggctgaaacaatgacacttaggtggtttgaccacccctttcttagtctgaaagcagatgtctgtatccacttactaacctgtgactcttgtgaaattttccttttgttacctggcttggagcatttgccttaatgaggtttatgtatttttctggtttgttagttatcctttttattcttccaagcaaaccatgttagactttattattattattactttaatttctgcctgtttaggggctagttacaaatattcaaggacttttcttcttttttttcttttttccttttttttgagacagactcttactctgttgcccaggctggagtgcagcggtgccatcttagctcactgcaacctctgcctcccgagttcaaacgtttctcctgtctcagtctcccaaccagctgggactatagcttcgtgccaccacaccaggctagttctttttgtatttttagtagacatggagtttccccatgttggccaggtcaggctggtctcaaactcctgacatcaagttacccacccacttcagcctcccaaagtgctgggattgtaggcctgagccaccatggctggctggaattatcttgaatcgggtaaaatcatagcaacctagtaatgctgcctgtaatttgaagacacctgaaggtcaagggttcttaatgctgcctctcctatgaagccatccctgattctcttaatttaaattaattgccctcttttatatgcctccatagttacaggttttttcttttgttgtgtttcatgaatctgccttacataagttctctttatgatcatctttcctgctgagtggcaaagtcttcaaaggtagacattgaatcttatctatctttgctttcccctgctgaacacagaatatacactttataattaattgcttgttgaattggagatagtcacatttttctaacctaatgccctataaaagaactctcattgtgtcattcaaggatcatttagtggcaagaatggaaatccacacgaacttactttaggcaaaggcaggaggttctttggagaatwcaaggatgtctctcacactcaaggctgggcagtacatctagccaggactcagtggagagaggggccacttctgggaaagtcctaggagccccactcctgtgccgcactcactatctttctgtctcttggtctgatggtactgctgtaccatggtaccagcatctgtcagtctgattatcaagctttttgttctctttcattaagtaatgacttaccaggaatgctgctccctccggtccctgcaaatctaaggcctcaatatgactagttatgtgttccaatttcagattccctgcagagagaatatcatggccttctctgggtcaagagtccacctgtgttagcttagccgaggccctgaagaaaggaggacatctaagagaggctcacctgatttggagaactaccctgtcctcaggctcccaagccagcggtccccaacctttttggcaccagggactggttttgtggaagacaatttttccatggggggatggttttgggatgaaactgttccacctcagatcatcaggcacgtgcaacctggatcccttgaatgcgcagttcacaatagggttcgctctcctatgagaatgtaatgctgccgctgacctaaccggaggcggagctcaggcagtaatgctgaatcctgctgagtgtcttggttcctaacactaagggatgggtttggaggagcagaaatgattgttggaagcaagtgattggtatctgcatgcaactgtgccgctcaaaggtgctggagaatgactaatttgatggaggaaaatagcagtattagttgtggttttcttttcaaaatttcttatgttcacaacacttgtgttttgtcctctgaaatttaccctctacaccctaatgcttgatcagtgtccctgcctgtgtgagaaaccctcctggaccactaaagcccagtgtcattttgttcttctttgccctttaagagaatggtacattgcattcattttacatctgcttgggctgagctctgtcctgcccctaacgttctgtgctgttctcatcgttgtcttctcctctgcagcttctgttcatgctgttccatgtgcctggaatgcccttcccctcatccttatatatccatcagagctcagcttacgtgccaccttctcaggagtcgctgtattctgtagggtctccttgatatttttatttcacattcaattatcttatgttgtttttcacaagctgcatktacacaagtttgtgttagtttacttgcttcatacctttctcccccactggaatgcaaacccctgaaggctgttctgccttgttcatcttggatctcggtgcttggtatccagtaggagccccgtaaatgtctctttaatgtgcaactgtctggctgtcatgcatctcctggagtggtggcatggcctcttcttcttgaaatgactgaaacggaaccctttgttaggccatctgtatcagggtgataaattccctgtttgtgtagtcagctgccctgccaggaacatggcactctgtaatgtgcataatataatcatttagcttttggggtgatttttctgcatcatttgatcaagtcataaacctaagttatgaagtctactctggagactgagcctaagtaaaactgatcaatgggatctgtcttgggaacaagaaatttaatatactctgcttgacagccaactagagtcattgtttttccttcctaaatgcagatctaatcatccagatatgacaagggtggggttttttgatgagtaggttaggcaattttgtcccccttgcttctggatcagaagacaagatggttttaggctggttgcttttgtcattaagtaattatagctttataatgggtcttggggagtatcctgcattcctgtgttctgaccactgtcccctgtactcccctgtagctcagcttttgaatttcctaaaattaaggcaatgagtggtatgtgtaaaatcttgcattatagagactgggctcaaatcctagacccttcactgatcagctgtgttaacttgggccagttactcaatccattagcctgcattcttcatttgtaaaatagggataaaaatgttttgtcttagcagggatctagtaaggcttcattatgatgatatgtgttctttgcacaaggccaaacaggcagtaaagtgttaaaaaactttggcatcaacatcattcccattatcatcattatctccatctctccagtaggaccttcagaagtgacactgatgttacctggaaggaggggccaggaaggggaaagggtgtgactaatacccacaaacattatcttaggcagcataagtttccagaaacatggattcacttattattcattggtttgagttcagcttttcttgttgtttccaaataatacctttagggttgaagtattagggacaggtgtgtatgcagttttttctcagcagtggggataaacatgtggttgcaggacacacaggcatcttaaaattcggacttaattaaataaatgaaaaataaaccatttcacttcatttttctgctcaggtcagattgatgtctgttttcttagggtaattgtggcttgatgctctgtttggtcccctaaataagaaagtttaggcacatcattcctcaaagatcagatattccttgtctggaagtcttgtttgtttgatcttcagagtattttaaaaatagaaacagactgagaaaatccagccatgcttgaaaaatcttaaggtttccrtggatctacattgctcagtctcaaccagasactagaactgagtggaagctgctttctttagacctgtcattctcaaattgtggtccctgggactaacagcatcagcatcaacccaggggacttgtaagaaacacccatttctacaacccatcatcccaaggcttttaaatgagaaactctggggtgtgtgccactgtctttatcaggccttccaggtgatgcgcatgtggctagagtttgagaagcattatttcagacacagctcgggctctgcactccccagttacagttctttgcccttctttgctgtcttacacccagctccctacactgagttaaatygcctccctggtgccatgaagtatttttttgtctagggactgctaaggattttagggttgggttttaagtacgttgatttctcttctgcgtcaatatatctgacaccttaagctcacttaagtcccttaagcttctctaagcctaagaaatacatggtgagagggatgtgtctctaagaatatgtttaacattgtggaagactgttgacagctgtgttgactctcaagacaagatcaggataatagactgtctaaaaggaatgtgttaattttattgcttgaagtataagcatatcaatttttcttaattatgctagaaatggtggtagtcaggtagtcaggttcacctagttgtgaaatctttcctttgctcctgtagttgcatggcttgagggaacatgtttaacctcttgagtacaactttgctcatctgtgaaatgggaattacataacctatggcaaagtgaaatggggagagttaagtgtggcgtgtataggaaaactgttcctttgagttcctttgctattaaggctcatttttttatatccacagtcacattcatgaagcttttctgaagaacaaacacaccctttgggaagtatagtcaaaagcgggaacgtatttattgagtaatcaataagctatatattttgtcatgtatgaattatgtatgcattatttataatacctcacacatgaatcatactyatagtaagcaktttttgaatgcttagtatgtgtcaggcactgttctagaagctgggacaccaaagagagctgtttagataagatctgtgtttttacggtactcatattccgctttggagaaggaaagggagacacagtaaacaagtgttatgtttatttttttgtttgtttagtcatttagttttygtaatttaatttttaaaaatagataatacatgtacagcatttgaaagtcaaaataatgtaaaaaggtatatgcagagaagtcttatttccaccatgttggtgaattctatattccgtccccaccctatcctcccacaggtaaccatatttattagttttcrtttatccttccagggtttctttatgcaaatataattaaattatatatgttcgtaatttctgccttaataaaaggtagcatactatacatgctgttctgcacttttaaagtaggagttcttaaccagcrtaagactttaaggggttattaaacatactccctcaaggttttaaataccattttatatgtatctgtcaataactttcatcatattttcaaagtcatctatgacccccaaaaagggtaaaaatcattatttcrtaagagtttacagattaccagatacctggatttgtaacaaaccatgaactgcagtaaaagatrtatatggcatctagaaaaaaaatcagaaaaagatgccatatatagaaaaatgcatttgaattaatacgcatttagtgaattcagtgtaattttatgcttttatacttgcggatgctagaaagagaaaatatttatgattaattccttatgagactaccaagttaagtacttacaagataccaatgaaatacatattaatccacattagaatttaaagacagtattttattttcacaggtctctgttgtatcaagtataaatgacgaaattgttaatagttcttacaacttgtataagtggataatttgaactgtagaatatactttgtagaagatgggttttttgttagtttcttttacctaaatgaacatattcatgacaagttgaagccttgatctgkgcttgtcctttgggagaaaattaaatcttaacctaaayaatggaaatactaaaggaatgcttgttgaaaatatgtgcaatatatatttwaaaaaaaaaagacctcagaaggyragggtatatttagaatttggtagaaattttggtatctgtattctaaacatgtggtttcagtgtacaggtgatatgtttaagtggatgtaatttaacagtattctttcagatagtattctatgcagtacctagcagcagttgctcatttaatacatgcagggaacacataagtagctggaaaacaaacttttatcagtgtaagtagaattgtctcatgtggaatttgcttcagaaggtatagagcacaatggttaatgtgttatcttttcagaaacatagaactaagttgatgggaaagaggggacaattttaytctgtaatcactaaagtggtttggagactttcccaaagatattggcaggatggctttataacataaaccatgacttggagaggataaaattaatcagtaatcttcactgaagtataaagtgtgaatgaggygggaaacgtcatgggaaaggagatcttttcttatggactgggggactttctcagatggttctctcagcactgtcctctcctgggtggcattgtcacatgcatttatttattatggggttatgmgttaatgacccacctccattgccgctgcyagagcaaaatgttagtttgagatcaaaactctccatcaaacatagttgaattccaaatcgctgaactgcccttcactagaagggaaagtgatatgacctgttctgcctttctccaggcacctataaagccaataattctccattcatgtgaagctcctcttgtctttattgccttcaccacttttttccactctttattatagttcctttgtccgtccttgtgtcgtggttttacacgcgtggctcagcctgagcttcaggctttgttctctctgcttttttatggcctttttgatgagtcgctgggtagttccaacccactctattgtcatttgatcacatactgtctcattgacctagaattttagaaggaaacgcagtctagattagtatctctttgaattgttcagcctttaaaaaaaatccaatcaaaatgawataattttgtagttagtaaagaatccggggccgggtgcagtctctcacgcctgtaattccagcactttgggaggccaaggtgggcggatcacctgaggtcaggagtccgagaccagcctggctaacatggtgaaaccctgtttctactaaaaatacaaaaaattatccagacgtggtggcatgtacctgtaatcccgtctacgtaggagtctgaggcaggagaattgcttgaacccgggagacggaggttacattgagccgagatggcgccattgcactccagcttgggcaacaagagcgaaactcygtctcaaaaaaaaaaaaaaatccagaatgactacagtgttaagctacggtggctcacacccaacatggtgaaaccccgtctctactaaaaatacaaaaattagctggrcgtgctagtgcacgcctgtaatcccagctactggggagcctgaggcaggagaatggcttgaacccaggaggtggaggttgcagtgagccaagatcacgccatagcactccagcctgggtgacagagcaagactcygtctcaaaaaaaaaaaaaaaaaaaagttaagcttaarcccttagggtggacttactttaatgagcagaaaatgtgtgagttgttcaagagtgttcttctaaagcacttgcaaaaatagctttgggtatgctcattcattcattcattcttctacaagtatttattgtggtccaactgtgtgtttagcattgggcaataataatggctaatatttaacacgtaacatgctcactatttgcaagacactaagcatttcacctcatgtaattctaagagttaggtgctgcaattattctcattttgtaaacaaggaaacagatgaagagtttaggtaacttgcccaggaccacttacatgccaagtggcaaaagtgggattctgtggtctggttctaggattcatggtctttatcactgtgctatgcatgatttctttctttatkgaacttgtcatctagtcagatctgacccgtgcagttttgttttcaggactctcaaagcaaacttttctttcatggcaaaaacaartctattctagctccatctgcattaccacagaatccagattagtagatttcaaaagaaggaggtttaaccatagctactatacctccgccctgaatatgtgacttgcatgtcaacaaggtcttccatattgactgacatttacatgtgatatttggttatcgagtttaactaaggaatcatctygcatgcttaactatctgctggcgaaatttttgatgcygtggaatgtgtcagcrccagtggagtattataagttaattacttgtgtgcacagcaggcaacactgatacaggtggcctctagcaatgtggagatgagacattacttgagacacctgagatgtggctgtgagtgagttatcctgatgagtggggaatggggaatgtcaagaaggccaagtatggctctgtcctgatggaatgttcattcagatggaatgttgataggttgtgaaccataccattgttttacaatggggtgtgctgatgtgaggttgccttctggtggcccaggtagaactatgtgatagggattcaggatttataattcctcttcaataacatgcaaaacatgtaaagatgactaggacccactgacttagttttcattcattcgtgttttttttttctcactttccttattcaagaatgatttgctgggtgtttattatatgccagtactttttgctacactctgtgggaacaatgggaagccaaatagacaggtrgctctagaatttctatataagattctgccactgcagagtgggtagaagcggatctagttggatttgtcttgaatcaacactggcatagcaagcactttgtttctgcttagcttgtacatttattaaggccactttgtttttgcttagcttgtatgtttattaaggccactttggccgaagttttctcctagccatttctgccataaaacttaaagttgggcttgtgagaagcaggacttgtcacaaacagcattggcttaatttctttctagtggatcagtgaaactcagattggtgctcccagagaaaacctggttttctgaagtgtatgacaaagtaaactaatctggaatggtgggctcaaggaaaacttcttgaataagtgacacttctgctcaagtttgaaaatggaatacaaagtctaggcctgacctggaccattatgagatcacacatagggcctattgcagttatcacaggccttatctttgtccgcacatctggttgggagatgggtctgtcagtgggggcctctgattgtgatttgatctcttgcattgaactataaaggcttttttaacaaactaggcagagtcgaatgttaaaaacctccattagaaacattttattattactcattttatcagcaagaccttcagttcatctcacctttttcaactccttaatctcyattctacttgtcagaagtagtaagaaatattaacccaccataggaatggtctcacgcctcatttcaaatgttagtaatgcatcaaaaccctaagacttatattaactgcattttagatgtctaaattcattcccttactgggaaggaaaggtatatagttaaaagcagaaaagggctaatggcataataatttataatcatggtgttctgattagraatgagtgacattcttccaaatttagtgcatgtaactgccactgaacactgattataaatttggctaatttgaacaaaggctttccttgttggttaagacagctgtgtctatctttactattgttgcagtaaaacattttaagtggaatttctgggtcaaagtgaatggatgtttttaaagatgtatatataaacaaaagcttgtgtgtgcgtttgtgaatatgtatttgtgtatacacaactgacttctagattttctctagtaaacatgtaaaataagtatttttaataataataatagtatgtgagtaagtttagatacaaaattttggtcctctggyggggagataaaggaggggaatatggatgttaaaatatatcaagcacgtcttaytggaagttgagaaagaagagagaaattccttacagtgacatgttactcttccatgaaataatgcttctgacattaagctaaatggatgatgtcattttggccataaacaagtactaaatttggctaatacaatggtctgaaccattaaatgtaaagatttttattttgtcaagtgtggtgtgatggtttatgcaatcatggatatatgatttcatattctgcttttttttgcttttttcatcatcctttcacttactaaatggcttctatttcagagctatgtcatattccatcagtgagtatagacttgcattgttggacaggcagtttgttcatccctttttgacgctaagaatatggatatgaagcccatctgtgcataactgttcctttgctgagttggattttcttaggttcttagattcccacatgtagactcattgggcttaagtgtgaaaattgataaagttttaatatatattgtgagaattcttccccaaaatatttgtggtaaattttagtgcctttggcattatctgagagtgcttctgccattgtatccttgccactggtagctttttatagatctatttgatatagatttcaaactaaaattccaggtaaaattaaggtgctaccatttgggggttgactttggcctrttcatttaagccctctcaactttactttcttcatctgttaaatgttggatggaggaggggagggaatgatatatgaggatgatcttgatgatatcacygtatcgatggtgatacttcatgggactgtggaaagaaaatctgtgctatggcagttggtcaactttaaagaacatttgtagggtaatgattctcatagctcacctttatttaaacctgtaagttctttgagacatggtgttgtctgtactctgtacattttactgaacagatgatgtcacgtataattaaaactaagagcacaaacttgagtctcagattcaccagaatttgtactcctactccatgtgagttaagtcctgcatgtatcagtttatacatccttattatgggaatgtagtactatatttgacacagaatggggtgaggagtaaaatgaaacactacaggccaactgcctggctcaatgagtggttcattaatgatagttagcaatggtgacagcaagagtggcaacaggtgtgcacatgacaatgtggtctccagtggagcagagaaccttgtccctcaacaatgttccaaggtaccytggatgcagagctcagtacatgtaaggtctggggtagagggaaccttgartgaatatttgcatcaatgaatatataataggagtagtataacaaataatttgtgaatgaattaatttttcttcttggggaattttaattaaagacatgaaataatacaatcttttgggtacacagtagtcccgtacagaattgtatgatacacattatscttttcagcaaaaagtattaaagaagttggagaagaggcagtcttcttcaagggcaagakggatagtagatggtgatccaggagtaaagtgaggaggtgaggtgggtctgggagttggaactggcgccttttagaaagttttttccataaataacctacagactcggtcaccctcagtccctgcatcktgcatggaccctggtgtgcacatctggtcattgggactaaaacatttggcacctatcagctgcatatgtccaacctggggagcgaatcacccggcccagcatccctcaagacatgataggggaggagggatacagcgataatgattttccccttggaaagctgcactgggtagatggtacacacccatgtcctttctcaatcacactggtagaatagattaatttatatggaagtacaasttaatatgaaaccagtgaggttgttttttagattaatacgtttcaaaaagattttgagataattttgagttaaactgtgaggcagatcaatcttcagccatagatagattcctatcactcctttttagcacaaataattgttcatttgacatcagtcataaatattcttaagcaaggtaatgaaatgccacttttttgaaccatgtgagatatatcttctgattgtgtttccaatgtcaactcaagttaatgtgatttacccagagtagggtacctgggtagctttttggatggcattgagaaactcatgaggagaaggaaagaaggcytttaatttttttgtcatgttctgacctctgtctgtgttttagtgtcaggataaagaccatacttaaggaattttcstttcttctttgttttgaaaaatcactgacaaaaaaatgcagaaaacacagggaaacatctaaggagggctgaagaaaacacagttgccttattttcaaatttggtgtaaatgtttgctagttgtagaagctaatttaatagcttcatctgcaaattataagtaatayttgacaaatattcaatatgtgttttgctttgagattttagttgttaatatgcaacacattacctataaatatgcaaggggaagaaactctttgggattagaaggagttgtttggaataattaatagtaaaggtaggttagtagtgatggcttaactgtgatttttttttaagtggatgttcagaatttatttgaactcttaaaaaaattctaggatctagatctgcatcttaaagtcacatttaattcttcttggctttgaacttggtacatctgcagtggtaggttaggaaagaatcacccaataaaggaatttgaaccaaatgagttcataaatgggaacttatacctgccacttattcctgacaccatctaaaatcctgagtttatgaaccaagtgagtccatatatggaaagttayacctgccacttatttctgaaactgtctaaaatcctgaatttaagagtgtaatattgcttatttattctctattctgtcaatatttcattgatgccccagtgtggtttgaatattagtgatggtagtagtatcagggaggacttcatgtctttttttctgaaacggaatgtcgctgtcacccaggctggagtgcagtggtgcaatctcagccaactgcatcctctgcctcctgggttcaagtgattctcctacctcagcctcctaagtagctggattacaggcatctgccaaccwtgtccggctaatttttttgtatttttagtagagattgggtttcaccatgttggccaaggtgggtttgaactctgaagcgaatagaagtaggcttatcatcatggaagtacttacctggccatatctgagtgaaggacagttgaagtacttggtctcattgggaccatgtcaagatattccaggaagaaaatccttttctcattttgtcaaggcaatactaggaaatcagtatttgtatggatattccatatttttgattaaagggccggaatcaaattctacttatttccattgctcttacagtgctgggtaccatatttgaactaaaactcattatcttgtaactaaaggaaattagaggttgatgagtaactagtccatgagcaagttgcttcaaaactgttcctagaagtttgactacattttataacaagagaggagatgtcacataggtatacttccagttaaaaatccctcttcggatcatttggtgtgatggaagtgttctgaaactagattgtagtgatggtcgtacaactctgtaaatttactaagagtcattgaattgtacaattaaactggttgacattaagcatatataaattatacctcaatagagttgtttaaaatccactattttaaagttaaacttcaaggaagaaaaaacaaaaaagaataaaaataaagtgaaactgcgttgttatttgtgtgttttagaatacttattgacccatgtgtatgcagcaatgcatataatgggcccatcgctgtcattttagaatttcccttggggcagtgagtgaacratagacaatatacgaaacaaataaatgtgtactgtatattagaaggtgtgcgctacaaagcaaaaaataaaaagaggaagaaagcacaatggaagacggtttacatatgtgtggcagaataggtcttattgataaagtgacatatgaggacctccagaaggtgactgagttgcctgttactctaggtaggctgaggacagcagaaaaatgctgatcatgttcaaaggacagcaaggtggcctgtttggcttctgtagagggatccatggggagagaagtagaagctgtgatcagggaggtaaatttgggcagaggccagatgtgtagggccttakagatgatttttcaggtctttgtcttttactctgaatgatgtagcatgctgttggggggtttcatgcaggtgagtgacatgatctgacttaagttttaacaggatccctggctgctgtgttgataatagactgaaggggaggggagggtgggtcagagagtcaggttaggagacaattgcagtcatttctaggacaggtgatccagcatgggaccctgagtgttagtagttagaaagggcaaggagtagtttctggatctctttcttccctcccctcccctcttcgttctttttctttttttttcttttcttttttttttttgagacatggtctcactctgttgcccagggtggggtacagtcgcagaatcatggcttactgcagccttgatctcccgggctcaagtgatactcacaccttagactcctgagtagctgggaccgctggcgtgtgccaccatgcccagctaatttttaatttttttttttttgtagagacagggtcctcctatgttgctcaggctggtcttaaacttctgggctcaagtgatcctcccaccacagcctcctaaagtgttgggcttataggcatgcatctctgtgcctggcctgggatttttgtgaatgtacaaccaagaatttgctgtgctgtccgggagggagttagggagaaaaattaatgctaataaatgaaaacaagctgtcctgccgagacacttgaaaggtctaaatttccccttaaaaagtagtcctgcagttgagaactgaggatacaaagagaatgaaagctgattacagcatgcttcatcctttgtccagcatcttctgaaaacggttattttatattgcagctttgtctgcattagcagttttacctgcaaggaaaggaattctaaattgctaattagagcacttgtttttcacaactaggatccagctgttttggaaatcactaagcattttctctggaatgggagttcctgaactaaagtattgcagctaagttcatcaatatggtagatgggaattgacatatgcttgcatcattcagggtttagttctagaatctaaaaggaaaaatgtatgtgctgtctcctgcttactggcaagctgtggatcttaacttcagtttcctattaatcgtattttttatgcatcttgccaaataggactcttcattgtgtttaagaaaatgatttgggtccagatgcggtggctcatacctgtaatcacagcactttgggcggctgaggcaggcgaatcacttgaggtcaggagtttgagaacagcctggccaacgtggtgaaacctcatctctactaaaaatatgaaaattacctgggcgtggtggtgggcgcctataatcccagctactcgggaggttgaggcagggagaattgcttgaacccgggaggtggaggttgcagtgagccaagatggcttctctgcactccagccttggtgacagagcgagactccatttcaaaataaataaataaataaataaatagattggtttcttctttaaaaaaataaaactctcagacatgtaggagyccaccacaaaactgtcaaatgatgctttcctttgccttcttgataatgtacatagactactgtcagagatttttttttcatgrtattagtgatatttaaacaggtagttgaagaactgtggaaccaacaccacagagccatactctaagccaaagttttctcttttcatttccagtaaacaagttactgtgatgcctcatgactgtcttttttagagtgtgttggtattgttttaaactattttttaatcttttgataccttaaatagggcagactgtcttagtacacaaaggcctatrgtttcaattagttgtacatggaactttttttktaccagtttttatttctaccttaatcttgcaacgtttatgycattaatcttctcaaatttagtatgtcctttgggaggctraggtgggcagatcacctgaggtcaggagttcaagaccagcctgggcaacatggtgaaaccccatctctaaaaaaatataaaaatcagccgggcattatggctggttcctgtaatcccagctactcgggaggctgaggcaggagaatcactggaacccagaaggcagaggttgcagtgagccaagatcatgccrttgcactmcagcctgggcaacaaagcaagattccatcttaaaaaaaaaatttttttttaaatatgtcctttatggaacactgtgccttttcgtgactgactgtctttaggcaacaaaagcaattgcttactcacttaatttccttttatccacctacttagctttgtgccccacctaaaaacatatgattctattggaaacgttggtacttttgttaatacatttataatgataactgttttctttgcagattatgaagagacagggtcaaagatcccagtactggtagtctgttctcaccagtgcatgtccttagctgagagatcctgtcctttgtggagcagctgaactcagctgtaagacacagacctgaagtctgtgttgaaattgtccttcagatttgcctaacatcctaactgcccaccagtaccaaccatttaaataktgctatagcaagaagtttaacgagagtctctggagccatctctctgagtttgaatcttgctttcactacttgcttgatggtgtgatctaaataccaaatagcataacctttytggctgcaatttcttcattcagaaaatgagggtagtattgtcaggagcaaataaggtaatctgtggacgttggtccattgtcagtggcctataaatgttacctgttaataaagaattggtgtgaagggttaaaaaccgtttactaggggaatgatcttggacaggttatttaaccctctgccctcacatgcctcatctataaaatgggggtaatatggaagtttatgrcctacagtgaatttgagaattatgtgagatgactctttgaaagcacttagcacaaatgtctggtaacagctagtactccatatcagcctgtcatattgttcttggctgttttcctcattctcaaaacagtttccttgacctcactcttggaggtgctgtatggggcctcagaaatatgttttatttctaatgaggttcttcactgcaaatctcccagcactagtctttttggtttagcatttcggaaacactgtcttcgtcatccatgaccattgtcagtgagctgccacatctcaccatgkaagtcctaaaatgaaactgtgtttcacttagaaatagaattctacctatttttctgaagaatacttttttttttttatkgtggcmactttgtttgctgtcaatrtaaatatatcgcttctgtaactctcacagttgcatgtgtttctcctccatcaatgatctgtttagcccctaaaattataataattcctgtggtctgtaaagattttcatcaaacattttatgtcgatcacaaatttagacacaatgaaaaacaagaaagccggccatttttacgttttcactgatttgctcttttttatatattctccttgtatacccstatttatttgatgcaattttatttgccaaatgcccccactgtcatgtgttggattacaaaggtgaagttctatgtcctacccttgaagmaccgtgttctaatattccccaagggaggtcccttgttacctactgttgggaaccctgcartgtgctggaaaacattactacattttcaagtgcaactgacatggatgcatttcagygagatccttgacagaatatctcttgatattctcagagttgacatggagaaatgaggattcataatagattgaaaaacccttccctgggaattctagataatgcactactgtaatgatggagagttctatctttagccctggccttttgagcatttttatcaaacagcttgacaaaggagatggatttattaaatttgtgaatgttgccaggaggcataggtcagaaattggatgacagtcaggatctccctagttcccaagaggtctgatgggtgaaatttaaatataatgcagtagagaagcaacaggtaatgcagtgtaatggaagagttgtataaacttgggtctaaatcacagcatcagcttaattgtttacttgtactaatgggtatattagcaacctacagggttctcatatgtggttaacataaaatasaatattgacttcctttttaataataaattgtctcatttttagtttcaaatgaagtatttgttttaatatggatctgatataacatcacatggaaaagactgtagggtctttttaaaaaatttttttttgagagggagtctcggtgtcttgcccaggctggcatccagtggcacgatctcggctcacagcaacctctgcctcccyggttcaagcaattttccttgcctcagyctcccgagtagctgggattacaggcgcccrccatcatgcctggctaatttttgtatttttatatagatagggtttcaacctgttggccagcctgtccttcaactgctgacctcaggtgttctgccatgccttggcctcccaaagtgctgcaattacaggtgtgagccaccgcgcccagcttataggggtctttttctcccacataattccataatgcattgtttctcaaccttgtttattattgcctatctccctaggagtcttttcagacattttctctttaatcaccccctagtccctgagattttaataccacagatagattgtatatctgattatgtgctctatgtatatttgtgccttaaatgtaaaaagagtacaatatttctgccctcccccaccccccacactccaagaacaaacttttacctcaccgggagcaagaccacccaactagaggcagtgtcacccctgttgagaatgcatgctatgatgtgataaaacctcaggggtttcagagttcattgagaatgtcctgagatccaggtctcatgagttctctaattgtgtgtctaattttttaacaygtttttggttaattatrgaagtattacatgtattttcaaaataagtatctccctggatcatgcatgtgttttgacttccagaagtcatcatcattaatggtttaggaagttgccttgtaatttttgtgtatataccgttactggttttgatttgtrtttattttttctttacatgatgtgatatatttctgtaataatagttctgcaactagctttttttttcacagaatggcattagatacttctacctccatttgaaatttatatggtttttwaaaaartttaacttttaaattggtaagatatttatatgattcagtgttcaaagagtataaaataataagtagtaaaaaattgctcctatttcctctccctgtgttaatgttatagtgtcttaaatatgtttacagagatactgtatgcatgtaaaaakgaatctgtgtggccacttattttctcatattagaaacacaaatggtgtaacataatgcatgttgggtttttcaattaaaaatgtaayttagaggtcttttaatttgagtttaaagaggtttactttttcccccaatgaattccagactatttcaggcttctgagtagctgggattgcaggcacctgccaccacactcaactaatttttgtatttttagtagagacgggrtttcgccttgctggccaggctgttctcaaactcctgacctcaagtgatctgcccgcctcagcctcccaaagtgctgggattacaagtgtaagccaccatgcctgactgacatttagagctgattgatttctagcatctctttgcgtactagagaacttttacttttgcagtatggattgcaaatgtgttttgctggtcatttgtcttttgatgttttttaccgtagttcctccaawgcagaacattaagtattctttattgtatttgaktttatcagtcttttttggcttctagttaatatgtrgaaatgctttccctactctaattcttcccacaactgcttcttatacttttatatatttattttaaacatttaaatcttggattcatttgaagtttgtcctagagtaaggtcgtctagttttggaccattgcatagtattatgtaataaaataagtttgtaataaaataagtggtggatatttgcattattgccaattctttcrtattataaacattgctgaaatttaatatgctttcttgtaaacatatgtattaagttgctggtacataaggtatgcagatgtacatattacctatgtgctgtatttctgccagggaagcaatattttgtgatttagagccaaggtcaacaaacagtttctgtaagggcagatgataaatattttagactttgctgtctcttttaaaactactcaaatctgatctttagacaatatatgaatgaacggatatgaccaagttccrataaaactgtttataaaaacaggttgtgggctggatttgattcacaggccatagtttgcaaatgcccgttttggagcatgktttagtcccgtagatstggaattgactgtttgatcttacacatactacacgagggcaagttttctagcttctgagcctcagtttcattatctgtaaaatggggaaggtagggcatatttgacacgagttgttgaaaggatcgaagaagataaaatgtagaaagttttcattacaatggatatagtgaatattctccaaatggatgatggattgttgatgttagtcatttgatagcagaagtaggacttggatgtttaaaaactcagctatcaagataattcagattttgatgcaatatggttgattattgatttttccttttggttcagagtccaatagtctttgcacagcaccgttactgataatatctttctttgcctgctcatcmcagatgttttgaactcatttaaaattttatgacacttttgaaatattatttgttttgataactgaatttttggtgaatgccttgtttgccttaccctagtcctatccctrttgaacagrtatgaaaatagacaagtctctgacatcrtgaggctcattttctcatgggccttgcactaggaagagaaattaacaaagctaacaaaatagagagtggctaaggttgctattttagatagttaggtcagaaggcctctctgattaggtgacttttatgactagtatttctgctaaaatccctctaatttttttcctaggtctcatttactggaagttacttacactatgaatttattgaaatagaagtgcaagttaaaatcaagtattcacagtgtgacagtgggacacagaattcatcatgttgttttggctttaccgcataaatatggtgctttatgtctagacatttccccagatagcatttaatagttaatatattttggagcaaacrttcctccttttatggttgtcacaggaagtgagttaatcatcctgtctgcaccctgtgaagtgtttcctagtcccacatcccatccacaccaggcccctgtgctgttgagtgagtgccttgtaaaactgcttttaatttctttttttttttcctctcagcctttatgtcagtgggtaggtatacagaccctcagccctcctaaacaccaaactcccaaattctgtctctgggaatttttcccttttcctacttgtgattgaaatttctcatgagcttgagcatctttttaaatattaaacaaaaccttgtggagcatgatactgagtaatggtgtgaaaaagcccttccatacaaagaaaggaaatcctggccgtgtttaaaccagaccttaactgccagttttgttttgctctctgggttgcatctctgacttttcagaatagtgcgtgctcacctcagcaagtctttcccacatgataacttgagcggtggcatgtctctgaggcagaaaacttcagcaagaggcagctgttcccgttaagtgcttcatggatttttatcccatgactgctgtgttaacagtaaaaatttacagcaatggacttcagagcttgtttcttctttttttgtctaaatgagatctttaaaaccttagccaagttcgtccttctcttatagggaaagaagataggaagaaagagggagaaggaggagggaatttagggttgttatttttatatattccatccagaatgcattcctgatttttgtctttataatttgacattttcgtcttagtgaaaacatcgaataatttaaatgttggtcttcttaaaccaccattttgattatatcctatatttattagttacaaatagcacaaagcctactcagatgggttaaaatacaaaggcagttaaaactgaaaagtctagagataaaatttaaattcagacatggtttgatcagatcttcctctctattttcctccctttctcttgttactgtctttttacttttcagctttggccttcagctgcttccctcctgattgcaggtcattctgctcccttccttcttcattcacattcaagggaggagggcctcttctcccctacaggctctgaacaaaattttgggccttgccttgtgaatagtaccaacctaaaccagtccctctgtattagtccgttctcatgctgctgtgaagaaatacttgagactgggtaatttataaagaaaagaggttcaattgactcatagttccacatggctggggaggcctcggggaacttacagtcatggcagaaggcacctcttcactgggtggcaggacagagattgagtgcccagcacagggggagaccccttataaaaccgtcagatctcgtgagaactcagtcagtatcactgcaacaggatgggggaaaccgcccatatgactcactttcctccacctagtcgcttccatgacacatggagattatgggaactacaatttaagatgacatttggatggggacatagccaaaccatatcaccctctgaactgagaaatcttccaggcgctaactggcgtaggcctgggttaacaccctttgctgattcaatctcttgtcaaggaggatgagattccactaattgccatatattagtcaagtgctgtttctgaagctgggtcagggtcatgccatttagatattagtatttggatgtgtgttcctagaggaaagtatggataatcatgtttagtgagtacttggtatgtgccaattactgttggacatgctgttggtgtaaatcatttattaaacccttatcacatccttgtggttacttttagtaaggtacttggtggggtttggaggtcagctggactatcaacaaatattttgtgtctatttgattcttccaggtattacaggacgtgctccgattgaatttagaactcttaggagctttagaggtgatctaatgtaaccctgtaatttacatgtaacaaaattgaattcttataaaacatcaccactgccatattcatgtccactctccagagatgaaactggaatggaaagagcaaatacgtgacatgactgtccccctagaaaggtattgctcattaatcttgtctttatgaataactagtcatacaatttgtgagttatttggagccaacatgcaaggtaaatcttacttgttagccttgaactagaactcaagttgccagtcaccttgcccagtgctctttgtactctgttgtatgacctttttaatccttggatgattgtttctattatgtctcgatggaaagtcaggattctaaaagaacatattagtcaaaatgttgactatttgggggtgtacctaactttaaggttgaaaacttcaggtctggaacgaactcatctccattttataaacacttaagatgtttggcattggctagtaagaattgtgataactttgttagtatctcagatacttgttgaagccagtttcctgttgtatctatgagaagcaggaataaagctggtacaactttaagtcagmctagttaggtttggggtgaataaatgatcccaattattggtagaaatttttaatgaatgtttggatgtggggtggattcaacttgaaagatataacttttaaatcccagatacacctaaacatgcataggtcaaagacttttaagtctttaaaggaccttcagaatcttgcagtgtgtggatggcatgcatattcatggtttgcactctaataatgtcatattatacacccatgcgggcatcactaatcagtcaactccttttgagcctttactcagcctagaggtctgtggctcagaactaaaaggtagccattattgccatctttactctttttaataccctccttttccagaacagtaaaacaggctccagagaagctttttaccatcaggattagagtctgggacctccagtttaggcattgstactgaatgaaattttacctgaaatagttttaacatccagtcctaaaatagacaccctgggaaattagacagataatggtattaaaaaatgaacaaagtagttagtttctatttctggtgttattgtctgatattacttctggtattatggttagttgttgatagttttctttaagcacaccattgatatgaaatggagtactgcagtttttacaccttaaatttaaaaccaaaaaatgtgtatttcattatttgcaaagtaactttatattttcttaactggtttaaaatttagaatatttctatcaacaaagttgagcagctttataactgaatatgaataaagtaaaaatagtggcaagcagtaatatgcatgccttttaagactttttccatttttcgtgtacacacaaacaataaatgcacaagaagtaattaagctattagtactggagaatgcaaaagaattgtaatcagaatcccataaagattttaattaaaacatggaataatttaaacctgtgtattcgatttcggataaaaagcattaattataataggtaaaaatgatacacatatttttggattgttgctattggttaaaagtagacaacaaaatgcagagtaataagcctggattcaggtaatatttgtaatataagtttattgagagaggcattaataagcatatttgactagaaacagcacataacatgtatattagttttgtttttaattagatttagacagaattcattatttttaatggcttttcattagtgaataggaaccattatttggatctattgtggtaaaataaattcaaggtacatgcttattttcagcaaagaacctcttaggtatttaaagaaaccactgtttggaacatgaatcatatataggtatgtgaaattccttgcttttagacaaaagtatgatttctatgctcatacaacttttatcttaggtcagttattaacagagaactatactgaagtgagacagtttgcttaaattgtagaaaattcttgttgttgaccagttttatttgtccttatttggacttttcaagtagtattgctggggctgatggtagggcaacattaaggtgtttctctcagatttttatatgatatttgtttgaatagaattaactagcattgatttaaaatttatatgtgtcgaccaagttctttgggctaactctgccttaaagaaactgagtatgaagtgaagtctcagattcaagcccagatttacagtatttgccattattttcatgtgaggaattctatctgccttaaacagaccagttggaattaatctccaattgtgtgatttattctccctactgtggaaatatgtcttcctgatgctagtctactgaattgtaacatctcaaaatgagaaaaatacagtgacttgtgaatggcacactaaggaggtagaagtggattattttaatgcagaaatgagctataggttaagctaatgatgtttttcttaatgacagctttaaaaactgaatttctccaactttatataaggtttttatataagcttaaataatatcacccatgaacttgattattttctttaccgtagtctcttgtttccttcgtcttttgtgtttgcagactccatttatccaaaaagaatatgacagtcatcccagtattacccataaatcagtgcccatctccctcatctatcatgccatagacacggcctaagtgcataccagtaaatccagtaaaacctggttagyaaaatttaacttatttaacacaacttatattttacttggcttctatgcagtttgctccataatttcttcatttcattgtcagagtagccacaaaagaatgaccttttgacaaggacctactaggaacccaacatgggtgtgtttactattaactgagcaccaaactttactcagagctcatgagtttttccattaatttttgtttttgattccaccattcaatctagagcaccacattctatttattgtctgtgtctccttaatcttctctgatctctgacagtgttttagtctttctcatgaccttgacacttttgaggagtgtttgtcaattatatagaatgtttgtcaattatatagaatgttccccaatttgggtttgtctgatgtattccccatgattataccagggttgtgaatttttggaaagaataccacggaggtgatttgcccttcttaccacttcctgtcagatgtccaagatagccatgtggtctcactggggatgttaaccttcatcatttgactaaggtgacttttgctaggcctctccactgggaacttactcactaaatctagccaaagatgggattaagttcttcttgccagaggggcgaactctacttttgactgttggcttctgcccaaatgggaaatgcctgagtaagatgaccacaggctagtaaacttctctgcactgcaggaagtgacttcactcaagtgtcaccrccaccataagttccctcctggggaggtggggcccctcctctccctttgcatgccatgaaatgcttgcacccacctgccttagccgttgggtgggctacatgtctgtttcatccattgcctagtcagtttcttgacagtctgctatacatttacaagccagtaacagaggcagtaattattgtgggcagcacttactgaacttttagtgtttgataatgctctaagcacatggattatctaatataatccttacagctaccctttggtatctgggtacctcattgtacagaggaggggctgtgagccacaggcagcttaaattgtccaagggaactggggcagccctgctccttatgtcccatttctcagccctgtctaggactgagcaagtgtcgattctgtatttaaattgataacagtgatggattgatcattaagactaaatttcttctttgattgaccttctttgattacagaggtctgttaaagcatagaaaaaataagagcagtttaaaaatgatgatgcttcgcagaaggcatcaaaagcaagagttctactgcaccctttctttaaaaagccatagtcacctttgctgggcttgttaaatttgcacatggattctttcatggacatctcatatttgcagcttattttaccttgtcacagttgaaacgaatttaatatattagtgaagaacgaaaaggagtatttactcctgaagttgacatcctggctctggagaccaagggagtgaggaatacttagcaagaagtcagtagatagatgggtaaactcaaactaaaataaatatgacaatgatcatattgaacaatcatatttaatacgacaatcatcatatttaatatgattgaatcatcatattaaagagtggaactctgycactctttaatgtcttctttcagttctctcttctttcaattcattcatttgtacctaaaaatatgttttaagggcttactgtatgtgagcccctgtgataggcattggaatgaagttgtacaagatacagaaggaaccagttctcagagtttaccaccagtggggaagacagacatttagatataaatggtaaattgtataatagtaataatggggtccaaaggaaaccaagaacccctgtgtatctctcacgaagggacgtttaccctgagatcaaacttttagccrggggtttcagatgtgtttattgaattcattaaaaaggatatatttgtcatcacatgttgaatgagaaacactattacattcccttagtacttagaggttggcagtatgtctcaatcaaaatctcatttctttaagactttcatcaggtgaacaggaaattacttttggcagcccaaattgccctgtgttttctaccccgcccttacctcttcccttttgagaacacggacttgtgtactagattgacrtgttggagttggtgagccactcagaaggatcttgctgccaaaatacagatgtcttgttacttctaagaaagagtcagtaagaggaaactaaagtgcaagtgacttcttattcttattttagatgggtaatatcatgtctgagagaggaaggcttcttgttaagtgttcatctcttcccaactaggtttaagttaaccatagtctttatttagtatctttttttttcttttacttaaaagtattyattcaaatttgtgaaaaacaaagcattcaatactatgagtcttgtggaactgcaaatgattaatggtataattctcagtcttttataaagtgtcttaacactgaagagatttatacagtgtggaatggcaatggtgcttcgatgtgagaatagataatcaatatctgcaagcttggaaaaagtgttctatttcctctgctaatgacataggggtttttgcaaggcaagggtgtctgaagcatgaagtactccaaagaagaattaatttgaaatctgaagtggaagatcagtttcaattaaaattgcacttgaatgtatattgggtggaagtgtgaaagcaagcatgtagttggcttaaagcttcagattgttaccagtgaataaatgaatcccactggtatgaacccagattatatttttatagagtgataaattgtattttacccatgtctggaaggttatgagaactaatatgaatggcaagtacttttctgacatygcagagtattttttaaattgttagtagtaggaggagaattatcaggtatctgtttttacaaatgatggcttgcatctattatttgagtcatatgtatttggatttattttactgtgtcccatatcatttttctctgttgagtgtaattttattgtactgtaagtttctagaaggcatgcatacatacacatatgatattatgatattaaaacatttagattccataatttggatttacaaactcaattgtggctaagtaaaattcctattttggtcagccatctaataaatcaacaatcactttatttggtttttcaatggattcttttggcatctggaagaaaatttaagctgtagacaggataattagagccattccttacgtctcgttcgtctccttttttttcttttttctccaaatatgtagatgcaagatgaaaataaagtttggccaaaataaaatttggctaaatatatggcaaatgcatactatccctttgtgaatcatcacagtcatagggwatttgacaaagaggtaaaaaaatacatgagtgaaaagcctatgacagttgtaatcgtgcagtgaagaaaatggtgatgtgaactttttccggatagtagcgcgacacttataaatgacttaaaagtgccccaaggttgctagacctttgccagtcagtgaacatgttcatttggatagtctgtttttaatcttactctttgggatgaggattagggagaatgactgaagcattagagtgaggctgcggtattttccagatagcaaaaatatgcatcatttttaaggagctatatccattgctcttgcagccatgaaacctcccttaccataatggaaaatactttctgtgattgtcccatttttcttgtaccattgtttatatctactgtgagctgttaccagtttggggggaatggggaaagccatggcaaatgattgggtggcagccactcatgtggactcttatttagtggtaggcaggtttatctactactaaactaacaaggctagtagttagacttacctactaataaactaaacaagatttctttgtgtcttccattgtatgaggctaggtatacaggaggcacaaaaatccccacccatctaccagtatttctgtagatgaatgtatatacacacattaagctttctcattgggaagcctgtgttttacttgctaaaaattgtgaagtttttttcttatctaattctcaataaaggattcagtcttaatctttccagtaaaagttgtttcagcaggctactcccgctttgttgtgtcaacaaggttaaaagtaggatgcagaaaagtctaagagcctgtagtcaacgtaatagaaactgctcccataatatttcatttccaaataggacagggaggcaaatgcagtgtgttttctgtatttatacctgattggtacctattagaattatgctttatggttgtgctttcttcatttatttctgtggcatatgtccccccaaattctttatttatatgagtacagagtccagtctgaaggtaactttatacctgcattttctacgagagagaaggattgaaaaggagagatgagtgtcttaacactcaagtgtacaaatgagggccaaactgaaaaatctttcacaattagccraaggaaaaacctgcctttattgcctccatgatttgtaatgcctctcatctagttttctgttgcctttaattttttttccctttttcatgtttacagtcttttatgggctaagaagaaagttgtatttaggatattgcccacaatagcaaaacatgctaactcgatsaaggtgctttttttgtgaataaatgctctgcttattttaggaaacatttaaaaattgtcagaaatatggacaaccctaatagcccttctacacaactctcttaacctgattaaagataaagttagcaaatgtttgattgtaaatcaagaagcaaaactaacttaagtaacatcttttctgaaatcttcttgtcacatcaggccaatggctttgattcatagttttcagtacattcacctctttggattggggacatgttgagagatgcagtgctcagcttcctaagatttattcatttcatccctgacccttgaaccatgaggattgaagtgttgtcttctttcaacaggtgcctatggtcctgagcactgggtcacgtctagtgtcagctgtgggggccgtcaccagtctcctattgacattttagaccagyatgcgcgtgttggggaagaataccaggaactgcaactcgatggcttcgacaatgagtcttctaacaaaacctggatgaaaaacacagggaaaacaggtagacaatggcttctttatttgtccacagagcaacaggaactatttttggatgtctctggtgttttccttaaccatgacttgctccttaaatagtgcacattgctgtggggagcctaaatcagtccttagtttcaraacaagttatgtaactcagtaaatcactctgtggctaatcaccctgtgtcttcatttttttaaaaatataaactatagataataaagtattatacatctagacctagggtagtagtgattaaatgagttagtagatgtaaggtatgtagaaggactttcagaaagctacccaatctagtagccactagccacatgtgactatttccatttaagttttaattaaaaattaaataatattaaaatttggtccctcagttgtattaggtacatttcacgtgcttatctgccacatacggctagtgactaccctattgggcagcccagacagaggacattctctcattgcagaaagttctatcaggtaacattgtgccaaatatgcaaatggaaacagaattcttatctttcttgagattttgctttattaatattttttattacttccgagtacagatgaactgtctcatccctttgtgtatcagaccagcaattcaattcttccacttgtcattttgggatttgtgaatatgcagcatcgtctttttaccattgctaatgcgaagagctgcctccctctcaattactgttgtgcaaatatcagtttatagattgtccttgtaagtaccagagaatgccttgctgtgctccactgtacgatctgaaaataagctctgggatgttatattacatctctgcttagtgctacctggggttctgttgatgcctaaagatatttttcactcttattacttaactacttatractttggcccattaaagcaagtttttttttytctttctcttcttaaagtgaaccctttgtaaccaaggatgtcactgtgaaccactgttagtaatccctttcaggagccttggctgtcagagccctcatgctgggctaaaatgacttagctcctagccctttggtgctattcatgttgtaggtcacaaagttgcctttttttttttttttttaaataacctaactggctaaatgggcagctttagggatccattttctttctttctccaaaccatcatttgagattattcatagctgattgctttgagtttgcctggcatgttcatagaattgcttcccactcacttagcgcagtgattcctggctttgggccttttttataatgcccccagaaacaattctgcttcctgtgttatagcaggtgaccctctcctgtaccttgattcatctatatgagtagctgcgtagaaaaaactggtgatccaataatgttatttgtacgtaattttttaaatttttgagacggagtctcactctgttgcccgggctggagtgcagtggcatgatcatggttcactgcaacctccacctcctaggttcaagcgattctcctgcctcagcctcccaagtagctgggattacaggcatgtgccacmacccccagctagtttttgtgtttttagtagagacggaattttgccatgttggcctgactggtctcgaactcctgacctcaggtgatctcytcgcctcgacctcccaaagtgctgggattacaggcatgagccactgcacctggcctgtacgtaccttttcatcctcacctctctaccaccccagcacagattgtgtgcttattgttacaattcagaatttacctatcagttgccctactttatgttttaaatatggtgttcttaggataaccgcaatgagattatttctcttcataccatctaaatgtagtgggcgagagctttgccacactgggtgcaatcagattggaactgagtaccacctcagcaccacattctggaaggctgtcaaagacaatcactgggctctctgatacggttttctacttgacttgcaacgcttgacagccttcggcaaagataacacgtttcaktgacagctttcagcttcgtatcaccaatgacaggttttagacgtatgtagggttcactcgatgcaagctgattcatgaccttggtcttccagaagctgattatcaatctgtgtcactctcctggcttcctagagtgatccacaacctgttgcatatctctgagtgcatgcacttgattttagagcaaagctatccaaatacgaagccatcagtctcagaaatttcagaagcacagtgttctgagaagcagaaatagatctttgttactctcatacaacttattactgtaaaattcactacataatattagataggccaatatattgtaaatactctaagatgattctgtaggaagggtttttaaaaagtgacaaccagttatatgcaatttgaaacaaagaacrtgcatttttgcatttttttttttaatctcttgaaagagttttaacttatggtggtttagaaacttgggtgcagaaatcaacttgtattgttttgttttaacactaatagaaacttccttcatttggtaggtctttttttctgagacggtctcactctgttgcccgggctggagttcagttggcatgatctcagctcattgcaacctctgcctcccgggttcaagcagtttccgtgcctcatcggcctgagtaactgggattacagacagccacctccatgcccggctaattttttttttgagacggagtctcgctcttgtcacccaggccgcagtgcattggtgcaatctcggctcactgcaacctccgcctcccgggttgaagcaattctcccacctcagcaacccgagtagctgggaatacaggagtgcgcgccaccacccctggctaatttctgtatttttagtagagacrggatttcaccatgctggccagactgctctggaactcctgacttcaagtgatctgcccgtctcagcctcccaaagtgctgggattacaggcgtgagccaccgtgcccggccatgcccggctaatttttgtatttttagtagagacaaggttttgccacgttggccaggctggtcttgagctcctggcttcaagtgatctgcctgcctcagcctcccaaaatgctaggattacaggcatgagccaccatgcttggctattctgtggatcttaacacgccacattagttcataaattttttagaattttggagaaatgagtatttatttgctctgttttgtctggaacatataaattcaactgaacagtgcatattagtgcaggctaaattagggtggggttgataatttccacattgaataatattgataggtaacctatttcttttttttttttaagaaaccacctgtcactgtactatagttttttttgttgttgtttgtttggtttatttatttatttttttgagatggagttttgatcttgttgcccaggctggagtgcaatggtgtgatctcagctcaccgcaacctccgcctcccgkgtttaagcaattctcctgcctcagcctcctgagtagctgggattacaggcatgcgccaccacacccggctaattttttatatttttagtagagacggggttgctccatgttggtcaggctggtctcgaactcccaacctcaggtgatccgcccacttctgcctcccaaagtgctgggattacacgcatgagcctccgtgcccggcccactgtactagttttgaaagattgtacaattaagagaaatgggttaaagggctcatggtatctgtgcattatttcttacaactgcatgtgaatctgctattctgagaaaaattaaaagtttaatttaaaaaaattcatgtatcataagccacatggtctgtctttgtgccatccattttatatctatcttgcatacctaaaagtattttagagtattttgtggaactttatattccaggaaataaattcaagagggagtatttatttttttctgatggaaatttacaggtcacttatctgtaaaatagactctgtcttttgtatattaaaatatgaatatagaaagttaatatttaaagcggcctattacatacagacagtaactctcccataaaacagcttaaatgttcagatctgtcttaatcccctgagagtgctatatatcctatccagcataatcaatagagcaacttggttgtacctagcccacttctcgaaagttgtctaaaatatcttcacaagacagatagcatctctctatttcttcctgaggagccgtaactatctattgtgccagttcccatttgatttcatctaaagttatttccctttctttcatttttgtagaatgaaaaggtaatgcattcatcaagaacatttcaagacaatcttgctgttcctagcattagcttccagcaaaatgatcagaatttaatacttagacggtgcttctgatgtatgttaataagacgtggccttctatgaattttaactattgggagggtttttattttatttttattttatttttttaaactactttttcttatatcccacactgaggacaaatagtaaatgtgtttaccacaaggcatgctactttcatcttctcacattgtattggtttattatattttttctttgcctacattcttccctatttgtctgcatatgccatagtgcctgtgatacaggtggattcaaaatatggttattcaattcacacaagaatcaacgggagggaaactatgtatagatggggaagtcaagagtcattttctagtatgttactgagcccataaaagtaaggcaagtagtaggacactgttgcattgagtttactttacctggctcttagaagtttttagtagagtagcaacttaagagcacacagaggcaagctaaataatgaacaaactaattgcaagctggtaaaaagagaaaaataaaatcttaacaaccttggtcacttccacatgctatttccctgactgagcttgtgacccaagctaagtgttggaggaggatgtagctctgctgctctgctcagacacaggccaggggtaactacccctccccaaggtcaagcaagtatctggagttgaaagatactctttgccctgttgactgctgcctctctgcagccctgaagagccgcttgtctcttccaaggtcagtggagacaaggatgtgtgagccttactgagagtcagcaccaggctaccactttagatgggtaccttacaggttttttttttcttttttcttttttcttttctttctttcttttttttttttttttttttttgagacagagtcttgctatgttgcccaggctggaatgcaatgtcaccatcttggttcactgcaacctccgtctcctaggttcaagtgattcttatgtcccagcctcccaagtagctggaattacaggtgcatgccaccaagccaagttcatttttgtatttttagtagaaacagggtttctccatgttggccaggctggtctcaaactcccggcctcaagcaatctgccccacctcggccacccaaagtgctgggattacaggcatgagccactgcgcctggctcattacaaggttttcaatagcaatcttcatgatgtctgatttccctccaaaactgatggacttttgtgcctagccctcatgcaagatgtgatccaacagtggcatggttgctcaagtgtaacacggatgcctttagtaatcaagagattggttaggaagtttctaggaaaagtgtgtttgtgtgtgtgtgaggggggtgtgggtgtgtgggtatgggggtgtgtaggtattgtgtatgtgtgtgtcttcatatgtttctgatagtctaggctttccgcctgcctgcccgcccgccttccttccttccttccttccttccttccttccttccttccttccttccttccttccttccctccctctctccctccctccttctttttctttttctttttttgatggagtctcactctgtctccaagctggagtgcagtggtgcaatctctgctcactgcaacctctgmctattctttgtattctgttggactcgatatgtcttyctctacggatctctccacgagcctttacattttttgttgtttcattctctcccgcatttcctcctgtgtcttcttgcatttgcctccgctggggcatgtctctgtctctctgcctsattctgcctgttttcactccttgctcctagcattggcccccttctctcccttcttcctgtcttctttccttagagctggccatagaagagaactgaagtttaaaaaatgtttttatttgttgtatctgtggagtagattttgatattgacaataataacctaaatgtgttcttattgtaataaaacctctcttatccctgataatattggatggggagggcctggaaaagtgaaatacatgaatgattccccaaatgtatttctgggagggtttcaaactcacctggtaccaatcattacttttatttttaattataacgcttccagtagcctcctcaatgtaatgatccttaataggtgtaaatatgggatgatgatggtagaccrttgtggagtcatcattccttgatcaacagttgcttttttactctgagttttgtttatggcactgatgaayaggtcatttcacctacaaagagactgccaagcttctgattaagagcagaacatcagccaagtagacagacatttggraacatctgggcccttggcattgtttatattgggcgtgtctaatataaacagtgtctttgtagtaccctggggcatctctggttagcttaaggttgcccaaagaaagaaaatgtaagtttaatttttaaaatccattctttatttggggaatgctaagtgtgcttttgctctactttatacattttcctgtttcaaaggcccacattctttggttctttcattctaatactatccagctttgcctgaaccctggaattgagcttggagctatttcactgggtcactctttggctagrtactctgcaagctgtgtttcctgtctgctaagctccattttctttgttatccccacagcctcagtccccaagttcagtagtaggaactagtttctgtgtagacagaagcctcattaaccaattaccctgaatgttacaggccattttttgaagaaccttttctgttttagggtacagcgttctctgctagactcctccatctttcgtgtcttatatggttaaaagtgttaactaatccaccttgttcatctcactcagtttagcagtgagttaactgagacccaggataatcctgcagtttgtcatctcttggatatctgaggttgctcttactcagcacgtccagtgactctttactggattactgctatcagctcctcacttatttctactgacagcattgctttcctcccaggccttctccacagagtagccagagtaatctacttagttccctaatctgatcttgcctgtctgtctctccctctttgttgttctctctctcaagcatatcaaggacttcccatttctcttgggacaaacacagactgctcactgtccgtgcctcatgctctgtcctcgtgtcccatcctgctctctgggtacctgwcaccttggctttctcttactcgttaccactaccacagggccattgattctttcttgatgttctcccatcttgttggcacttccccggggtagctcctttaactctcagctcagaccatgacaccctccccttctctcatctggggttcgatgctcaggtgctaccccttgtcccactagcaggtttgcttctgttgtctgtttagttcttgggacctgtccttcccatcggctgtaagttccataagggcaagagttgtgtctgatttacccacctttttctgccagtcattactcagtaaatatttgttgagtgtttgaaaaacatgaatgtcaatgtctacagggaaattagtggaaggctggaactagagccagtgcattctgactttcagacaacagcgtttcccttttaccaggagtcccagggcaaccctctgatgtcacaartattgtggaaggtggtctggggatcccatcattagggtccaataatggtaggcttttttttctaccttatactcttggcaacggtgcatcagggtaggaggatatgatagtaagctgctagttttcctgtcatccatttttctttactttttagcacatgctgctgtttactcagattttggtgtgaacatttgctttagcctgtgttatacayacatgttgaatttaatttataaacagttgggggatgtcctgcaaagaatgctatgaatgccaggtacttggtcaacccttccagttcaggagaaaactaattccttatttaagatgtgacctgacccacgctttgccctggccctttgcatagcctggagcgtctttacatcatggggagccccagacatagggagaatctggtgaaatctgtggatcctwccctaggataataaccttcctaaaggttgcataacaccagtgctattctatgatgtgtatgaattgctgctgtgagcattcgtcgtatatcagcccttgtgaaccccttaacaaacctgtgaagtagctgctatcttattccaattttacagaataggaacgaaggcaccaagaagtgcattaactttctcgtaagtggacagtggcagaactaggattcaagtttggacttactggctacagagtccagctcctaagcttcacgtgtgccccatgctcagaaatttacttcttgtatcaagaaggtatagacctccagagcccataggtagccacggctatggactgttggcctctaggttaagaaaccctgaatttgaagcttccagcttcttctactgtctccatcattctgctttgatttcatcacaatctacattaatcacagcaaggatagttctagaaacttcattcaccacatagacctttcctgtctttgctcttagcccatctgtcctagttagttcaggctgctgtaacaaaataacataaactggtggcctaaacaataaacatttctcagagttctggaggctggaggtccaagattaaggcaccagcagattcagtatctggtgagggcctgctttctgattcatagatgataccttctcacattccatggtggaagggaaggcagctggctggaggcctctttttttctttttttttggatgatatctcattctgtcacctaggctggagtgcagtggcattatctcgatcaccgcagcctccgcctcctgggttcaagtgattttcctgcctcagcctgccaagtagctgggattacaggtgcccgccaccacacccggctagccttttgtactttyagtagagacgtgatttcaccatgttggccaggctggtctcaaactcctaacctcaggtgatccgcccccctcagcctcccaaagcgctggggttataagcacaagccaccgtgcctggcctggggatctcgttttgaagtgcactaatcccattcacgagggttccaccctcatggcctaatcacctcccaaaggccctgacgcatcataccattacatgggggattggggtttcaatttgtgagtttccagggacaaaaacattcagtctgtaacaccattcattgttctcctgtctttagctgttagcttggcaccttccagtttgtgccttatccagattcaacttttcctgctgttgttttaatttttagattaaattttatttgtatttattatttttgtagtaccgttttcttctaatttatttatttcattttgattaaatgaattgattttaaaagaaaactctttatcaacaccattattggaaaaaccagttctgtttgactggtagagacttactgctagaaatatgtccataatctacaaaaataaatcaatcttgctcatgttattaaattttagggttatgcttattcttgagtaaaagtgggaaatgaatgagtatcagggaactatgtgggttatattagcacccaactatgattttcttttctttgatataatcaaaaagatagaaataattcagaaaaggcagtatctttttttattctgttttagtgaactaaaagcatctactcaatacttaagatctcccccccaggcccgggctgggcacagtgactcacacctgtgtaatctcgrcactttgggaggccaaggtgggtgaatctcttgaggtcaggagttcgagaccagcctggctaacatggtgaaaccctgtctctactaaaaatacaaaaattatttgagcatggctactcaggacactgaggcaggagaatcacttgaacccaggaagctgaggttgcagtgggcggtgatcacatcattgcgctccagcctgggcaacagagcgagactctgtctccaaaaaaaaaaaaaaaaaaagtccttaccaatttgatagactccaaatggtatcttattgctgtttctgcctgtatattcttacccagggcagacttcggtgccagattacagagaacttagaatgtagaaagaacggtgcagacctaggcaacagaagggaggaagacatgtgggaaaagacatccagagagagaagcatccagagaaaaaggagaccagagtcacatcctttttggcatgcaaatgtttacatattgctttaggttttgaacattttcttgagaagccttctcacttgcctgctcttcagaaccgacagaggtagatgccatctcaaaaaaagtaaaataaaagatctcctcccaaatagtatttgagccaccccygctcttcctattgtccctgcctaatgacacttgttattgtgtgagaaagtgttgctttaaagtataactttctctgaaaacagagagttacacctgtgtggccagtcttccgtgctgtccaggagctccacccttgattctagaaatgagtttggaaataaccaccactgaatatgtgtttgctggcttcctggccctggatcatctgctttcccagtgtgatttttctccaggtgtcaaaatagcccagccaggtaggcactgcagtaattatcaccatttgaacagtgatagaaactgaggcacagagaagttgggtaaccttcctgaggttaccactgttaagtggcagaatggaattccaacatgtcttgagctcatatgcatgacatcttgtgctctgcagtgactgccttcggtatattctgtttcaaacagttcaatgttatcactggtcatcagaaaatgtgctagctggggaagttctctcattccagttttgtgtgtaaacaaaaatatgagacatttttggaaggggtgggtggacatgtaacatgctgtgtgctctggtgagaaacactgtaaaatgaaaaatgagattaatgtttcagattgtacagttccctaattatgcttttaattattcatataaaacaagtaaaatgacccctgacagagatataaatgatttaggtaaaatcaaatatttataagatgctgctgattccctgggtgtattgtaacagatgcaatcaaaacgttttgccttcgtcctgtggatgcaaaatgttatgtatggaacttataactggctgagaagaatcaacagtgtttgaaacactactgagctaatgcctagatgttttgacatcagaactaaaggtatgtggttggtataatataatattttagaagatattttattatatctgtatatatagatatattttatataagattttagatattatcttctaagatattatattttaagggtcacacaatgataagtttcccatttttacatttttaaatgatttgaaaaggaaaagtcggtaatatttcatgacacgttgaaaattttgtcaaatttaaatatcagtgtggttaaataaaggtttattggatcatagcctcacccattcatttaagtattatctgtggctgcttctgtgctataaagacaagattgagtagttacagtagagaccaattggcctgcaaagcctaaaatatttaccaactggccctttacaggaaaagtttacgacccctgttctaaaacatgcccaacacagagtgaaggtggcacagtgctgtagcatgtttaattggcacaagaaacacttacttttacttcattttatcctttaatttgctgttctactaattgagcattccttgtatattttttcagaagttggagaaaaactgccttttgaatgcaataaaaagggatttatatgagaaggttccttcacttgcttttaatgcttcctttatatagagaagtactgaaactaattgcagtattctagaaatgggtcattagcctagtccctatcttttatggagacctaattttcatgcaggatttctcgctaaagctctaactaggatctctttaggaagaggagacaatgaggataagtactttcccatggcttacacaagcttggcttttgatcacaaaccattcggtatattgtttggcaccttacatgtgtttagcagccaataagtatttattgaatgaatgaatgaatgaatccacttctagagaaacaaaaaaagggaatatatctcttgaatagaatttgttttttatgcatttagacattatattccttttggaaaaatattttttgtcagtgtaaatccaagttattctcaatttctccttcctgtatttcaagaaagagcagtatatttttgaaatttagggttggaatttagttgaggttccctatgttgcggatgctttcaggtattctttggatgggttaagggaaaatatttttttgcttgaaagtaaaagaaacagtcaagaaaacgagttagctgccagtatttgagtgacttcaagagtagatttttgcattacactttcctgggtactgttattaaatacagactcccaactgtcttcccacttactgttgccttgatattggaagcacccacaaatttttatttcctgatatcttgcctacattttctgaccaaagaaacatgcctattgcatctggctgatcatatatatttcctctcttgttccagaccttgaatcttggggtagccccatgaatcagtgcttaaaaagaaaaatcttgctctctagatgattttgaccatcaagcagttttaggagacactgattcagagcgactttttctgtcattgtttccatttttttttttaaatctgttaaatggataagtaattctgagatcattctctggaaagtatcatgatttagggccaactggtgctctgagagcattctgcagctagaatgaactaatttattcaggcgggtgtgttcaacrtattttttcataggtacatgaggacataattcatatcatggtaatggtgaactttattagaagtaacagaaaaactccatttggttttgaaactcactttgttttcctctcttctcmtttgtttcacacagtcgccatccttctgaaagacgactattttgtcagtggagctggtctacctggcagattcaaagctgagaaggtggaatttcactggggccacagcaatggctcagcgggctctgaacacagcatcaatggcaggaggtttcctgttgaggtgagagaaagtcaagatctcaacgtgtagctgtgcttcggtctttatgttaatcagatgctgtgcccttaccctcagtcattttgcaaatcacagctgtacagtacctaacttcctctctctggaaaccctttatccatagtatggcaggtgggtatccatccttgtttctcacctttgtttaactggagaaacacagaagccacaggcatcatggtttgagtagactcactactggttgatgatgttcatcatgtgtttcatttgacacagtttcttttcactgtctgttcccatttttgaaaggtgacattytgtacgaaactgggttgacttcattttcacccttaagaaaatagaaaagttggcaacatgaagaggagtctctctcagaaccttctcttggtagcaaagttttaagttttttttgctctcactggctgttgaaaaagaggctgtggtggtatgagtcactgttaattttgttaggattgatggtgacattttgcttctgctgtgtcagtcttctcagtgatccatcctgctggacagaagaagggtgtgggtgcactaggtcagatgctgctgtgtatctgcttagagccagggtgagggcgggagcatgtctccaactcctttattaatgttgagtagggacagcacatctcttccaatgccaaccttatatatttcctctaatcatgattgttgtgtgaatattcttttgttgtgatgaacatgtttgtttcttggtaggtcccccatgtggtaagycttagaagtgtgtggaagaacaaaatagatgtggttctgaaacctgcccaatagtcctatagacagttgctttggataaacatagaaattgacccttctgctcttaaaactccacacttatgttttatttgagttccttcctcaggaaaggaccttcaggcctctcaaaaaagtatcaaagggctgaagttcaccagaccattgcaccaaatacctccttgcccctccttrgttcttgttttcttacacattgttacatttcttccttgctatataaatctctagttttagtcagtcggggagctggatttgagactgagcttccatctcttctctcgactgcagcacccgattaaagccttccttggcgatgcttgtgatctcagtgattggctttctgtgcagcgagcagccggacctagaccgaacccctggtgtttcagtaacagttccagccgatggctgtattcaaacatggagtgacttttcactggtaacatatgttaatcaaaggagctgcatggccaagaaaggttttcaactgttagaatttcatagcttctacgtcttgtcctgctttgataatctgatgaattcttgagacccccttcacaaagaagacacatgcatctatctacacatagatttacatgtaactgatagggtttcgtcattctccctagctcctcaggcccatttttgaaccctctaagtatcctggaagctctgttgaagaatctctacacaatatgaaagtaatgtttatttttctatagatgcttatatggccatgtatatttgtttcttatccactgttcctggagaaaccagagataaytactctgagaaaatgcttcatgttttttcttgtttagctgacaaattctcagtatcagaattcttcctgcattaggactcctctatctgtgggacttcctatcctagtcacaataacgatatctttcatgagttgggtttctacttaattggttctcttccacccttaaaatggaatgaatcatttcttagaagtcttagctttatttccacttggaaaactttattcctagaagcaaaattacatcatgttcttaagtgtaggattttccttctggtcttgctgacaggttcccattggcaatatgagttgaaggggtagctttgtgtccagcaagccttgctytgaagcctctttgtcttagaattgggtttccgtttgttcatttaatgtcgttttggacaaaagacctgtcctgaaagtttaaaaacttaatcagatggctaccttggaaaagaagacctctagagctaggaactgggaaccttgcctctgtgtaattacatttcctcatgccaaaaatggccagtttcctctttacatttgattctgggaataacgtatcaaagacattaatatccyttttttttttttttttttttttttttgagatggagtctcactctgttgcccaggctggaatgtagtggcgcatgatatcagctcactgcaatctccgcctcctgggttcaagcaattctcctgccccagcttcccaggaagctgggattacaggtgtgtgccaccatgcctggctaatttttgtatttttagtagagacaaggttttaccatgttcgccaggctggtcttgaattcctgacttcaaatgatccacctttctcagcctcccaaagtgttgggattacaggcgtgagccaccgtacctggccagagattaatattcttttgaaacctatggcttttgatgaatatttcagttttacatttctcagagggagccattgaattcagaagctaattagaaatggcagccaccatgmccaggcttattgtttgaccaggttgtttggatgtttttcttttaagtaatgtcagatggtaaggctgcctatatcaattgggtttctcattgaggtccatctgattcatagcttgatttctaaaaatgtgataaccatattaatggtatatttggaggaacttgaatttcagagattaaataactgcattaaatttaactttaaaatatgcacaagaaagttgcttgcctttgcccaaagtgtgtctgtgatattttatgttaagttgctttatttgagctcttcattaatacccatctctccctacgatttttatactatttgagcatcttacgcttggtttatttcttttcatataactacattgttttccatataactacattgttttcattcttaaaaactagaatgaaagtaagaaaatwtaatttatcatggagcaatttatcagcattgggggcattaattatttgtcttgcatgcagtatgtatgagggctacagaagaatcattgttgaagattgtactaggattggtagagtacagctatggttctgagctggggtcagcatctcccccctgcaccctgggacattaggtaatgtctggagacatttcttgttattgccattgttagaagtgttatggtattactttctagttggtagaggccagggatactgctatacattccaatgtaaaggacagcccccactaaaaggaatcatccagccccaaaatgtcactagtgtcactgtggtgagattctggagtggagaaagcagtgtgtttagtggaattaagcatttctttatctaagtagcatcatttaaaatacatttgaataaagaggacttgtttcttgggaagtcattccatcctctttggtttttagagagtaaatgtaccttgccttatgtgtaacagcattgctgttcctggtttctttagtatctacttgagatgcagtcacgaccttgggaattttaacagctccctctgtgctgtggctctgcaggctgaattttaaacatgtgccccacaagaagctggatctgctccctgagggtaaatggcagcaaactcaactttgtaggttttgttgcttcccaggaattctttgaggtcatctgagacaactttgtaggcatccagaaattaaagctctctgaattttcctggctggaatcctagactccgtcttgtagttcctacacttaaaaacatctagtctaatagttaacaaagaaagcccttgtacaaacaaaacaacaaaacaagacgaaagctcttcaataaccagtgttctttacagctcagttaaagttagaaaagaaagttgaagtcagattacaatgccatgccttggagactgaactcaatttggatcctcagatgccctcacctcctgttactgagctttattccttgcctagcagcacatttttcttgagtatcttctgttgtacctgtgctggtacacaaagataagtcagaaagtcacagttcctgccttcaaggtatttacactccagtggtgacacagaaattaaacattggtcatgtaaatatatgtgcaatttcatttgtgttatagtctgaagtagagggacattttgataggggatggaagctttcaatggagacatggatacttattagacggaaaagatgagttggagcttcctagtagaataaggatatgcaaaagccctgaggcaggtggtgtttgttaagtttaaggaataragaggccagtagagattttggtaggcaagataatgtctcttcttccaaatgtctgctgtaaatacgttactttatgtggtacaacagactttgcagatgtgattaagtgtccttaaagtaaacaaactcagaatattccagtcattaaaacaggatgacctgtttcagttcttctgtggctactcagctttctgttgtctgtccagccacagttatctatgacagcttctatcgtatcctaaacttttttcctattccacactcattcctgttctgtggttggtaacttaaataaaggttcatataacactaatagaaattgaatcatgctgtatttccactaataaccaaagttrcagttaatgcaaagagaaacctccagataaaacctttgagaactccattaaagtggggggttcattgcatgcttgttgtttgaggtaattaaaatcttatttatgacaataaaagatcacgggagttgttgattcagacttactggtgctttatgagttgaagtcttcaataagcttaaatgatccaaattgattgtatgtgccccttctggtaaaagtcacagctggttcatttcagctctgttcagagcattttagtgaatgaatagaagcaaaggcatttttcctaatgtataccatgtacacgttaccatatggtacaggtctgcaatcccttatctgaaactcttgaggccagatgttttagaattcagaatctttcttagaaagttattatagcccagcggtccccaaccttttcgacaccagggactggttttgtggaagacagtttttccrtggactgggtggggtcgggggttcagaatgaaactgttccacctcagatcatcaggcattagttggattctcaaaaggagcatgcagcctagatccctcgcaygtgcagttcacaatagggtttgtgctcctatgagaatgtactgctgctgatttgacaggaggcagagctcaggtggtaatgctccttgcccaccactcacctcctgctgtgcggcccagatcctaacaggccatggactagtactggccctgttggagcccatgtgccatgtatatttcagaaggcaaccagtaaggtctggaactacacccttaaattcattaatattcctataacgagcaaatgaacagccatgctaagtggaaatatcagtactctacatagcttcacatttcttcatatctggttttaccaccaaattagtttttgtaccaaattcataaaaagaacaaaatacctttttgtcttgaaaaagtatccagggccattgtatgggtctcatgcctattgagtgacttcaatgtcttatgtctaaagagcactgctgggtagttacaaccatgacacaagcaggttaaatcatgtgtctccctgtggggtggatgtgtcccagtacttctctcttcctcctcctgtctttgtcttcatattgtgcagcattcttaggcaaagttcaggattgtccagccagaagtttctagttttaggctgaccttgttctgtgatcgattctcctttgaacattctgtttgggcctgcaattgtcttcaatatccatgtcttcaggtatgttaccttgacctcctactgcactcttctcctgtctgctcaaatcctgccttcctcctgagagccttcctaatgatttgccatcaattttatgaagtcgatcggggttcttccctggaatacgtctgtcacattttggttggagagttgtcttgtaatgacccctaggttatggctcaggtaagagaatgtgttccttgtctctggtaagcacgtccagttgtgtcacacacataaaggccttgcacagtgccaccctctccacactgatgcaggcactcaggttcctgccttacttagatgtggaccagcctgtctagggtttgaggcccacatggatcctgagcttcagcagcatgatatgttaaagcctagactacatgtcaggttgggtagcaccgcttaaataatccctccttcactgctggaataagtttatgtatacatatttgtatgtatgtatgaatgacaaggtcttactgtgtcacccagactggagagcagtggtgtgatcacagctcactgcagcctcaacttcctgggctcaaccggttctcttgcctcagcctcccgagtagctggggctacaaccacacaccaccgtgcccagctaatgttttttattttttgtagagacaaggtcttgctatgttgcccacgctggtcttgaactcctgatctcaagcagtcctccctcttcgccctcccaaagcctgggatttcaggtgtgagccaccatgcctggcctggaaataagtgtgatggatgaaatactttcttgaagatttatttgtacattggcatattaagggctttgaagagtcctccgctgaagaatctgtttacctttgtttaacacaatgttttcccaaacttacatggcctctgtccctctcttcttgtgtgtgtgtgtgtgtgtgtgtgtgtataagttcataatatcactgttttggaaatgtaagtttatacttttctcctctcaacctttagtccatattccttttaagaaatggggtcctgttcaaatacattgttgttttggtttcttttccttttctattttgtttttgagatgaagttttcctgtgttgcccaggctggtagtgctggctactcagcagcatctcatgagcccaggagttcaaggccagcctgggcaacataatgagagtctatctctaataaaataaaataaaataaaaaataaaactataaagacatcttggcttgttcaagaaacaattttttagcatctttatgaacttgatgctatcttgttttatcattagaactgtcatcagagggggtctgagatattttctattaaaaataacatttccagtataacagtttttcccccgtgttgtgtactttatgtcagttcctggaattattacaggtgatgcacgatttttgctcctttagctaagcaaggtccaggttcttgtctcatgaccaggaaaaattaggcacgtggacaccagagagtgagtgcagtagaatttattaagtgaaaggaaagccttcagcaaagagaaggatcctgaaaaaatggtttccggttgcccccttcccagttgaataccctggcttgtatctaaaaaactgatgaggctgggttccttatttgtatatggcgtgaattcctggtggctccaccccatccttccagtgcgcatgcaggcccttagactgagctgcttcatattgatttatttccctcccgtgcatgtgttaaggaattgaattgtccgccgctggcatatttaggcaagctccctgtgcaggttcccttatctgcacaaagtatctggtgtaaacacatggggcgggtcggaggttctacgggaacccttcccttactgtctgcctatagaaagctggttaactcctttcatagagtctctgaaaagtttcttttttcacagagtcctttgtcatgaagcttaagacaatgcctgttttctctgtgctgcctcttcatggagcgtggacgtgttagagagatcatcccatggttatctggtgtttgctattctgtggtgtagcctagtagtgacttccatcaaatgggaaaggaattggttgaaatttagttaatgactttattgaaataaagattccatttcagagcagaatgtttcatcctttgctagtgaaatgtttaatttccatctggctgatcttttatgtgtatgtcctgtgttaattaagaggaacatgtgaggatgccctagtacttagagaatactcagtggagaagttaatgcctggttgtgcaaagcaagcgtgcaagttttgtgaggtaaaacagctttggtccctggcttggtaaatctccatgatgtctggcagtcctcatcgcagtcatccttagacaagaacttggctcagggctgtttgatggtgtgtcagtgacacgtggtgtgctgatagctgtttgaatcataccaaaaactacagtaaagaagatggcacactctgaaaagaaaacctggttaagttggagatactctcagtgtagaaacttggtgaccgtggtggccctcacaaccatatagaaggcttagggtagtggcggttgtggttgaagtcactgatactggtgttggtagtggtaatagtgatgatattgtagatgcaatttaatagacacgacctatatcaggcactttctagatgtttcttcatgtcarccttgtgagagagggactcttcttatacccatcttaaagatggaaagactgagcttctgcaggcttggctgagacttcctgttagtactccagaatctgggctcgaatatctccaacaccttaaccataattggttttattaggtaagtaattctgctgtttttcttgtcattgttttaggttgttttcagaaccgctgatgcagtaggtagaagtcattttttcagaatcttaactgttgcttattgtaccagttgagtgttcctcatctgaaatgtctgggaccagaaatgtttaatttttaaattttttttatttgggaacatttacttrtatataatgaggtttcttggggataggattcaagtctaaacacagaattcatttatgtttcatatgccccttaaatacgtagcctgaaggtaattttttataagttttaaataattttatggatgaaacaaagttgtgagtgcattttcattgcaacccgtcacgtgaggtcaggtgtggaatttcccacttgtggcatcatatcagagctcaaaaagtgtcagattttcaagcattgaaaagattttggatttttaagatttgggatgctcaatctgtatygtaggaaagaaaaaaatgaaagggcttcaaatgttcagagatggctgaacctgtagtaaaatatacagagagatacgaagggaatagaaattagtcagcacttatgcctagagctatctgtgcaaaagggtatactttttatctggattgaccgcttcagtctatttttaatcactgagagcaatactatctggtaaaaatataatgtgaaccatacattgtcactttaaattttcagaagcctccttaaaagaggtaaaaaggaagatattattttattttattttaacaaatatttttatattatacaataatacaacttaaacaagaatatttactataaaagaaattcaatttcagttgaattaatctgtttccccaatacattccaaaatattgttttaacataaaatcaatataaaaaggtatcgctgagacatagtacattctatttttatactatgtccttgaagtctggtttgtattttacagttactaccatactaaaacttgcaaaactttttgattccagaccacaataatggaattttgataataaactacatgagagactaacaaattctttaggaggtgtttttatgttgaatttttggtaattttgacttcttctcttccaacggcggcaacaaaaaaggtgaaaggatagaaagtagcaggtatgtacagtgaacaaatctgaagaactaatgtacagcagagggactatagttaataaaaatgtattgtatgcartattcaggatttttgctaaatgtgtggattatctctgctcttgcagcagggcttgggtagctatgggaaatgatggatatattaatatgtttcactataatcatcattttactatctagattatgtacctcataatgttgtataccttaaaataaaatttgttttaaaaatacacatatagtagttcagttttatattggaatctgatttatttattgaaaaggcttcacttagatgctgtacaggtttttttttttcttcttctttataagctttaacttttttcctcttattcttttttgcaacatttgttcctggagctttgaacactattcttctcagaatccacttccaagctcgggaactcaaataaagctggctggggagacctttgtgcactgaaggtagagacttcaggccgccagatcagatgtattgtaagttcaggtcaagaggatttatgggcctgtgtatcagcaacaccaccaactgcctttttctcttgtcctgtcaaaatttgagcgggaaggtttcaagccatcttaaatctaaagcctttagcaagttctttagtgccaccgtcactcagaagggacagtcagaaagatttataaggaatagaagggagtcaagtttgaaagaaagtctatttcctctcttccctttaaatccctggcatagaatttcattgcaccccccctttaatggaatgggaagaaagtttcaaaagcttctcagtccggattgtttggcctggcgctgtattgagcacggatactgctctggatacgtttactgtgatggatggagaccagctgggcaaatttaccaaaaccctatcttatttaaaaatataaatttcatctcttgagtgttggaggatgtcttagcaagacagggtactttaaaactcaggttagtatgtggaagatatttaggttaatagtaaaataacttctaaatcccagctattaccacacagatagagcttcaactcctgaatctccctattaaaaccttcactctgttcatttctaaaattcagtatttcagggaattttctgagttcatgcctctgtgttcagcatgccctgattagggaagacttrgagtgagagaaacctcacgcactcccyttgctatttcttagcctgcctctgtgtttgcttctttgaatttgtctttgtctctgattgcctgtctctatctctttcatcatcattctttgtgtcatttattggaagggtataagtgggtactgaaatacytaagcatatatagtcagcacccatcgaaaaagatggccccagcatattttctggattcatcttattctatctaaattatctgcctaaaagttgacttaggaaatgctgcatgacatgtcttcctcttagagcttgataatgggctatcacagtcctgagacatattctagggctaacatagtcctgagacatattccagggctaacatagttctgtgacatatgccagtagggaaaccccaaatagttcagtggagagcttttctttcagccatgatgccatgataatacagtatgtagaatgtttaaattatttccttactggcttctctagagacatttctaaatgacgcacagtgtttattcatttggttcattaacagagccttctctgtggagggcagagtgtcctggcctcaagaggctttttcttcagcaggcactgaggccctgagacaggagcctgcctggcctgtttgaggcagaggcaggaacccggggctgctgaaacagcaggagaaaggagcagagtgataggaggtgcggtcagcagataggcagtgtgatggtgtgaggtcttggagaccatgggaagctctgtggcttttactgcaggcaagatgggaaattgttagaatgttttcagcagagaatgttctccatctcagtttcctaacttatattttttaacattttattttaaacaaaaaaaatttttttttacaacccaaggtcttgctgtgttgcccagtctggcctcgaactcctgggctaatgcaatcgttccaccccagcctcctgaacagctgggactacaggcacacaccatcacaccagtctatctagtttatgttttagaaggatccgtctggctgcacttgagagtggggaagacctgtgggtgctgagagccaggctaggagataattgtaacatttcaggagagaggatggttgggtgggccacagaggagtgttttgagaaaaacatctgattccaattgttttgaaggcagaagatgctcgtsgaggggatatcatgttgatgttatctcagggcatgcggtttatacttcttggtttaaaaaaagaacaatttgaggagagaaaatcatggacaacttaccagtcagtaagttttttaaaagtcttttaaagctttgactatccagtattcaaatcttgtgtaatacctattacagatcagttttcactgcataatatgttatatactaaagaatgtaacatagagaagtgatcattaagcacattattaatagtataaaccccctcctcatagagtaaatttgagttaatagacatagagtactttgagcaggatttggcattcttacagtttatttatattaactatatatatttttaagacctagtctcactctgttacccaggttggagtgcagtggcatgatcttggctcactgcaacctccgcctcccaggttcaagcaattctcctgcttctgcctcctgagtagctgggattacaggtgcttctactatgcccagcgaattttttgtatttttagtagagacggagtttcactatgttggccaggctggtctcgaactcctgacctcgtgattcgcctgcctcagcctcccaaagtgccgggattacaggtgtgagccaccgcgcccggcctgtattaactattaatatgaactcagtagtcttcttgtcacaagaagcaacagatccccaatccatctattttgtttcttttccactatttctaccctgattcaagccaacaccatttctgacttcagtcattgctatagattctaaaaaaggtctctcttgcccttcacaatccactctttatccagtaaccaaagctttcttttaaacacttggattgcattacatttttccctcacttaatattttccagtggtttccaatcacatgttgagtaggtccaaagatcttaccttggcctacaaggccctagttgacctggcttctactctccctcattcacccccacacttctctccaccctcttttcactggctttgttcttctccctgattatccctcactcctttcctaagccgtcttatcatttcatgctctctcctcttccaaagtaagtcactttcttttctattacccagttttattttcttcatagcattcatcacttttttgaagttatttacttattgatttctttacttatttattaactccctccccctccctcacccccgtatactgcatgtgagcttttagaggaggggatcagaggaggggatcggtctgtctgtctactgttgaatcttggctgctaatgaacatagtcccataacagcgtaagcagtgttacccattaggaaaccarcattcttgtattgtattcttatcttgtgggcctgctggtttaaagggtaagaaactctaattcctgagaatgaaaacttttaattcttcataaaaagaacgtttaagaaagcaaatcctaccccaaaagtatgtcttgtattaagaatgtgaaagagcccagtaaattagttactcccaaataaacacattcatcctcttgcctcatgctgtgaggctaagcgttaatcgtttagctcagaaaatgattttttttttttttgaggcggagtctcgctctttcgcccaggctggagtgcagtggcgctgtcttggctcactgcaagctccgcctcccgggttcacgccattctcctgcctcagcctcccgagtagctgggactacaggcgcccaccaycgcgcccggctaattttttgtattttttttttttttagtagagacggggtttcaccgtgttagccaggatggtctcgatctcctgacctcgtgatccgcccgcctcggcctcccaaagtgctgggattacaggcgtgagccaccgcgcccggctcagaaaatgatctttttaaggtctgttcttccagagtgtagctcttatattaacaaccattacatccacatatcaagacagattgtttcaattagtcaatgaggcccacgtttttgagagctgttaatatgtacatgagcaattactgtagcagagttaaaaggtgtgcctttgggaattttagattgagattatcagtttcattcatgagccaagacagaagccatgagaattgtatgctgcatttctctgcaggtttgttcgctagaagcctctccagtgcccacactccaaaggttatgaagttgccagattcctttccttggtccagtcctcataccatctcagaacagtgccttcctttgtattcattgagaaccaggcaatatgctgaacatttgggagtttcatagtgaacaagacaagcaagctccttgacctcatagaacctgagagaccaacagagtgaatcttaacccaaatgtacatcagaattaagtgggtacttttacatgttccaaagccaaatwtgagtaattttcgttcattccttattactggtaaatgaaaagaaaaataaaaaccttcagctgacagtctgcttttccacgttcagataaaaagccgtgcatctttaatgtggatatgatgcctctccattgtgctcaatctcaccgtttmccttctaaagtttactagaatcccacaatgtcagcaggaactggagtcaaataatagatgatttgtaggcttcaggggtgtcaccactctctttccagttggccaatcctctaaatgattcgaagtctccaagttagtctcaaaaatgcctgaaattccattatttgagttaaggtattactgcctcttcaaatggtagtctaaggaaagagcaaaatgtaagcacttgaactacattgaatacattaataaaactcatcaggtaatgccccagcagtagcattacaaagctcaaggcatcccttggaataggatgcataggaggtcaactctgataggacaaaatgtgggcaggtctacatgagccacatyccggggaagcaggaggacccacccacagttatggtrtggatcagtgtatgggttgggagaggaagcattaggtatagaaggcacrctggatttatgacagacagtaagtgagcctgccccagtgctagaggaaaygattggaatggayagtggtgtgcaaatagagtgcaagagtgggtcttgatgtttttgaagggatcctcttagaagaaggaatcaacttggtctttggggtcccagaatgaaaccaggacctgcagaagctgaccttactgaagaaactggttacagctggggcctcagcacccaggctaacagcaggagctaaccaggtrctcatctgtttcacataattcagggtagattttctaaaatcaaattcctgaggtycctctgcgacctcctgaatcagatgttgaacagtaagagatattccccatacttctatcaaaaacaattcctcaggccggatgtagtagctcacacttgtaatccagcactttgagaggccaaggtgggtggattgcttgagctcaggagtttgagaccaccctgggctacatggggaaaccccatctctaccaaaaatacaaaaacttagttgggcgtggtggcacgcatctgtggtcccagctacttgggaggctgagaagggaggattgcttgaactcagggggtggaggttgcagtgagctgagattgtgccactgtactccagcctgggtgacagagtgagaccccatctcaaaaaaaaaaaaaaaaaaaagtccttggaagaataagytcaggagatctgttgtataacagggtgattataatgaatgacaatgtatacttgaaaattgctaagagaataggttttaaaatattactgccacacacacacacaaatggtaagtacgggaggtgatggatgtgttaattagcttgattgagtcattccacaatatattttgaaacataatgttgtatgccatgaatgtgtacaatttttatttgccaacttaaaaaaattaaaaacaaaaactcttacaataataatgatagttaactttttgaaaactacttcctgtgtatacttagagtacttaacatgcattgtgccatttaatcatcacttattaaaaacatttttccacaaaaacctctatctctatttttcagataaaactgaaggaagagaggtcatccttatagaaatctcggtggagtctaacatcttcttgatagaaataattttaggagtatagtagtctgagtttaggtaccattttctgttgatcatagattctgttgatcatagagtgatctgttgtcattttgactcatttccttccagtacttggcagagggtagggggagatgaaaacatagtcaatatcaaaatgaatatgtttacagtctgctttatcactttgcatattgtgaatattttctgtattttctaatatctctcagttcttcaaaaatgaaatctaattttcctacttgtaccttgctgcattctacagatttttcacaattaacacactttactttaaattcaagaaaaaaaaccagaacaatgagtctcatttaatgtcatttctaagaccttatttttgtaagctagaacaagtatagaggcagaatataaaaataattttttctcaaaatgcaaattgtttatggtcttttgattatcaaagtaatacatgttcattacaaagtaattcacacaatatgtgagttaaagaaagcgtgtgtttctcttgcaaacaagtaacactcttttgaaatgccaatatgacttcataaacttatttccacttaatagataatgggagtcttttcattgtcagtaagtagctacttactgagtctgtgactcagagggcagcacccaggccagcagcaagtacttagcaggggcttatttctggttttgttgttgttgttgttgtttgtttgtgttttgaggcagggtcttgctctgtctcccaggctggaatacagtggcacatcacagctcactgcagcctcgaactcctgggctcaaggaatgtgtcaccatgcacaggttttttttgttttttttttttggatacagggtcttgctatattgcccaggttgatcttcagcccctgggctcaagcagtccttccaccttggtctcccaaagtgctgggattatatgtgtgagccacagcacctggcctcatctatgttttttaatgctgcatagctgaggcccttgagccagatccctggggttcatatttcattactgccactgtgtgagtacgactctggtcatctgttgaacttgttccctcatcagtaaaatgacttttaatacgaatacctgcgtgataagagtttttgtgggaattaaactgtaatacttagaaacgtatagtttagtgtcacatagtaggtgattgataaatttttgcttttttccatgatgtggatgcaatacattgttggacctttcggctctttctgttggtctgtcttataaacatcacagctacttagatcatatatctgggataaacttaggtttaataggagccaggtgtatatgacatgaagatgaaaggtaggagagatgtctaacatgctatttgactkgttgacatttgagaatataagccaacattagtcagaacatctgacattttcaaaagaagctaataacttgtttgaaaaagccaaaaatatatgtttatgtgtatagtataccctttttgttaaaatacaatacattgtctcggccttcatgatgtacttatgggctagaattagtgatcagtcagggttttaaatccagaatgtttcatctcaaagtggaagttctttgtgttacagtgygcttgtctacctttaccttcgtgaattgagaagtttgggttgctatgctaaaagttaattcatttgatattatgtgatgtagctttatatgtcagctctgaaactgtctataataatagtgactttctctcaccagaatgcaatatatgggttcctaatatggggctaatacatttcttgaaattatatgtaaaattttggccatataggtctttttccttttctttttttttttttttttttgcattccatgttttgtttagactttctattgttttctgatttcctttttcccttccccctcaaaaaagaaagtgtctggagagagaggaacagactttttttctgtagaactaatttgtcttttactttccaatgtagagaatacatatatatgtatacaatttacgttaaattttattcataacctcattactggtctcatgaatttctagaggtctgaaaactcacagccaaggctgctgtacgtgactattccgccagaatcctatgggcgggtaccattgctgtctcattaatttctgtaacctcagtgctgagtgtagtactatgtatgttataggtgacctatttacattttttgtgaaataaaagaatgaacccactattatttgtcttaactaatttcaacatgtgagaagtcttccagcttacgtttgtaagaactagatcataaaatgtctgatcttttagttaaatctagttttggtgctaggacttggcagaacaataccagtatctatgggcattttgttttgacataactgactggcagacataatgcttgtcaccttctcttggctcaggagagggtggaaagttcaacaggttttacccaacaggcatttttcaatttaagtagattacggtgtgaacgatgcaggtagagatcagaactggcagggaactgggatttgaatagggccttcaatttatttgacatatctaatgttcttatgaatggggatggaaccctggtttttggtgataggtagaaagattggctcccagattgatagcgtcttgggtggattagtaaatcgatttgttaagagctggaattatataccttttgggtctaaaatttacctcacaacagcttaagataacaaacctactgccccttgcatttcaaaggtattttgtatagaagctgtaagttgcttttctgtagaactactatttctacaaaaataaaagctattattttactaaataaaaattggtaattgatttcttagtgatatattgttcatctgaagccttttatttttcttgtctgttattttaaaatttgttcttcaattgtcttattgcgtgtttattaaaacaatataattaatacattcaaaacaaaattaagaaaatacatcaccaattaattaaatttgacctcaaaaggctgcagcttacctttacagctatatatattatgactaaattacttgttctaaataatgtaatgaaacagaaaaaaacaataatgctaacaatgcatattatcttatgagttaattatatttctgtgttatatttaaacacaaccttgaattaacctcagatataaatatattaatgaacagatattgtggttgtctcccacataatactaatgaaaacatcaggaaactagaacttttccttagccaaagatagaattaatcaaaaacagacttatgatgaaatttacctcaactcttcattagcagtgttactatgagtgtatatctctctgtgtatatttgcaaatttcagccaaagaccctgtttttttcactcctctttttaccttcttgctgggatttctccagtcatttttcttctaaagttgtaagtgctccatctggtttggagcctttcttattcctatgcactcctccaagtatatttttgagtatgcattactttcctctctagccatcatccttgtttactcctagacaaacaaacaaaaatctttttcgtgcacagttaccaaaaatggctaaatttagattcatccaacatctgcctttattacggatatggaaacctagggagactgttgagattccaaggctacctggcaaaaccaagtcttaaatgcgaagagattaaaacctacctactgttttgaggtgagcattaaagaaggtactagttgtggcagtgttttggaacatagtaaaccctcagtaaatatgaagtttttcagaaatgctcatgagaacatgagatgttgtgcagtaatccttcaataatggtgttattatccacattattgctggggaatacttgaatcctcaatgaaaagcttatcttaggatgtatcctaattgttttcttagacaagaagaggttcaaaaacaagaaagggggtctagctttctgtcattattggaaagacaagtgaaacaaggctgttgtaagagtgtctgtttagtgtagttttcttttttaaattttaaatatttttttgactgacaactatgtttatggtacactacatgatgttttgatatatgtgtacattatggaatatctaaatcaaggtaattaacatacattgccaactattttctagatgttcacttccaagtcctttttgtgttaattcagtgctttggtttaacccaacctggtaatagaaaggaataaatttctccatttatcaagatacttttacagaactcccatctccccacttgtccatgatataattattttggcaatagtgataatgaaaggtcactattttgtgagatttttgttraaaaggaatagagcatacactttttaatgccaggtaacttcaaaagaatatttgacactgctactgtgattaagtgattttaattttctactccatcacgcttaggtagcctgcacttcctgtatttaagcagaaatggaatggaagtaagtcaagtcagagttgatacgagtttcactagctatgggtaaagtttccagtttattcccttctctgtagaatatttttggccatttcttcatatgtcaccctttcttaccaagtgggtttttaaagaaagtaaacattattggatgcaggttttccttctgcaacccctaatgtgttatctgatagataaggatggtttaactaatgaatttacttaaatcagtagatctgataaatgctttagacttgacttcatagtgcttgggtttagggacataaatagggctgtgttttgtgaatttcgacatgcgattttccaattcatcagtatcagataatgggaaattatttaccacattttcagtaataatctgtctttcgaagcaggttgctgcctctgttgtgtcgacctaaccctagcaatttcttgtttgttggcataaaagttattttccaggagtatgaaagtcatgcttgtgaccccagttagaagggagagctttatataataggctgggagctggtccagttttcgtatgtgggcagtgaagtcagagttagacactgcaacagggagtgggatgaaacactaaaaatttttaatatgtggtgtcttagctgtcactacccacctcagtgcttaagaaatgaactaattgttaaaattataggtctgaatgcatgtatatatatagcaacacatatttttgatgcagatgtgttaatgttactatggggaattttgctttacattttgctttggtgttcgagaaaccttggcaaaaggactgggaaggactctgagagagcttagtgtttgtgttcctttatctccaattatttgtttggaattttcaattaaatataatgggaaaaccatttttttcttcagtttttttgatgactacttttcttattttacagtaaccaaattttcatctrtttttttaaattgcttgattaggatctcaaaggkttctaaggttttgttttgttgacagccgtaaaatgtaaccattatggagtaatttttttcccttttaagtcttttcatgtgacctcaatttttcaaatgttttttccctcaggtatctacctgtccttaaaaattgccaagcttcagaacaattcttttatgaactaatgtaaaaattgtaaatgttttcacataaaggcacaatraaaaattatctagtttgaaaaaattgtttaagtaggctctgtatagtcttcagtgatgacctaactaatttttactagagttagaagagaaaatctctagcagtggcttccttacgaattggcttttagaaggcaaaaccatttttatattctttcccatattttactgatacatttctaatcacaagtttttgaaaaggttaatggaaattgcaatgctttattgtcatgatgcttaartgatttctttttcaataaagggtatgttattaaagagaaaaatgattttgcgacctaggcwttaaagtatgcagtgccatctgtcttaagcctgggtaatcaatggtgtaagtgaggccagtttatttctcatagatttactagcatcactgcataaatagccataatggaattgatttcttaggctgaagcagcttttatcacatacaagggtttgatgatgactgtattaaatgttgacctttgattagccttagtctttcttggttacagaggtcttagaaacttcatgctgaaagattgaaaatgcaatgttcttgacattcaagtgttttttatattaactacttgttcttattttttacttcctagacaagctcttatgttccatgtgtcttgattgttctgtatctcagtaaagttttatggctaccatgggcacctcccttctgatcacccaagaggcacaaagaataacacagtgagttagagcatgagatttgaacccagacacgtgtgcccaggtttgaatgctgggccctgtactgctgcctgcatgacctagacatgtaactttacttatgcaagcctcagttttctcaccttaaaagcatgtattagaggccaggcacggtggctcacgcctgtaattccaggactttgggaggccaaggtcggtggatcataagatcaggagatcaagaccatcctggctaacacggtgaaaccccgtccctactaaaaatacagaaaattagccaggcgtggtggcacgtgcctgtagtcccagctactcaggagtctgaggcaggagaatcgcttgaacccgggagatggaggttgcagtaagccgagattgcactgctgcactccagcctgggaaaccgagtgagaattaaaaaaaaaaaaaaagatataagaaaattctgcttagattgttgtgtaaaacaaaacaaattgtgtattgattgtacctggcaagatgccagacatatgggcaaatgaataggagcaattattattgtctgctcttcctattgttgttactactactgagtcaaatcatttagagtcagtatagatattctctgtttaaattctctccccgtgccctgttttcttttttttaagcatagatcccmmttctccatggcyagttagtagaacaaactggggatgacgcttgttacattaatctaaaatggtttttctgcaaatgatttaaaaatcactaactgatagtgtggagaagacctaacttccaggctgatctagctctgaggaacattatgagggcaagaaagtctttgtcccacccaatgccgtgtctccagagtggtgtcccttaaactgacctccagtccctatactttattctgatcctggtcatagaaggtgactggcggcctcatttctattgcattcctcctgccaccccaccatcccytgaaaaatgcagtgggctgygtcagcataaatcagctcctcacataccccattcagcagccagtgtcttcagtgtttgagatcctggctgaaagcaagtgtctgcttaaaaataatttgtcgcttacctgaaaaagcctctacaccctgcaaaatctaatttttccaaatattttcgagtgccaactcatattttaagccaagcagctgacagacatttacctgtaggctagcttaatcagattttaacctagtcagaagcctagccaatgaaataaacttcctttgtgggcacagattttttaaatccatcaaaaaacgtgccccagagccagtgtgatttttttaaaaaaaggatttgctaaatgatcacccaggaaatgtgtgtgttcgtctataggacaaggccggggattaggaagagaggcactttttttgtgtttcagtaagtaattttccttgttataataaaaaatcacatcacttgttggaaatctggttggtgcccaactgctccgggcaagtgtttgcaactcgtgattatttattccycagatctttttagatgtgttatgtgtgaatcagcccagcctgcatttaaggcttgaaaaatgttctttaggattccttggtatcaaagcatccattaattactgaaaggataagacagtggtttactggaagtcagaatctgcatgttctttgttctaaagaggagaaaagaagttttcggtagaaaggagagccacttttaaagatgcccttttaatatatttttgaaaggtatgcatttttttgtcataaagagctcttcaaaatgatctttttgtggtgacatctacattactctggaaaatattcttatgtttctggcaatgatacgctaattacagcctatacatttttaagagttgaatctgtcatattctaggagaggagtgattctgattccaaacaaaactgaaatgcatgaccaaacacattatgaaatgtgtggtttcattaaatcctgttgttcattcagtcagaagaaaattgtttagttcataagaggaataagaatgctgaggtattacgatttcatttccgtatatccacaaacctttccattcatatttaagccttgccaccgtattatgttatgttgcatgttggccatcaaggaggtcgggtcacaatttggaagaacattgttttataccaaggctttrttagcattcctgggttgcacataacagaaacacactcaagtcagcctaaacataaaaagattgtttatttttaaaatataggagtgtctaatgaaactcagtggtacaaatgtggctagacggggctagaaaggagacagaagtcttttattgtatctttagcttttgtttgtgtcttggacatttcctccttctgctgtagacagcttctcttagttggtgtcatatagtctggttcctaatgcttttttgagtttgtagattatgagttgatactcactgagagtcctttggcctaatgccaaagacccaggaacgacaacctcattggtccatcttgggtcaggtggtcattacttggtccagtccaattggctatggccatggaatgcacaacatacatggcagacatgggcctatacctgtgatcctgtttccggaaaatggggcacttagcagactccctagygtgtgtgagtgtcttctctcacacacactaagaatgtgtgtattctgacttgtgaagggccagatgcatctaggatagcctcaaatctcaaggtcttgcaagaattctatgtgtatcttctggacacagttcagtatctgaatcaaggaggactaacacaggtccgagttagagtccatttggagacactgcttacttcattctcacaagtacatttctcactgtcacaagcttcaaatgtgcgtcccagaaaggaagagaaagctgtctattatttaaagatgggctcattatcaaaaggtgaccagaggtatctgcttacaattcacattcctagygcacccttaaaaacgctaaaacactagatattatttatgaasaagtcaaaatatcagcatgtcctctgaaaggatgcttgggttatttatttattaatttatccatcttcattggaaaacttaccatctggatgctgtccacattttaaaaacacataaattaaaacccaaggsaaattgactacaacatgggtgaccttcaaacctcttttattccagccagtcatttcccattctgattgtgccaaaaggaggcaggatgaagggaaaacattcacacacattaacagaactgcatcttttcttcagtaaaatcaggtcttcctccataagaccttgcatttattttaaactttatattataagtaatgataaaatgtgaattatgaataatatgcaagagtaatattcctaaaataacacagtgcatttcatattgccggccaccttccacctgtcacaagacattgtccaatctgattttctaactcgcattttctgactctggttgaatgactttatacattgctttcatgattatctttacattctgttaaaggacaggggtttgatgaataaatatattgtttgcaatttgcctctatcatttgtgtatcctgaattactcaagttttaaattgcatgaggcttttagtgaaatcatgtatatccaaacacaggtttaactttatgcagataggtgttttacatatacacacagttctaaaatgatgggaaaattttccctgtgtttttttttttttttaacttaagtcagttcctgcgttttttgaactaaggcaatgttgacacattactccccctctcacccaaagcttaattagtttttcaaactgatatttatcgagcttcctaaaatccacctgccagattcctcatgaaaacagtctaattgaaatattgctttaaggaacttttagaggtagggaggaagaaaaatatgtacataagactaattagtattttttaatgaatgctacatttgcataaattgaaagtttcattctatggacttattgtagagttgtggttaaatcggcattagtcagcttgggcatgtttcatgattattggtaaagggaattacacttttactggagatgtcatcattgatcaatcagttgaccagcaagtgagcactggaggaggcatgaatcttggggtggtgggagagtcatcaatcacaaaacccagtttgggaggtgagatgcactcatggacagttaatgaacagcaaacagtatgaaatgagaaatgctgaattgcagacaagtctgaggatatgtgagtctctataatggaattaattgttcaaaaaactgaacaaaacaaggaattgtcattgaattcatttgggatgaaggctgatttgcctctggaatggggcaggaacttagactgaccccccactgcctgggtaaatctaaagcagatgctttagatttagtcaatatggatttgaataaaaatatccaagacacaatttgttggtgtaaaccaattgcactattgtaagaaattctgaaatttccactggctaaacgggcaactctaatagaacctttatggctgggaaaaggtgaaacaactggattttattgaaatgatttcagttttttaacaaaagtattgaaggaaggatgaacaaatacgtaatcaacaaataggtgtttaggagtaactgtataccagcttatgtgtcaggtgaataagatagaactcatattctaattacaattgtaatacaacaggtgacctgaaggctacataggaagaaaataagatgagtggcttacctagcctagaagcaatgggtttacttccaaagaagagtggtatattctctgaaacggaaagaatatagaggagttggataggagaacgtgggggaaatgtgtgtccagggaaaactgcagcaagccccagtgtttaggaagagagtggcacatttgcagaagtctcggatggctatggacagaatgaaaataagattaccatgatatggagaggtagacaggggatatgacagtaatgagtttggattttattttaagggagatgagaatccttcgaagcgttctgaagaaggaagtagcgcagtgagctacctgatcctggtagatgaccgggaatggggaatggatggtgggatggaatgacctgcagtgtaaaattaccttgggaggctcttaaagtaatacagctaagtgatggtggttactaatctagatctgattggaggcaggggctggsttaagaagtggactgatttaagggatgtttggcaaatgaggttgacaattcttggtgttagttatggagagaagatagagacattatttcaggggttttggtttgtgcaactaggtccaaaggcagtgctccattgagacagtgagctctgtggaagtggcgggtgtaggaggaagaggatgaattctgttttagatawatgtagatatatccagttggaaatgtctaagaaaccagttggttagatgggtctgccactcaggacacaagtcagaactggaaataaagatttgagaggcattaatatgcacatggaaattaatgccttagggctaatgagaattcctgggacagatggattgagtgtgtactggttcccctgagctgtgagttataccagccttcaatagacatcttggggaaggtagatgggcctgcagagaacacagagttggactagccagagaagtacaaggaaaacccatgttcacaggagccagtgggcacatttgctttgagaaatataggattagtcaaaagtgccacctattccctgaaagtcatgtggggacagggactgaaatggaattcagctacaagaaagctctttagtgacctttccccaagcaattgctttagatttagtcaatatgkatttgagtaaaaatatccaacacaccatttgctgagcaaattgaataccgaatatactattgtaggaaattctggagtttccagtggctaaactggcaactcagtagagcctttgtggctaggaagagacaaaacaactggattttgttgaagagcattcccatttttttttttagaaaagtattgaaggagagagggaagcaacaaatctgatttagtgaagacgttttccttgacagcaggatttactcctgagttataaatttgccatgatcgagactaaaatgcagtgaaagttaaatttcacctatatctcattcaacgcctaacgtgatttaaatgacaggatttcaggagtgacatgtagctttggatctaaatatattttttatggctggaaattttaatttcagatcagtgaaaaatcatgacgcctcttcatgtgtaagagacttaaagagtggagtgttaggccggtgcagatggttttgtcaggcagaactattaatgctaaggggaatcagatggcagaatttgcacaggcttatctataaatgcgcacctgcaagataacattgaaatggttgaatgaccgacctagttctaagatagtgacatgatgagttcatcttgttttaatctcacattggatgttcaatttgcctgtgacatgctggtatagatgccctataaaagtattatatgtgtgtgacccggctcctgcctcccagcccagttacatctggaaatactctttccccttttctctctgctccagctttaatgaccttctttaaaaggccttgcctcttcccacctcaggacctatgaacctactttcctgctttgtcctacttctgagaagagtctttccagactcttcttattaaagcttcagttcaaatgtcactttcagaggaaggcttctctctcttccttgctgagatttggtatccctggtatctactctcaactgctccctatacatttttttttttttttttttgagacagggtctcactctgttgmccaggctagagtgcagtagtgccatcatggctcactgcaacctcaacctcccgggcccaagtgattctcccacctaagcctcrcaagtagctaggaccacaggtgcacacataccatgcctatcttcccccccccaccccccaccagagatagggcctccctgtgttccacgctggtcttgaattcctaggctcaagcaatcctcctgccttggcctcccaaaatgttgtgatgacaggcatgagccaccacgcctggcttccctgtacttttttggagtggatgcaaattacagagggagagagtttagtaacaactaccwtgactactcttttgaggtttccagcaaccctcattgttgactgatgattcttcttttttgagacggagtctcactctgtcctccgggctggagtgcagtggtgtgacctcagctcactgcaacctctgcctcccaggttcaagcgattctcttgtctcagcctgggactgagctgggactacaggcgcccgctaatgcccagctaatttttgtatttttggtagagacgggatttcaccgtgttggccaggctggtcttgaacacctgacctcagataatcctcctgcctcggccttccaaattgctgggattacaggcatgagccactgagcccggccagctgatgatccttatggagaaaatgataatacaagctaatacaggggattggttctgcaacccccgcatataccaaaatgctcacatactcaagttcaaagtcagccctgtggaacccaagtatacaaagagtcagtccttcatatacatgggttttgcatcctgagaatactttattttcaatctgcatttgtttggaaaaagcaaaccctagcagttcaaactcatgttattaaagggtcaactgtattttaattctcactggaaacctgcggtgttggtattattttcatacacatcatgtcaggaaactgaagtacaaagaggtgaggctaccagccttgggtcactcagctagtaagtccagtgagtggtgttgatgcagttcagaacttgcgtgaggtctgattgtgcggtctcttggaaaggcagcaagctgctcagagccatgtgtgagtctgttggtagaatgtctttcaaactcttctctcttgtagtcttcctagttcgtcagttacacttagaggtagatatccattaaaattcttaccagstggtatacatttctctgttctgatggaaacttgtatagtcaggtgataaaggcattacaacggtaccaagtcagcatcgctccactcaaaagaaattttttaaatgtccgtgctggcagcggacaaggatgaatgattaaaaaataaataaaatcaaagccatggctttgatgagttttctgtatctttctccacagtatacttggccacccccgcagccagctgctggaggtgctggttcaataaatgtaatgggagcaatctcactctattacttttaaattaacttagtctatgtggccatccctgtccgtggctccttcttggggaggaggactgcaccgtattgattcaggtgatggatgggaatattaaacgttccaaggcgggacaggagtcctacagtggggactccaccaagacagacctccaggcctctgagcaagttagctctgctagatcagggaatggcaaaaccctccagtaaatttaaagttaaaatctgaacaccgagtctctgtttggggcttgaaaatggcactgttttcagactctgaatttggagaccattttctcttccccaagtaaaagccagagctagaagaaagtaacatgaattcatggtcatcaggcagggctgatatttcaaaaacctcagcatcacctggaaatgggaatagcactgtcaaatgtaaaagccaatcagaaaggttgcagttcaactttcttgccctgaaaaatgaatggggtgggttggggtgagaaggtgtgaataatcttccgggacatttcagagtagttctaacaataatgcattaaagtgtcagtagatgaaatgattaattgaatttgccttcatttttctcatttatttgcttttggtcctgtcttcactatctcctatttaagaaatacaagtattcctgttcagctcagtccctagccctgtctctgaagtcctttattattgcaaagtgacatatgtgaaaccttgccactgacattcwtagacttataatcctactccttcaattgctttattaatgctttggctttcagcataaaagcaagcacattggaaaccacggaaaatttctgattatgacagtgacatttatcattctctaatggaggagctgtagcttctaggtggaaagttggcgagtgcatccaatgcacaatttccttgttttaaatgcagtctttgttgagaggagctgttctcccagatgctggataatacctaagccttacatggttgtaggcctatgtccagcaattggtgggagcactgttaatttttaactgtaggttttatgggtgaagaattgatgtcscattaattcagggatgtattcaacatattaccaagtgctttctatgtgccagacagtgctctgtgcatttggaatgtgtcagtgaccaaaaaaaaaaaaaaaatcctgccacygtggagcttctattctagcaaggggtagacagatacaaaaacatcataaataattgcatatgttagaaggtgagaagtactttggaaaaatacagcataggttaagggaaataagctgagccagagttttgttgggggttgtgggttacagcttaataggccttaataggccttgaaggaggtgactctggtttggaatatctcagaactgcataaggaattccagatgatgtgataaaaaagaaatccatattgaagaatatgaagtcctgggttattgcaaactgaaaatgcattcctctttttcttcccagcttctgaatcctcttttcttctgtccaagtcctggcattatttgggagcagtggccacctctcctgccactccacactgtaatgagaattggatgagagagtgcagaatgtgacatttgtgtgtgatgcttatggtttgtcatgaaatccactcaagagttaaacaagtcaagggtgttagctttaggcatgcttttgcctcacatttattggtgtttagtatgattcactgacctgaatcagttctaatggtacacttagatatgcaacttcttgggaaggaaaaagacaaaaatgtccctagtgcaattttattgagattttggtccaaaaggaagcagtgtaaataaacagcaaaaaaagccatagctaaggtaatgtgcttcaaaacaagctagaagacaaatgctaggtaattcgtaccatcctctgattaaatggccatgagcaaatcatcgggccctccagggcacactccattcctctttgttgtggctgtgggatgacacatctgtgcacagctctgcactcagaaaactcaggctcgtttgccaccacttccctacctccctcagtgctgcacgtgcgcgcgcgcacgcacacacacacacacacacacacacacagtgttccctgatgtacaaaagccactaatagtaattatttaatgataataatctttgcttgcattatctaatctcccaatggctttatcagagaagtactcattttatccctagtttacagatttggaacctggagctaggagtggttaacttactgatgcccagcacacacagctagttcagtgatagggttagggtggctggccccataggtcatataaggatacatttgctcatatggaaacaagttatttttattgacatggtgccagatcaccaggttggtggaacttgtctcttgatgtcatacttcctgattgtctcaattgatgtctccaatcctcatttcttacctttaatctacctctccctgcccctgtgttctttgcattataggatgtttagcagcatcccggacctctagccaacagatgccagtagcaggtagcagccccctataagttgtgacaattggaatatctgcaggcattagcaaatatcccttgggggggcaaaatcgtctccatttgagaacttctggtccagatgttcaggttacatggacctactcttgtgtgccaaaatccaactcttcatcaatagtcaaatttcaaatccatctaggaactgtttggctgtggctgagtgtattaatctgctcctactgccatgacaacatactgtagactagatggcttaaataagaaattaatttctcagttctgaggtgagggctggaaaggcccaggtcaaaatgcaggcaaggtttcattaggtctcgcctcttatttgtgcattcctggggagacagcaagttctttgctgtctcttcttataaaggtgctaatcccatcatgagggccccactgtcatgacctcatctaaccctaattacttcccaaaggtctcatcttcaaatatcatcacactgagaagtagggcttcaatctacgaatttcaggggagtaggggtgggcaaacatttagtccttaacactgagccttgatatgttggaaggacatccagaaggagtgtcaagtcaaataggccagagctggttcatgtcccagctctattatttggacaagttacttaacctttctttgcctattttctgacctactaaatagggataaaactagtttggtctagggttttggaaattaaatgaaatgattgatcccaagatgtgtaatttttatcaggaaactaatttttgttctttttgtttgcacaatctctccctaagttggtaatgcaggcccaccttcaaagttggaaaatcatagtaaaatgagagtttgtagctcctggtgtggtctttgcagagcattcgattaagcatatcattgcttatctaatgaatagttatgcttttttctttatttttatttttatttttttggagacagggtcttgctctgtcacccaggttggagtgcagtggtgtaatcttggctcactgccgcctcaacctcccaggctcaagctatcctcccacctcagactctccagtagctggggccataggcccatgccaccacactcagctaatttttatatttttgtagagagagggttttggcatgttgcctaggctggtcttgactcctgggctgaagtaatcttcctgacttggccttccaaagtgctgggattacaggtgtcagacaccttgcccggccatgctttgtttcttaatgaccgcagttgttacagcccacccaaatgagcctatgtacatatatggagatatatatagagagattttttttttccaacttcctctattttttaatttattttaacttcaggagtacakgtgcaggcttgttatatagctaaacttggatcatggtagtctgttgtatatttagtcacccaggtattaagcctagtactcattagttatttttcctgatcggagagagatttattttttgagacagagtgttgctctgttacccaggctgaagtgcagtggcatgatctcagttcactgcaacttccgcctcccaggttcaggcaattctcttgcttcagcctcctgagtagctggaactacaggcacatgccaccatgcctgactaatttttgtatttttagtagggacggggtttcactgtgttggctaggctgctcttgaactcctgacgttaagtgatctgcctgccttggcctmccaaagtgctaggattataagcgtgagccaccacccctagccaagagttatggtttttttttttggttttgtttttgtttttttttttaaagagaagtgttgtatgtctactcttctaacacrtatatacaacttaagttaaaaaaaatttttttaagctagtaagaaatttctgggaagtccttaccatctctggtaagaagtgttttcatgcaacagggggaaaaaatatctttttttctaataaaactgtggaaacaagatgagtaattactacacgaaagcacagaatgttttccaaatattgtgatgggtgtttattctacatttttcttctctcaaggccartcatgggcttgtacagaaatatgaacttcagttctcaattattggtagatctgaagggagtctatgtacagaactattgtttaccatcccgagaagttaatttcatagatagatcatttaaacaaatatgaccgtgttttaaatttgatttaagaatgcatttggggtgattagcgatgtagcgactcctgcagctggtgagccttaaatacgctttataaagattcctgtccgttgccagcacagctgtaaacacttggcgcctttgctttgtaacagttacagcacttgccttttttcccccagccacagagcagtgctaatcattaagtatgtttaataaaaaatatcttctcagcctccaagtgactctctgttaaatattttaaaaacttatcccacttagtgagacattcttgacattaaatagatttaataagaaattgttagtttctgatggttttcagtgttaagtattttttataggtagttacttttccagccgacaaccagctctaagtctttaatatttaaaatgttgcttttatagctgcgtcctgcatctgtgtataaaatatagcatgagcgttgcctctaaattttgaaagactcctcctaatgaacataagaagaaagcattttcattttctaagcatatttatatttcacataccaaagtacattccaagtttcacaaattggagacaatttctgcccaaatatcagttttaacatcttgtaagatgccagtaacaaaggcacacttgaaatgtacttatctggcagtgagcacctatgggaaaatgtgctgtgggtaatgatgaagacatgtaatgttgtgttccactgaagctctctaagacagtacagaaaatttcgactgtcttcaaagagtttattcgaagttgcacgtgagtccagttttattttttaagacagagtctcactctgttaccagactggagtgcagtggtgcaatctcagctcactacagcctccacctccagggttcaagcgattctcctgcctcagcctcccacgtagctggtactacaggcatgcgccaccacgcccagctaattttttgtattttcagtagagttgggatttcaacatgttggccaggatggtctccatctcttgacctcatgatccgtccgccttggccttccagagtgcttggattacaggtgtgagccaccgtgcccagccgagtccagcttttaagtggaaaatagagcaccggagtataggagcttgtcagagcctggtcagggacatcggggctagctgtgaacacactttgatttctattttgagcctgggtgtggcctctgcatatatagaggagtttcagcagttttgccatctttsggtgactgacttaggctatgcactggaggcaacatgggagacagacatagaggtcaagcccctgggatgcagatgaacagaccaaactttgagtcctggctcygcccacttttctttgtgaatctgagtcaagacttcaccattcagtgtctctgtctcttcctctgtaaaatgtgggtagtaatacctgatgcttgtggtggttgtgagaattaaaggagttgatacatactcaagttttctattctcggcacttacaatatattcagtgttcattgaacatttacatttactctattttgtgtgtgtgtaattgactagcagagtaaattctttgcagccatgcttcagagaaggattgacttggagacttagaagccttttcggatgccaaatttgataaatccaggagacagaacgttgtttcttacctcgtagtacttgaagaatactggcatcttttttcatgggtgagcagattgttgtcaaaaggttgagatgataccatccaagaattctagaaacacacaagacaagacttttagtctgaaattaacaaaggattgagcatgtccttgaatgtctccttttttgtaatgtgaggaaattctgccgaacctctgccttcacatacaaccttccactcctaattctgaattttagatttctcccattgtgcttagagatcaccttttggcctcttcacaacccctgcccccttccacatctgatattgtgggagattatacaggattcaagtggtgactaaaaggaacttctcatttccacctgcaaaatcttctattagatgtcatataccgagatatgacggtggtaatgatcattgtgatggtggtgatggagatgacagtcatagtgatgatggtgcagatatggactttgatgatggtgatgggggtggttgtggtgatgatagtgactataatgctggtggcttccttgtactgactatgaccatgtgactcacacagtgctgagtgctgtgcctgcattatctcatttaaccttcatcgcctcttaattctgcatcataatcatccttgtttaatgaatgattaagcatccgttaaacacccaggctttagtttacccaggattatacccagggaatggggaagtgaggtcagaacccagacctgcctcacctcttaactgctttgcatgttgcctctcagagggtcacagaaaatcttgcactgctggcatgccagttgcttctggggctctaggatttggggcaagctcagagatgcacaagtataacctggagcttccacaccagttatggagtcagagatgtgaacagtartatttccagccttgccctggcctgtcataaagccatgcccagcgacaggtatggaataaacctgggcttcaccagtaggatccaagtgaccctgtgcctttggagtaagtccctgggtgtcccagtgtccatattttaaagaccagatatttctacagcgtgtctttgttatgccaaaaccccttctgaatttagattttctgatcttctgacagacttatttcaggtattactcatctctgattccaggtctcaccttttctttctgtatcatgaatttttaagcatggtgttcttttgcctgaaattttcttcctcccgcaccsccaccctgcatggccatttgatattgtctcttttcctttgggtctcagcttagctgcttcatcctagaaggcttcagggtctcctccaacctccactccagttcctctactaggtgttcctgtggcagcttctcctttcatagcttctataattctgtgctgtaagtgcttgctttctcagttgtctttcttgtgagactttgagatgctaaccctttaggccctacgaatccctgtgtgctcagcatttgggtgttcagtaaagattaattccctgcttgaatgaattcattgaattcatgtcatgtttgtgtcctagaaacacatcaaggagcacaggataggaattagggttgtgacctttatcctttgacccacatcttaaaaagggtcaaatcttttacttacgtacaattaagcacaygtagtaaaaataaatttccaactggaaggtactctttagggtacaattttttttattaagtgacgtgtcaagattattgggctaagttggggtaagttcatcagtttaaaattttcatttttaacagacagaaggcatgagaaaggcaaaactcattttcctgtgctgtttaattcgatcacataaaattatctcaacaaatacaaagaagcccaatatgtttttccactaggtttctatatttatcttgtagaatcaactctatagatacacctttagtgctttgttctctaaaacataattttgtttattttcatatcctattttctctttccagctgcacacatcaagactttttaaatcaacattcaattatcactaaatgacttttctgcctatttcagaatgattttratgtggtcatgtttattttattaaagaatttttatatctgccttgggataatgcaattagaattctttttacctttatgcgatcagtttagagcccttctcataagagaataaacaaagataataagaaggcaatatttttattttaaaagggcagataaaatatcctctgttgcaaaaggtctcttttggctctttgttgaatatgcggcaattcagagaaatagatcatatacttcgaagttaggtcatcttggttttaggtatagaagaacaagctttggtcgtgaatttaaggtttgtttgtttgtttgcttgtttttacttctgccaggtttatgattgttaaaggatagactcttgagttcctaaacagtagaaaacacaacccttgtctaaggggtggtataatctagtcaattcggaagaaaatacgtgaatgaagaaacaaagttgtcggtggaagaaagttttgaaatccattagaaaacaggacagcttatcaatatcataggggcctagtgcagatagttggcatgtacagggagctagaagcaacatgaaagactgtggtgaaaattttcaattttctctgtagggtatttggaggataatttttgctcccaatgataatggagtcagcaccctctttggagccatgaacactctctcttaacttcttctcagaacctttcctgtatactgccacaatctcaaatgcttggcattagccagaggctggagtgcaggaatctgatgaagagtgcmgcttyttagccttggcctttactaactgagcactactgagcaagtcacttaacctctctctgctcagtttctctattttgaaaatggctcttggccgggtgtggtggctcacgcctgtaatcccagcactttgggaggctgaggcgggcggatcayctgaggtcagaagttcaagacaagcctgaccaatatggtgaaaccccgtctctactaaaaatacaaaaattagccgggcatggtggcacatgcctgtagtcccagctactcargaggctgaggcaggagaatcacttgaacccaggagacagaggttgcagttagctgagatcatgccactgcactccagcctgggtgacagagccagactgtatmtcaaaaaaaaaaggaaaaaaaatggctaaggaatgcttacctcatgagattattttaagattaaatgagctattgtatttaaagcatttaatacacacagtaactactcctgaaatcttagctgtggctattaataaaaataaaaataatcaataacatattgtgcagccatattgtcattattattaatatccttctaatctcagatacgtcattgcccagcccaaatgccagctcttccattaagcttcctcttttcacccattggaattaattacccttctgtattcttatttactttgtcctgtatgtttattatagcccttaatacttgatggattttattatgtatgtcctggaaacttgggagcattccttacccatccttttaatcaagactgagcatagtaattattttaaattaaatagcattgtggtrgaggagaggacaaaagagtgtgacccggatgagtgttttaatttgcattcattgtaagaatggggaagkggtgttggtgtggggtgagggcagccatttcatgaaactcatagtagttgtctcagaatgctaccttgtcttagctttgcaattgaaaggtagcttagatgtccattgttgcttttcagatgatgcaaacagtcttaggttgaatattcgctgttcaattcaggaagaagtttccccagatggaaagccttgaattatttatgcagtgtttatctctgagtttacttcccatcacaaccaattaaggctatttggtttcattaaaaatagcattttctcatttgggaaaacatttatctgaaggaaatttaaatttacccacttggaggctacaaagctggtgtcgagttagctgtaccgcccttagccaagaaacagagaaggaaacaaatgcagttttctcctcgctgtacattttttccccttttagttctttaacagacatgaactgtgtagagtcaaacctcattttgtccagctcttagatttaaatctctgcaaatcagaagcttataaatggcacagggaagtagatcttattgccctcaatgctgctgttttctgtacctgtcaaatgtccttagtaatttgttaaaatagtttaatatacatagaatggtaacagtcaccagtgccagtcattmccttgaataaaatgtgttaggtcttctcttaacaggtcatgacctgaacacaaggttctgagcatccccttcccactaattctgatggtatgccattgaaaatggcactcaagctttatcttttgtaatgcaagctttgcattaattcataaacatatttgaagtgagactagttatctttgcatgggcaaaggtgaggcaaagtgatagggccagacagaacccagtgaccattcagccaggatgtctcaatgacagtgctccagcaggggcatcatgatctagattcatctataggaggtggttgatctctccaagatgtgttctgtcccttctcttccccctgtgaggtggtcgcacaaagcaccattcccctctcttggttgttatgtgagggctgtgactgtcaaactttgggatgctctagttaccttactagggcaccctctccccactatacatcttccacagaaggccagttataacctgttaggcaagaatggaattggaggaacactgaaatggcatgatgttgatgatttgattggtggtatcagttcatttcccccagagcgtacgtatccttgcattttctcatccactccatccattcatgctttgaagttacgtgtgtggggatggaccctccaggatttcttctgtttttctcccttctgtgtgactgtctatctttcattgaccttttctttctttagagaggtcaatagcagtatataatggaggaataacaagtaccttatgtatacacttcctgagcctgtgccaaacctcactaactgatcatagaattttttcccaagtctgatagggcttcttaatccttctcaaagaagggagccaagcagccaccaccaattagtcatcattggcatgcttgctgccttcattttatttcaaagtctttctttcctgcatttagtctgggggacttactgtctctcatcattaggtgctgattttttttttaaatcagactttaagaattcatgtatcacctactctttgaactagtcccaaacaaagatttttgtattgaaaaagcctttgagaagacatccttaagtttaaaggtagatgtttgttatttatctggattgttttgactgttgttatgtggaaagatgttttagacctgcagtatgcgtggagaaaagtatgctagtaacaactactaccatttatggggcacttacaggatgcaagaytgtgcactgagctaattatgaacattatgccrttctctcaatgtgctaagcaggtaatattaccatcctgtattatggaagatacaagtggggcttagagagggtaatttgcccatgggtattagtgcagagcaataagtggaacccagaattagaacccacattttctaagtttgcaagcttcatttcaaatttcaatcatagtctttctggttaaaacatgctgtgtgatataaccccatttacttcaatattcttgccttatgctgtatttgaaagtagcttctagaatgcagggattttttggattctttgtttcacttgctgagcttcctattatttatttatttatttdtttatttttattgagatggagtcttgctctatcgcccaggctggagtgcagtggcatgatctcagctcgctgcaacctccgcctcccgggttcaagcaattctcatgcttcagcttcccaagtagctgagaccacaagcgtgaaccaccacgcctggctaatttttttgtatttttagtagagwtggggtttcgccatgttggccaggttagtgtygatctcctgacctcaggtgatctgccctccccagcctcccaaagtgctaggattacaggcgtgagccaccatgcccagccccagcttcctattatttaaattgtatcctggaatgccttgctcactgttacagacttgcatgaagttcaagttttatgtaagttctctaacccattcagctgtcaccttatgtaataygcattttcccctctcatttaatgctggatgtcaatgctgagctcctcagagatagtacatgcctcaggatggtaggaccccttcgtcctagatataaatcattccagcaggggcctttgagttcataaatgcaatcagcttttctcttcctttccttaccattccctcccccagccttttaaaaacagatttcaggtttacatttacaggatcgcaaaaaagccagcacagttatttagctccagtctgcagttaaaacagtgggatgcatagctaatttcactcatatttttttaatgtgcattagtaacctggcgctccattaattacaatatttcatattgggaagctaaactggcttttcttggaaacctgctgaaagtcagacaattacctctgcaagctacctctgagtgtttcgtatttaatagaacatgttaacataataatgctgttttatggagaaragaggatgaattttgtactgataataaaaagcccacttaaaaaaaraagaaagaaaacaaggaggtaatgaatgttgctctttcctagaattagagaaaatatatccacatgaggcagtgtctacacaagccaaaaacaggtccaggtggataatgggtattgtaacctgcttgcttgacagtttataactttcctcctacttgctgttgagtctttggggtggaagaaaatacagaacagtttagagtatatccttatttctcccaagataggtattttgtgacctctaagtatagacaaaatggatagaaagtaaatccttctgtctgggcagtggaaaactgcaatcgctatgtgtacctttacctcttgtaaaatcaggatgtaggaaaacattgtagggttatccaccagaagggcaaccttttttatataaacttatctcttcttactacctttttaatctatctcccagttgttttcagtgcctgggagtccccatgaacacttgtatacggagattggagtaaatggtgctattagcagactattgtcttcagaaaatcctagtggtcctttattctctatctagaatcatacaagtttcctgcattacataattgctgtgtcatcacatttcatttgatctgtaaaggtgaacatattctttttcccctcctgcgaggaacaaagctggagaatatgtataattcaaaaattggtccagtggaggcacataactttcatttaattaaaggcgctgagtaaagggagtttgagataagcttgaacaagtagactgctgcctgtttctctgaccttttcaaaagggatacaatatgtaactgaatattttgcgaatggagtcaggaaatataaaatagaagaaatgactttgacacaactttgaagttgataaccttgaaatggagtaagaaggtgaagatcctaaaaagtaaaaacaaaacaaaacaaaaaaaaaaacrgaagccggggagaaacgtatctcatygtccctcttttgtatccttcagctgactcagtactcaagctattccctgtccacttaagatctgtgtaatgcgagcagcatgttcactgttttaaggttataccacagattatgcatgccacttttcactggtaaaacgggttttagtttctaggagtctccattttctaataagttagtgagatgtttcgccatttggtatactgggtagagaaggatttattcagaagtaattttgaaaatcttattctgttaaaaatgtctttcccatttgaaatatttcatttgcattgtgcatataatggaagtttgctttgaatgatgctcgctgtttcatgtaatcaaatgcatcttttactcggtaactttccaagtggtggataggattttcattgtcttgcacccagtaaaatcatcaactggagtggaatggctagataagtcgcaaaagatgctgggtggtaatttgtttttgaacttgcataggttcaaataccataatatgttgatgggaacatttctggggaaacttagacgtgtataatatcttacgagttgtgcagtactcaccctgcgtggtaggtcaacgggaattcagagtagggaaggaagatattactgagctgttgagctacattctgaaggacactaaaactgcttgattgaaataaagtagtgttaggaagtaattttcacgtggctttctatagactttctcatacttcgctgtttttgctggactttgaaaaacatcagaaaatggtgttaaattggagaaatattagaaataattgaatgtatgattaaagtgacaccaaggaaattcttaaagctaccagtggactggaaaatcaagcttgttgaatattttagtggatgttagcagtatcagaaaaaggatagtgtctctgagtagagaaattgttaaaagaggtgcaataggtaaaacaatactgtaaatccattatatgaaagaaaataggataaagagactcttgactggtgtggagaataatagaaatacagttacacaccacataacaatgttttggtgaacagtggatcacatatatgacagtggtttcagaagattatattactgtatttttactgtacctgttctgtctagatatgtttagataccgaaatacttaccatcatgttacagttgcctacagtattcaatacagtcatatagttttacagatttgtagcctaggagcagtaggctataccacatagccaaggtgtatagcaggctatagcatctaggtttatgtaagtacactctgatgtctcagcaacaatgaaatcgcctaacagtgcacttctcagaacatatccctgttgttaagtgacacttgactgtctagatttgaaagttgcttgagagatggccgagtggccatgttttttaaataaggaagttgagaaacagggatatcaagtgcttggtacagttttgttcgttgtattgttttggttgtaaactatctaatctatcccaatctagctgaagaaaaatgcgagaatttagtgactaacataactgcaaagtccagaggtatcattggtttctagccataaagacaaggtatcaggaatctgtttttctagtgagctcttgttttcctggatgaccttcattcccaagcaagctgtcttcttggggttacataaaacagctccatcctacatccctctaggttcagattcaatggaaaagagaatacctttctaaatatttccggaaagttctctattaatactccgactttgtttaaatggatcacatttccatccctgtactccaaggttctataggaagcttttcttctaagggaaggaaaagaattgttatccaaaggaaatcagaagttggttactaagtggcggtcaagtcaacaggtgtctcttacagagtacagaaagccactttcgggcataagtgaggcatgtctccaggtttcctggtctacctcatcaggctgccattcttcccactgggaccattaatccaacaaatatttattgagtgtcatccatgagcaaaatatagaaagtaataagagtctcactgtcaaattgatttcaatttggattgctctggttactaatttcaaagtcagttgctatgagcatcatttggcacaactgccctggaacactggatcagcatttctggcatgggaacccaraaatctgctctttcagcaagcctcccagtgacatgattgtgcagcaaggttgaggagctactgtgcaagaaaagagtgctttgaacatgtgtaaatgtctttataaaagccatttgcagcttatttctatcgtagttggagtttctcaaagcttaggaggcatgaagtacctaatttggaataattatattaaattcagattccagggcmccccttgagacctattcaaatttctaatcttgttcctaggaatccacattttctttaatctacccaggtgaattctgatacgtgataaaattattctccaaagtggaatataaaatgttgaaccatggtggctcagagaarggttttagaatactagttttatgttttgtcaattaaaagaaagctgtgttaatatttgatgtatatgttgcagccggcgccctcatgtggtctgtgtgccaggtggttacatgtcttatytggcaggtattcaatggaaagaatgggaataccagtgtacacagaaattcaattgctttcaacatattgcaatcaactgcattttatatatgcctattgtaagtaaatctgtgtgttaatatacctttgtaaccaaacyacctctcccagaatagacaaatggcttaatcaacatggtctstgtcacccatcttctgagtaaaaaaaggatctaatcagatctgacatggagctgggcatggaaattataaattattaggacagtttggtctatgcttttttgatatatgcttttatatatgtcttctctcattaaccataagtctyatctgcaatatattttgtgaattatttccaaatgttaaagattagcacgatactttaaaatgatgtttctttcattttcaccgcatcactttttttcttcttttgtgattgttttaggatgaatatattgtgttagtacagtaatccaggtgtgtagtttatcggtaaataaaatagtgggaacttacccacctacacagaacttgtaccagttgggtagtacatgatctaaagaaatgcagtgaccactgttctgtcaaggccaggcatagcggctgatgcctgtaatcccagtgctttgggaagccaaggcaggaggatcaggaggccaggaattcgaaaccagcctgggcaagatagctgagattgcatctctacaaaaaaatttaaaatgtaaccaggcatggtggcatacacctgtggtcccagctacttgggaggctgagtcaggaagatcacctgagcctgggagttccaggctgcagtgagctgtgattgtaccactgcactccagcctgggtgacagtgagaacctgtctcttaaaaaaaaaagaaagaaaagaaatggcctgtctttggaactctcttgctcacattctggtacatttggttagcctttcatttccttgttacttgactttaaaaagacaaaagagaagaagaaaaaataaactgccatttattgttagatttcaaccataaggaaaacaccttatctgtatttatttacatgttgataattgccttctttctgtttgtcagatacatatgcatatcgctttgttgatagaaaagacggagatacccagaatagccaggaagcacagcccacaccacgcattaatttttaaaccatttcttagatcacagagtctcttgaatccattcgcttttccagtttcaatagtgtttgacaaaaggaatgtgttagtgtgcattcctctggctttgattttttttttcctaaggatacatcaaactcttgacagatatatgagtgtcattttttgtggtttaatatagactgtatttatatttataaatgtaattgctctccaaaggaaatcagtaatttgttagtgattatctgtattttgaacttcactgccttgggtttttttttttttttttggagacggagtctctttctgtctcccaggctggagtgcagtggtgctatctcagctcactgcaacctccacctcccaggctcaagtgattctcctgcctcagcctcccgagtagctgggattacaggcgtccgccatcacacctggctaatttttgtatttttagtagwgacggggtttctccatgttggccaggctggtcttcatctcctgacctcagataatccacccacctcggcctcccaaagttgtgggattacaggcatgagccatcatgcctggccttccttttaataaatttgaaacttatctagctagtgcttaatattctgaagggatgaatttgtttgctgtaagaaagataagcatggcatctgcttcacacctgtggtgttggggataaagagcatgcagtaagttatattgagggacctttgcaggatcttcaggggatggcctctgttctgggattttttctcatctaaatgtaaactaaaatatagatttcctctccccatgagagcatttagagttacgaggctcaaactgctggttagataatttgacttcctagctctgccaagcccagctgttcatgcagtgcaaaattttttaaactttctattgaggtatagcctacatacggtgaaatgttcaaatatgaagggtactacatgagggactatacatgtgtatacaccctgtaactactgtctgggtcaagatatggaacatgcccatcactctgaaaggcttcctagtggaccttctcggtcttaaccttaccctcacwgcacatctatgagcgtactgacttccatcctcttctgtccctttttgtctatttgtgaccaacaatgattgctgctgctattgtagtcccaattgttagactcagagtcattcttgggactctcacaggacaattctaacatttctatagctccaataggaggacaaggcctgtctgccttcagactctcctggtaggcctgaagtaatatacaaggtattcattatttgttagctactattttgaataatgggtttttttcttctatttggccttctctccagttggtctttaatgtgtaygtcacctgtttggaataactggttatgttagtgtctatagatccatttgtaaggatcaatttgtctgagtagcttgctgttttctaacactggatggggcctccagggatagaaacgtgggccaggtgatttgatagagagggaaataatcaggaaagtcagtggttcttctgggtgtcacctgacttcacctggttgccagagcagactgtaaggaacaagaggcaagttagcaatagaggttgaggcagctgcctaatcatgtgtctctttgggacatttgaattcttccaggtatttggaaatggaagcagaaatggaaatctttgtttttgtaccttttttgagttatattttgcagtcttaaaagaactgcattgttccttcatttatgaagcgtacgggagtatgtgacagggaattcaaagatgtggttttgcattatacagtgcttacgtgagaggcatgtattttgctgaataagttcatggacgaggtataaagatgaaattataggctttagtgggagcaaaaagtagacaccacttccatgtttccatggggaaatgggtcaggggagcgattgctcattggaatcaggaaataattcatgtagcaggtagcacttaatttgaatcttgaaagatgatgagtaggagtttttcaggtagaattatatctcaagttttcctgcttctggttgttctgaactgatacactcacatcataaattgctattgtagttaatattgtaattaaggcccaattatgtttcaagtatcagtggaattgagtccacactttcattgcattgcaaaatttaaagcagtaattaatataggactattattataccattatactcattttaaagatgataccatacttagttttctatgttttggattaaaattgcaaaatgtgttaaaaaatgtaaaggcatcacagaaatatcgctaataaggcttaaatcattgaggctgggcatgctaatgagagaacagctactgtttgttgagcttgtaacacggactagtcactctgctttattttatcacaactgcttttcatagcaacctcaataactaggtgcttgttagatctaatcctgtttttcagatacagaaaacggagacataggtgaagttccctgtatttatttcctagggttgccttgacaaattatcacaagctaagtagcttagaacagcagatatttgttgtcttacagttctggaggctccacatctgagatcaagatgtctgtagggttggttccttctgagggctgtgggagagaatcgcttttgtgcttttgctcttagcttctggtggtttgcaggcagtctttgacatttcttggctttgtagatgcatcacttgccttcatctttgtgtggcattctccttgtctttctctgtgtccacatttccctaatttttaaagaacatagtcatattggattgggattcattctaatggcctcrtctcaatttgatcatctgcaaagaccctgtttataaattttccaaataaggtgacagtcataggtatacagaggataaggacttcaaaatcttttgggaagatataattcaaaccataacattgcccaagctcactcagctagtaagcagtagagagaattcaaatccaagtacatatgactctatagcccaaggctctaacaactgtgccattatacattagggaaatacattcgtatccaagaatattgtacgttttaaaattcagcagtgagtaggcaaatatcaggatatgaacatcccatccagacaggattgacttcgaatatgccctggtaagaagygttagtccagttgtcatggaattgtagatgtttgctgtccactgagatatgtgttatgtgcttcgttctgtacaaagggtataggagtgatattctatttagtctaaatcaagcttgtccaacctgtgacccacggaccacatgtagcccatgagggctttgaatgtggcccaacayaaatttgtaaactttcttaataccttataagatttttttttttaagcacatcattagtgttagtgtattttatggtagcccaagacmattcttcttccattgtggcctagggaagccaaaagattggacacccctggtctaaatacaaaacattgtatctcaacctcagcattttgggcttaataagcctttgttatgtcatgtgcattgtaggatgtaaaatagtattcttggcctaaaatatctaagatgtaatagatgccagtggcacccctgacacagttgtgacaaccaaaaatgttcccagacattaccaaatgtcccctggggtaattacgattactgcagtttgagaaccactggtttagaaagagaggaatgacatgtggctaaactgtgccaccctgtcacttgctgtgctttgcctagactttgtgtctatttagggtggttgctggcaaagtgtgaggaagacaaactgtttctgttgaacttcccttgaggctctatgtcattcatggacacgagaaggaggtccacagatggaatggagagttgaagactgaaagcgcattatgcatgctgtctgcataacttgacttttacaaagcgagatagtggctttggaataaacgggagataaaagtaaagctctttcatctaaacaacaaggattatccatgtttccagagaaaggcaaatgactctgatggcagactgaaagtcaatgttttgacttaactattttgggaggtatttgcaattgagatcagagttttaatgggccttacctgagaaggaaaggcagggatggttaaccctggctacacctttgggtttttaaccctggtgtttatggtgagaaaccacagccaatctcagccaaccattgaacattgtctggaaattctgacttaagacttacccacatccatccttcatcctccagtttacactgttttctgttgtccaggaagatggagaagtacctctttttttatttcaaaagaagtgcttttctgtaggctgccttgtgggactcccaaaggatgccatttcctgagacacgtcaaggtatctgcatcttagacagtggtgttaccatgtccgcacatcagtcagtgcattttctcttggccccaggccagtaatgtggttgtgtacactggtcacagctcaaaaaactgaaaaatgaactctgagctttactgcaaagaatgccagctaacaaaaataactctgccagagcagtgccctggacaggtttgcagctctgagatctaacagtgctgatgtatgggagtccagtagaatgcttaaaaagaaaggaaaaaatagaaaaaatccatctgctgtgccgttaacattccaaaaaggtaatgcccaagaactccaaatgggtcctaatgtgctgtttaagactcagaaaactcagctttaagttctacaccactctgtgctcccagactgggaacaaaaacagggtatttccgtgaagtgcaaatagatgattgtatggaggaatcagtgggtaggaattattttgctagcatgttaaaaatacttcaggtgtaggcatttcaagaaataataaagcccaatactctaacccttagaccagaacttggggctacagatggaatacaatgctttgaataaaactataacccctaccagagacctctttgaaaacacagcagtgctagtatggatgtgcttcccctagcatgcaattccccatggatccagccttattgcgtttctctgtacaattcagaaagcaggacggaaaattgtgtgtacctagcccaagctatctttattgtctgatgtctaatacaacctcattcctaacctcaccttaataatcttataagggagcataagttgccttacggtgggaaggaaccttgctagtgtgatgacatttggatatgcacttatttattattattattwttttttttagagactgggttttgctatgtcaaccagggttgtctgaaacgcctaacctcaagtgatcttcccacctcagtctctgaaagtgttgggattacatgagccactgcacccagctggatgttcattttaagtgcgtcagtccttttatgctaaagcttgtcatccccctccccctcatacacacctttttgttgggatctacagaaagtcrcctatggatactgccaagcttcattcttgccctgcgtttatggatctggggagtttatgtcctgagtatgtaggccgtgggtctgtcccrggaagcagtgcatgtgtaggtgctgttgttagcatgacccaagtaggcagtagggaccaggttgaattcagtgttgataacagcatccagcagataggactaggcttaaattctgaccaaggcagttgttgagtcaaactaggtccaagaagaaagaaaacagagccccagtgatctgaacccactgaagttgagctctactcccaagggaagggctcttttcttccctaaactgcattatgatccctgctgtgtctttccctttgcttatgagcaattgttacaccagaaggagatggggactctaccacagaactctgctcttggtaggcagacgggaatgatcatccagtgtctggcctgatgaagcatcagccccaggtatccggtctgctctgaaggggcacagattgtagagtcactggatccctaactgttcaccagctatgttcttgaagcagtttcttaaccttcctaaaattccctttcccwgtctttaaaatggggataatagtaacacccgctatgtagaattgtcatgaagataaaatttcctaatcttcacgaagcacatgtcctaggggactccttcataagtggaactcacaaaattatagatgattcttagacttggactctctcaaattctggttcctcattccattcccctactagcagtcagcttgaaaacagctctaaagcttgccctctgaagactctgatctcattaccccaaacccctattgtccataaaacagatcaggaatgagaattcagcttttgatcttaccttgtaagaaatatggaccgagacctggtatgaaagacatttgttttaaagcgtcatagaatctcatgtttagaatgagcttaaaaaccaactgctgttgaaagtcaggagttggctgggcacagtggctcacgcctataatcccagctctctgggaggcccaggcagacagattgcatgagcccaggagttcaagaccggcctgagaaacacggcaaaccccatgatatggtttggctgtatccccacccaaatctcatcttgaattatagtttccataatcctcacatgtcatgggaggaacctagtaggaggtagtggaattatgggggccgttactcccatgctgctgttctcatgatagtgagtgagttctcacgagatctgatggtttcataaggggcttttccgacttttgtttggcacttcttgctgctgccatgtgaagaaggacgtgtttgcttccccctccaccatgattgtaagtttcctgaggcctccccagctgtactgaactgtgagtcaattaaacctctttcctttataaattaccagtcttggrtatgtctttattagcagcatgaagacagattaatacacaccatctctacaaaaaaatamaaawattagctggrcatgatggcacaagcctgtagccccagctattccccaggcaggaggatcgtttgagcccaggaggtcgaggctgcagtgagccatggtcacaccaccgcactctwgcctgagcaacagagtgagaccctgtctcaaaaaaaaaaaaaaaaaaaaatccttcctgctgatttcctgtatcttgatgagaatgagttgcacctttagtggctgtagcctaagaaggaaactgaagaactgcagatcagggactatcatttaatggctactggctactgttacacttcctgcaagcagtaataggtaaatagaaagtcagtagatggttactcttggttggagggtagtgaccagatgagattgcacaaggcttctggaggagcaagaagcgttctctttcctcatcaggwtgccagttacgtggatgtgctcactctgagacttcattgagatcactcacagttgcacttacagctatgcactgttctgtctgtatgtcagtatttagtaaagtttgaaaagaaatcttgtcatcctgtgctatgtggttcttgttttagtctttctttgttgttgttgtcttgtatttcttgtttcaaatatttacaaaagaaattctccttgataaatctttaaacaatactgaaggtatggagtagaaattgaagtcattgttttatctctattcttgcctgcattttcagttctcagaggtaacygaagttaaatatcttatagattgtttaaggttttctgccctcctttatctgaaatatgggatgatcataatacatggagttctgtaacttgccttatcattggctttttttgcatatcagatacagaatcaacatagttctttttaatacctgcataatatttcatagtatggatgcatcctaatttatcttgttattctcctaaattgtcaatgaatgtgtctgtatccttctgctattataaataatgcttcttgaactccctgaatctcccttgtaacatttgtgacactggtcaaatcccaactaaggtagcctgttttagcatcccttgatttaaaataccttctttgaaattaagcttttgtcctggagtttttaatgggcacaactctctatgatgactgaaatctgaaatttgggaattacaaaccagacttcctgggcagacttctgagtgtgttcactgttgtgtattataaattcaagacaaattagaaaaacaaatgtttgagcaggactgtatttaaggtatcgtatctctggatgttttctatatccactaacaagataggtcatgaatggagccactctgtaacctgattatyggttgacacatctccggtagacttttgtcttcatgaagtcatggttttgatattttgctgtttttatcccctcctttaaactctatttttattccaaattactaacttccctgctgagatttatctatcagagtctcaagatgctctcattaataaagttattaacccctttgctaacyagcagcatccaaagcctaaaaaacaytacttggctttctcttttcttttcttttttttttttttagatggagtctcgctctgtcgcccaggccggagtgtagtggtgccatctcagctcactgcaatctctgcctcctgggtttcagcgattctcctgcctcagcctcctgggtagctgggattataggcgcccgccaccacaccccagttaatttttgtatttttagtagagacggggtttcaccacgttggccaggctggtctggaactcatgacgtcgggtgatctgcctacttcggcctcccaaagtgttaggattacaggcgtgagccactgcgcccagctgcctggctttctcttgatgccaaggttgctgcttttacaatggctggctgttggagagtggcatttttcgttacaatttagtatgggggggcgggcgtggtggctcacgcctgtaatcccagcactttgggaggccgaggcaggtggatcacctgaggttgggagttcgagaccagcctgaccaacatggagaaaccccatctctactaaaaatataaaattagctgggcgtggtggcgcgtgcctgtaatcccagctactcaggaggctgaggcaggagaatatcttgaacctgggaggtggaggttgctgtgagccgagattgtgccattgcactccatcctgggcaacaaaagcgaaactccatctcaaaaatttagtatgggattaaatgaatggatagcaggatgaactgttgtttgataaagcaggtacatttaaatgttaagggaggtatctaggtgggttgtatacaggtgttcacagcaaaattctttcagctttgctcgtatgcttaatgcttttagttaataaaatgttggggggaaagcatatgaaacaataagaaaatgggaaaatctaattaatgagggacttgatctgagtcatatgtaaatgaattccctatcaagtaaccagttcaacagagacatctattttttgaaaagaagttttgtagaaattacarttatactaatgatgagtaagaagataatgttgatctcatctcatagattttatggcattgttttttttaaaggcaggatctcattgtgttacttaggctggtgggcaatcatggctcactgcagcctgacctccttctgggctcaagtgattgcyctacttcagcctcccaagtagcatggaccacaggcatgtgccaccatgcccagttaatttttgtagaaataaggtttcaccatgttgcttaggctgttttcgaactcctgaactcaagctatcygcccgyctcagcctcccagagtgctgggattacaggcatgagccaccatgcccagccaattttgtggcattcttacttgccctgtgrtgttaaatactaaccccaaactagtgtaaggttatattcaatcatcaaactttgttttaagtcatcatcattcaaatgtatgtaaaagcatcatctcaattttgcatatttggaaatggggacccagaataattaaatgatttacccctgatcttagcacccgatgaggcagagcttgaacttgaactttcattttctaattattatcttttccactccatcatatgttttctctgattatgagattctgaaatccacattttccagagaattgatagaaagatcatcaagccaaggattttgaactatgatcaaagctacaatggtggcagcccactgttctttttaccactaaagcctttatccagttcagaaaatgcctctctctaatcattcctgttgggttttaaccaatatatcaggaagacgtgctttgctgagctttgggcagccttgttttgctctctgattctctggtgtccttctgagcaaagatacggtctgagagagttaatattaatactttgtgtttatataaagtaaaattatagtgcacagtgtaattttatggctaggtaggtgggaaattattagtctaaataaatacactttttagtagarcagctgtgttaagtaaattaaattctgcataaatctgaaacagtacctcgattttcatttttatttatttatattttttgtagagaactagtatcgctatgttgcccaggmtagtcttgaactgctggcttcgagcaatcctcctgcctcatcctcccaaaatgctgggattctrggtgtgagtcacctcacctggcctcaatcttttctttatttctttgtttcctttggagtgttagtragcttgagtagttgtgcgtttcattgtggtaaaagatacatgaagagtgaattgtgttacagtgagatcaggaataaaggaagattacaccctgcgtgatgtggagctgtctgttgctaggggctgatggatgcattcctttagaacactttgctgatgaggctggtcttctgagttaggtccctaaatggatctattagattcaccctcttcttcttacagcagtggtggggtttgggttttgttcttttttggtttttctttttctgctcatttcaagggagactttttttccgatgagctayatttttagagccagcaagtgttttaaacagttgggataaaccacctttcttggccccaaatgaatacaagtcttctccccagagaaaactactgttagtttgtgctgtttttccagacgtgagccttcccttgccttagatctatatacttgggcatatacccacaggacacaaacwatactgagttgtatgacatttttaaagtcaaatgtgatcacagtgtatttattttgcaagttgattttctcctctaacaatatatctgagaactttcaaggttggtcttgaactcctggtctgaagcaatcctcctgcttcagtctcccraattagtgcctaatttcttccttccccctccgtaggttctaccattctcctatttattatgcatatcaagtttttcttcccctgatgccatcgatggtggggcatagatacttgaatatttgtctttgyatatgcagcacttgtggcaaagtattaatattgtgaataaagagctccttaaataataaaacaggaaatcattagaaaaaactaagtaaagattctttacttactggttatttggatttttttttttttttttttttttttttgaggcggagtttcactgttcttgcccagcctggagtataatggtgcaatctgggctcgccgcaacatccagctccctggttcaagtgattctcctgcctcggcctcccgagtagygtgattacaggcgcgtgccaccacgccaagctaattttttgtattttttagtaaagatgggctttcaccatgttagccaggatggccttgatttcctgacctcctgatcctcccagctcggcttcccaaagtgctgagattataggtgtgagccactgcacccagccttgtttggaaatttytaaatgagagcagaagtacccatccaatggtaaaaaataagaaggatccataaatccagtgttacgaatggtataggaaaattggtattctcctgcactgttgattagagtaaaaaaatgtgtgtaatcttttcaggggatggtttggcttgaactgcttctagatatctgtcttagaggagggattttttgctcactgaggcatgtttacatatttttttagaggtagtgatttttaacctttctagcttgtggagcccttgaagattccagggaagtccatggttgtgtaccgcatgagaccagggctgaaaatgggtctttcagcacatggttgtagatggaaccatagaaatctgtctgatcaatgaactgttgaagtgatggacactgttcagtgaatacatgtaccacctttggcagtctttcagggggcttgcagccctgctggaagccagattcatagttccataaatttgtttttcccccttgatcagtcatctgaccaatgctgttggttattttaagggatactgaataataataataataaaaaatcccggtggagcaatgcaacgtattttctcctgtgtgggaaataactcattcattcattccatagtcatttaatgagtgcctaccatrtgcttagctttgtaaggaccctcccagtgggagaggtcatgatacaacatccagaagaaccttttgtaaggggatctccaccagaaatgataagatgacctcaggaacagaagagctsttttaaagaacagatgttctagaccagttgacccagctaaccttaaaaatacttcactgtagaggttctcccaaggacactaaagggtgtggtttggatttatagaactcagaagcgtttggaagcctttagttgtttyggatgtgtgttctcagaaatgttttgcagcaacctttttcttatggagaaccatgatgtggtagcattcagctgtatagtgcaaaatgyagttttccagataaaagagcataacttgtctttgtgacaagctttcttggaggtctctggctgggagaagaggagggaatacaaccaactagatctacacctgtgttaattttgcttagcttaattgcaaattcatgacgtcatcatttccccgaaaacatgacgaggtggaaaatacaatatcagaaatgaggaaagaactctaatggtaactttggttgagaaagtaacaaactatatttcaggtttcttgtatttcaaaatgggagacatattgctgattcctagttggttttgaatgatttataaccttttatttgtggctgagtgttgcagtctatgttgtcatggaaattctattgaatttataggtccatttatccaaaatgattttccagacttcatttcatggtgaatcatgtggctgttactcccaagtacaaagcaatttctaaaaagtttcatattacaaagagcacaaacactgtggtagtgatttttgtgtttttgaaatacaaatgagttccagatgcacctagggrcccctccccctccactgtgtccaaggcgttaagctccactgcatttcagaaccagctttatacatagaatagccatgcaagcaaggaaacgttgtttcattagaaaagaaagccattgcagtcacctcaagagaagttgaaattactggtttatgtgtatggacaaaagtgctctcctggctgggcgcggtggctcatgcctgtaatcccagcactttgggaggccgaggtgggcggatcatgaggtcaggagatctrgaccatcctgctcaacatggtgaaaccccctctctgctaaaattacaataattagctggatgtggtggcacrtgcctgtaatcccagctactcaggaggcggaggcaggagaatcacctggactcaggaggaggaggttgcagtgagccgagatcacgccactgcactccagcttggcgacaaagtgagagattctgactsaaaaaaaaaaaaaaaaaaaaaaatcaactgctctcccagtttcaagctccctcacagcagacttgatcctccccctcaaggttcagtagtggtgtgaaagggaaagaaaaacaaagkgctttaccatgcccactgataatgtttcatgttgacagggggtgtaggrcagggtttctgcatctcagcactatggacaytctgggtggataattcttttcttttttttttttttcttttgtcaacctccaaagcgtgagtaggcacaggaaactcccatgatgtggggcactattctttgcattttggggtgtttaggagcacccctggcctctacctgctagatcagtggtccccaacctttttggcacgagggaccggttttggggaagacaatttttccacggaccttgtccatggtggcgatggtttcaggatgagtcacttgcattgtatttattgtgcactttatttctattattattacattgtaatatataatgaaataattttacaatgtataattgtataatgtagaatcagtgggagccctgagcgtgttttcttgcaagtagatggtcccatctagggatgatgggagacagcgacagatcatcaggcattagattctcattaggagcgtgcaacctggattccttgcatgcgcagttcataatagggtttacgctcctgtgagaatctaatggcatcctgatctgacaggaggcagagctcagtcaataatgtgagctatgaggagcagctgtaaatacagatgagggggttagggacctctgtgctagatgcctatcaccccctcaaagagtgacaaccaaaaatgtctctagacatggccatatttccactggggtacagratcaccccatgttaagaacactgctctggaagctttgtactaggaccctagagagaactaacaggtagtgctcattgctaatggaattctggtgaggatgttgtgtggtagaacagttttaagtaagtgggctctacaagcaaatgcctagatttgagtcccagtgttaattacttcttagataagacctactatctcagccttaatttccttctgtataaaataggaaaaataagagtatcacttctagaaaatagtagtattgatttaaggaattaattgatgtaaaacgttcagaatcgggcacatttaaacaaccctcctgagtgctttatgcttgaggctgcctcaggggaaagggtaggcaggggcagtgcctggctcttgtaatagttattgggccctaggctggagggattctctatgttaaggccagtcactggaacttgctccgtcaagcmggtaagttcaatctgaccatactgtcagatttaaagtagcttatattaaatggaatgaatgcaaaacagggcagtaaactcggccctrctctgttttggtttgtttgtttgtttttaattgaagcagagtctcactgtgtcacccaggttggagtgcagtgatgcaatcacagctcactgcagccttgaactcctgggctcaagtgatcctcctgcctcagcctcctgagtagctagaactactggtctatgctatcatgcccagctagtgtttttgttttgttttgktttggtttggttttttgagataaggtctccctatgtttctcaggctggtctcaaactccttggctccaggagatctcaaaaacatcctggcacccaartatatgcctcatagccctagtgtgcaccttaggttctactgccccaaaacttgggattcctgccgtaaagtagttgaagataattccctgttacagggcaaatgaaaacaggaaataattaaggattagtgtactctgtgattaatgatattgcataaaggamgtgtttgagaatgtttatttaaatgccaccttgcctgcaaagatacccgctacctactattcttcagagcttggttcctctaaaaatattcttccagtgaatgccacacactggtttctttgccacaccctgtggcatgacttcttgggatgttggctagcctgtggaaatggtttatttgaaccttactttaagtatcccttctggtcatraagaaagtcatcaggacatattgtaagagaaaaatgagagctgtttcatcagtttttacttctccaaagcaagcgcttagygaaaatgtattacaacagccccttgaggtgtgagtattacctctatttcacagaaggggacactgggccttagaaatctccaggctcttcaatatacaaatccggtcttattctatagcaaatactcttagatcttcatctaatactgccaactttatggatatttttcygtaagctgtaagagtgtgaactgggctgtaacaggggctacattctccaaggtagaagcctgttagaaagaagtgagagaagatgatagagttcagagctcaaagaagcttaaaaagtaacggagttgcaaaacggttttataatgtgatacacagacagacatacctgtgtatgtttgcttaaaaccggtaatgattttagggggtgtattagtcagggttctccagagaaagagagccataggatcgatgtctctctctctctctctctctctctctctctctcacacacasacacacagacacacgcacacacgcacacacatgcasgcacagcgtaactccggcctataattcatgaattttagctaagttrctctagctaarttgatcttgcagtcttgagttcaaaggctggaaacctgagctcaatctgtgttgcagtgtagaggcagaattccctcctcttaaaaagacctcaggtcttcagctgattgcatgagacccacccacattatagaggstaatcagctttacttctaaagtctactgatttaaatgttaatcacatgtaaaaaatactttcacaaaaaataacaatgatccttttaaaaagtaactaggaataaaaactttgttcaataggataaaacaaaatacccagagtgtttgtgttatgtattttaatgtaatatgtataatgtatatttatcatttttctccataatttaaatgaatagatcttcttttgttgaagtattaaaattttaggccagagttacttagacaatggtttgactttcttgtgaattaaagagaaagtaacataatctgtatttagcagaaccatacctggagtcacttggccatttcacaktgattttggcttgtatttgcacctttctgagcatttactccagcagtttaaattccttcattctttcaatatcttgagccctccttgccactgattttgttatttattccaagagatggcatggattttgttagtgtttatggctttatcacttggctgtccttgcttcaagccacttagagctcccactcattttattcattccagaaataaattactagtatttacaatgggcagcactgtgctagggacacagccttgcactgcacagacttacgtcctgcgtgcatacatctttctgtctacaggcaatggcagaattagagttagagtgtagtgtgttgagtgtgtgcgtcctggcctccttaatactagccgttacaaaataatttaaaaatcatgttagattaggagcttattttacaaaatgcttaactctgtcatcatcctacgcatgtcatcaaaaaagcagaactggcagattcactgtgtttggatgtttactttgccttcacttcacatctttattcttaggcacctgtttcttgtccaccaccacgttcccactggcaggttaacaccaagcttgattagaaaaatacrtttcccaggtttgtcaaagtaacctgcacaatgtgcacatgtaccctaaaacttaaagtataattaaaaaaaaaaagaaaraaaaagaaaaatacatttccacctcctcagttctgttgtctgctgcctcctatgtgatttttaattctgctgttgcctttttggttaccctctttatctcgtcctgtttacgtctcatctccatctgttcttttctgtagcttttgcctgtgtgttcttccactttaataaaaatccccagcagtatcctggaaatgtctattgagtckttcagtagattgccttccccctgagctatctgcatgctgtttccttacttactccrtcatgattttttttcttggaccatgtgtggggggcaygtgggagaaatcgctttttgagaggaaataaaacgtagagctttctaaatctgcatataaattactgttgggttttctactctcatgttgggatcatttccttttgcttccatgatcacagcaaccagggagctgacttaggcacacaactataatagtaggcacacaacacaccttctgggaaatgccccctcctgcccattgcctgtataaatgtagtatttgtttaatagatgcctcacttgaccatgagccactcattgccttatgcttttatttcgtgatacactcagtcagctttggcactcaaaaataaagttaaccttgtctcattaatgatattttagtcttcctaagtgcagactgtatcttcatctgtcatggtgccttacagacaataggcattaagcaatactcctgccaattggaaggaagcacagtgattaagatcttgaactctgagatttgaaagacaattttgaaatataatttttctgtcccaaccccactttccttccttaggagctttgtaaatttcaaattacaaattttgtaaatccttagtttccttgcctataaaatgagaatcgtacggatacctatctcactgagtgccaatgaatcatagtacagtacctagcatacagtaggtacttactaaaggtttgaaaaacattaacaatgttttaatatgattaaaagtatcaaaggctcaggttttcagatttgttgctttctattcattcaacttaacatggacagtgacacatgtaggaaaccagacatatacacatttgtaaagtcaaactacaactggaattattttaaatgtaagggagaagttgcacaaggcaggaggaaagggaagctaggtggacattttgttgtcactttgtatgtatcacactagtaccttacaacagtggagcattgactgttgtcaaccctgtactcacagtgtccttttcacctccctcccattacttgacagtattgggattcatgcaggcatttgccatatatgtattttaggacatgtttcctggtcgatgatgatgcttttaatgtgakttgttttgcccctgtaaaattccattttccaaatgtcaaattatgctatatgatactctatgttatccatcaccttgatctggctagaaaaacacctggagggttttgcagtcaagacattccacaaggcagagttgaatgatccatttgggctaatgactctcacttacgactttgaaaaatttggcagaactggtcccatgattgtgccctggtgcaagcagtctatcggtggctttttaattgagtttcatagagtttgtttctgtgcttgagaatatatatgtgtatgtgtgtgtgtgtgtgtgtgtgtgtgtgtgttttatgtatatcatatatagtatctgctatctcatggaactctacatgatgaaggaatgtctgtttatacaggattgattcaactttccttcccttgcaaaagagaggcctgcttggaataggttcatcgacctttaagctatatagttttcttaaagaatcaaacccaaagtattctatttcaactatgtttggaaaatactgagttaaagttactaagtcttcgaataacctttgaaccaggacttaaatggccaattctagggatagggcagggaaaatgtaggatgagcccaaaacatctgtgcttgataggagttgctaaaaaataaaaaaataggagaacgtggcagagtgacagggaaatagttttgaagggtctcctactgggcaaatstgggacaatctgagcatcaaaatayataatgttagtaatggaatctgatatctgataatggattgaataaatagaaacaaaaataaacaagtccatatggatgtaaatgaatgaatgaataagtgaataaactgcagtgcagggaaagcaattccttactctagaatgccagtaatgaatatagaaggaatggtggagttagaaagtcacccaaggatactaaagtagtgagtcaacattaaatgaggagcaggatatttatctcatgccaaagtatctctctacaaaatactttttaattatgaaaggaaaattaataacattatagtggagaagcccaatagatagcaccttagccacatgatcaagataaatacctccaatagcgggataaacccgcataaatgtgcttgctgatatgatgcacggagaagatataaattttttttttttgagactgagtctcactctgttgccgaggctggagtgcagtggcgcaatctcggctcaccacaacctccgtctcccaggttcaagtgattctcctgcctcagcctcccaagtagcctcccaagtggcaggcacctgccaccgcacctggctaatttttgtatttttgtagagacagggtttcaccatgttggccaggctggtctcaaactcctgacctcaagtgatccatccaccttggcctcacaaagtgctgggattacaggtgtaagccaccacacccagctgacaaacctcaattctatgaaatttctgccctgtacgcttccaactgtcagagtaaagaaagaggctcagtaactgttccggatgaagatggggttggaagaggtcagtgtaaaaagacaggacaactaaatacaaagtttgatcctagattgagttctggactgagaaccagaaaatgatctgtaatggactttatttgggcacttgccaaaacttgaaaatggtctgtgaattagataatagtattgtgttaatgtgaagtttggtaattctaataattattctgtgattatgtaagagaatgtccttattcttagaaattactcacttgagtatttagtggtaaaggggcctattatctcccatttgctcccagatgattgaggaaaaaaagtgagagtgtgtgtgtgtgtgtgtgtgtgtgtgtgtgtgtgtatacagagagagcgcaaaagaggtatagtataaataattggtgatactgggtaaaggagatagggaacagttaatagatccctttattgctggattttccagatctttttttctttttttcctttcttttcttttctttctttttttttttttttttttttgagacaggatcttgctctgtcactcaggctggagtgcagtggagccmtcagtagcctcaatagcctcaacctcctgggctcgagcaatcctctcacctcagtctcctgaataggtgggactacactcaccactcctggctaattttttgtagagatgaggtctcactgtgttgcccaggctggcctcaaactcctgttctcaaccagtcctcccacttggacctcccatagtgctggggttacatgcatgagccacattgcacctggccccagatcttttcttcagcttacgtacaccacgtttcttcatagaaggattgctgtagagtgagcatcacttagattaacattactagaaagaacagactttggggaatattgaacggagggctctgggatctagagcccagaatgttgaagggagggctctgggcacagttcattttgaggataaaattgatggtagctaccccaaacacctgccaaaggtgtttttggaaaatagtttccagcctctgtccaaacttggacatcaccaccgctgacaaagtatgtttcaattcacgcatgtccaattcactcagcaaaacctcatctacttattcttacattttagacacttcaaatattaccgtaatttgttaggctacaacttgagaaaaatagtaagaaaaatagatatttcagacctgtgctactgtcctttttatgagacattttattatccagatgggtggagctgtgacccaaacacattttctaaaaatgtatttttttacccacttgtaaatgaaaatgcccttgaagaggtcttaaagtattttgtatcacacgctattcgggtgatgcattaaacaatgctgctcctgcacatgggctgaagtataagaaagccttctgtgaacctacttaatttgagggcctgagttttaaaaagaaagtgaagtgtaattttctgaatacacctgtgttaagtttctttcttgggttagtagtattgtatccaaagcaattcacctaatattaaaccattctaatctgtaccttattgaatggatttttctctaaaaattcatgatgtctaaagctgtccaaaccgtaaggcaacacatttgtaagaaactgccagaattggtgcaaatttacagtcttaggaaaaagaattacctttaagaaagaaaactctccaaaagaaaactacccatccttctcccatgtacttaggtatcagaattttcctaggaagtgtcctgatttgggctacctgattgccctcttcacagaagaaatgccgttgtattcttagcatttgagttaattcagtcatcagaactctgtttacctttgacctatatttagcttttccttctgggactttattgttcaccgtcaaatctctaaatctctctggggtgtggttgttcagtctattacagaaaatagcatcacgccttttggaaaagtagggaaatagaggtcatgaaagaactaattatatagaagatactgttttctgtaaggagtaccatcattctagatgrttcagtggaatcacactcttactagaaatgttaagatgtttgccaaatgttaatcttaaaatatgatgatgatgatgatgaccaggcgcagtggttcgtgcatgtaatctcaacacgttgggaggccagggtgggcggattgcttgagctcagttactctaaaccagcctgggcaacatagtgagacgctgcctctaaaaatgtatatatatatgtataaaaastagcccgatatggtggtgtatacccgtagtcccagctgcttaggaggctgaggtgggaggatcgcttgagtccaggaggtcaaggccgcagtgagccatgatcatgccattgcactccagcctgggtgacaaaatgagaccctatcttagaaaaaaatacayatgtatatatggtgatgatgatggtgatttgttgagcatcgatgaggtctaaccatggtgcttcatgttatacactacgttaacttatttgagcctcacaattagcccagtaagtggaaatacttgactttatgcctaagaaagctggtgcttgcaagtaaggaagctggaataggaacccaggtctggttttttttgtttgtttgtttgtttgtttgtttgttttttaatcagtgtggaggcttctggggatacccaatggttcatttttgttctctacatcttttttttttttttcgagacagagttttgctcttgttgcccaggctggagtgcaatggcatgaccwcggctcaccgcagcatccgcctcccaggttcaagtgattctcctgcctcagcctcccgagtagctgggattgcaggcatgcaccaccatgcctggctaattttgtattttttgtaggaacagggtttctccatgttggtcaggctggtctcgaactcccgacctcaggtgacctgcccgccacrgcctcccaaagtgctgggattacaggcgtgagccactgcatccaactgttctctgcatctttttaaatgtcaaaatgtgtgccagcattaaagttgtataatgattctgagttgacttacctgtgttctgctttttgaataagaaattctagtcaggcccagtggctcacacttgtaatcccagtgttttgggaggctgaggcatgcagactgcttgaggccaggagtttgaaaccagcctggacaacaaggcaaaaccctgtccttacagaaaatacacaaattagctgggtattgtggcatgcacctgtagtcccagctactcaggaggctgaggtgggaggatctactgagcctaggagatggaggccgcagtgagccgtggtggctgccactgcattccagcctcggccacagagtgagagtgagtttgtttgtttgtttaaaaaaaaaaaaaacaaaccataatgctagccaaatgtaagagaagatatttaaggttgggatgaaagcacatggattttggattctctctgatgtgtaatagtaggcaaattatcgtcaaatttctgaagcactattttctcatctatagctgagtatagtaatttctgccctaattttttttacagggcttgttaagaggattaagaaaaataatgtgtgggttagctttttgcaaaaaggtggttaactccattaaaattttgcttcttaatagggaaatttcaccatgacctggctattagaggactagaaggcattggttttacttattttgggtggcatgaatgcattgtagttatgtgaaaagatgggatatattctgacatatctaggggtaaaatgacatgatgtctgggtttgttctaaaatacgttagcaaagggccgggtgtggtggctcatgcctgtaatcccagcactttgggaggccaaagcaagcagatcactttaggtcaagagttcaagaccagcctggtcaacatggtgaaagcccatctctacaaaaatacaaaaattagcgggcatgatggcagttgcctgtaatcccagctattcggctgaggcaggagaatcgcttgaacctgggaggcggaggttgtagtgagctgagattgagtcactgcagtccagcgtgggcaacagagcgagaccttatctcaaaaaaaaaaaaaaaaaaagttagcaaaggaaaaatatgaacaggtgaataaatttggcaaaatcttattagcaactggggaatatacatttatggtactattctctcaactttttatttatgtttgaaaattttcctaatacatttttttaattgttcttacagatgcagattttcttttacaatccagatgactttgacagctttcaaaccgcaatttctgagaacagaataatcggagccatggccatattttttcaagtaagttaacagtggctgaagtacttcaaagaattctttgagtattttttttaatttgccgaattgttccatgtttaatgaatgcatctgttttctagttcacacctgtccaaatgaaagatatttcatattgtctaatgtgtgatttaaaatgtaaataagtatgtttagaaacataatgaaaatttttgcatgaattactctgattttattgctacttgactggtgcacagattgaagaacacatttatcatctaagttacttcgccgctgaagcattttgaacaggttccttcagcatattaagagactgatataaaaaaaaaggtgtttttttgagcaactttaaaatttgacattacttgcaagtaagttaataaatagcatccgtcacttttctaaagagacsccctctctttccctctcagaaatccccatagtaactaaagtttttgttgcaactatctctgtgttggtacatttatraactcttatccttctgtcctctcttttaatatgattgtgttgatgaatgctcataactcagtgttgattctgcacctagaatcccagcattgcatcctktgataaaataatgctgttcaggctttttaataagtcaaatcaaagtagtgttgatcagtgagtgccttgaccaacttgcctgtaggagaccttggtgctttttagtgtgtaaggtagtctgagtagtaggcatctgtggtttgtctttcaatcttaaagttgacctagcgactacataaaggtgttcatttcaccaatgagtctctgttggaaaatgaagtctttttgacaactaaaggaaagttaaagacrtaagagccttctccaacacgtctttgacatctgcctttttgagcaagtttgtcattgaggtggagccattcttgtttggagtatgttaatttcaccacccttttcaatgggtgacacatgagtgacagttttctcccttttaactacatttctccyttttctcaagggagataaaggctcaaatgagagatcagatgaaaatttgaaaagcttgatattctacctagaataagaacaatggttgccattggtgattatggcactggttttcaaacagtgggttctatcttactgttgagccatgaaattatttcagtaagttctgatcagcattttaaaaacagtgacgtaaaataatatagaataggaaataagtcagaaaatatccgtaaaatatagtaaaggtaaatgtatttatagaatttgtttatgcacagtaaagcatactgggtgtatgctgggtcatgatataatgtgtattgcttactgtgggtcgtggtcaagtattttggaagttgtctgtttatgctatgtattggtctaatttgcccattgttctccaacacatctctttttcctcattacttttcatgaacacaatagagcatagtgttttaagagcttattcactggagtcaagatacttgcttttgaattccatgatttctrcagtgtaatggtaatgtagttatttaaacttttcaatctcagtatccttatctgtgaagtagagagaacagctaatacatcatgtagattgcagtggtaattaaaggacttcctagtatggctcctggaacatagcggacacttggaaattcccaaatagtatgcatctatagccctccatgtttctgtgggatggagaccccatggtatacatattatctttttatgaacagaagtatgttctggacactgccctgttggcagatgacttgagttctgtctggaccccttcggttcwttttttttttttttttttttgagatggagtttcgctcttgttatgcccaggctggagtgcagtggcactatctcagctcaccacaacctcygcctcccgggttcaggtgattcttctgcctcagcctcctgagtagctgggaattacaggcatgtgctactatgcccagctaattttttttttttgtatttttagtagaggcagggtttctccatgttggtcaggctggtgttaaactctcaacctcacgtgatccgcctgcctcggcctcccaaagtgctgggattacaggtgtgagccactgcgcccagcccccttctgttcttaaactgtgattggtttgygtttggtagaactgggaccacacaaactgctcttaaaacagttcccacatgcctggctaacacctggttttctgtcatcgttcccttagcatgctgcttttcatgcagctggacctctgctcctgtggccctgccgtcagatgcaccctcgcttccttctctgtcatgccaacctgtgctcagacctccaagattctacttcatagggaacctttcttaaaagaaaatttaaaaaaaactttttaatgtttttatgagtactggaaggactagtttatggcatgctctacccaaacactttctatttttttcagctctataaactcttgttaaatataagaccaattagaattttaggcaggcaagacacattggtgtgcaaatcaacaaaatacctcactgtgaaatctaggttttgaatttttaaagtatttcgaggacaccgctactagtttgcatataaagatatttaatgtacacttcatttgttaggtccttttctaaatttggcttgctatcctaaagacacaaattagaggtcagatgataaaaaatagaacataattagaggccgggcgcggtcggctcacacctgtaatcccagcactttgggaggccgaggcgggcggatcactagttcaggagatcgagaccatcctggctaacacggtgaaaccccatctctactaaaaatacaaaaaattagccgggcgtggtggcgggcacctgtagtcccagctactcgggaggctgaggcaggagaatggcgtgaacgtgggaggcagagcttgcagtgagccgagatcgcgccattgcacaccagcctgggcgagcagagtgagactccgtctcaaaaaaaacaaacaaacaaacaaacaaacaaacaaacaaaaacataattttacatagatagcagctgtattaagctgcttcctttgtccttcttatttatttatttagatacaaatctccctgttgcccaggcggaagtgtagtggtgcaattatggctcacyacagcctccaactcctgggttcaaggggatcctcctgcaacagcctchtgagtagcygggactacaggtgcaggccaccatgtccggctaattttcttatttttttgtagagacaaggtcttgctttgtggcccagcctagtctggaactcctgggctcaagtgatgctcctgcctcagccttctaaagtgctgggattataggcgtcagccactgcgcccrgcccctttgtctttcttgtaagcacacacgtgcttatatgcttgaattctcactatgtcatgcaatgcaaataaaaaaaattgttacttcaatttggcattctagttagatctcattttttaatttttttgctctctataagaatgataaatttgagagtttgatatttcttcccaaaatagagaaatcttggtgtatatttccaaattcaaacctggcatcttacattttagtattgaagaacggtttgtcatctattcaacatctattcgatgccaggagtggtactagtttctgtgttaagcataataaacacaatcttctcctgtgcactagaacctcactgtcatggtcccacaaataacggccaaaaagagttgaactcctctacttgtaaaaaggctatrctctgacttggtgcttataaacccacatattcattattcagagtgacacaaagagaatgacccaaaagcccaggcctaggcaaggccaagttctgcagagataccagtagtccagatgctgatttacttcatgtactagaataatttttttttaccatttcaatttttcactatccatgcttctttttttgttctcaacatgtgcccattattcctggtaattttggctttctstctgcctttgctgtgcttagatatgaagttcataatgttgccccccaaaagcaccaaaataggcacaaacctagcagacatctggttgtccaatgaacycttacattggcctagagtagtggttacttgcactttgccccattgtggctcacaggcatgatttgttgaatttacacagtgtttatgattcttttcttcagttaaatatggaaggttttacacaaaatgtcttgatgatgtagcagtaatcgagatgtgtctagtggctactttggagggagtgtgtgttcccattgcaacaaaatcatcaagcagtcttattcatgtgttcacatcaacgtgatcttaagatcatgatgactggcccggaccccagtaactctgaatggcagctgatatattttggtaayggataagagttgagggtcagtctcagtgctaaaaggtgaagagccwggtctgctgttgagcacaagtgaaggaaggaasaacaacctccatgtgtggaagacggtgaatcagggcagccacatcttggcccagacagctctagaaggtgcgctcccttygtrgccactggttaagtgtaatattataattttccatcacatggtagtaatgtgtctggaggaaggatcacctttttctagatcatgcagatcacctttgggtttgttccctatcgaaagcataggggaacaagtaagagtaaagtttgcttttaaaggatttaaaacataaatttaaaataaaaatattgtcaagggatagaggaatttgttgttaaaacactcaagagaataaatacttgtttagttgatttatgtaagtacagaaactaaaataattattttttatttgttaaagtaaaacttctgttctctactgtyaacctaatttgaatgcctgtgaaaatataaaatatcagaagttattatttggttggtgcaatagtaatcgcggtttttgccattacttttttttttttttcttcctttttgtggagaacggggtctcactatgttgctcaggcaggtcttgaactcctgggctcaagctgtgctcctgcctctgcctccctaagagctgggattacaggcatgagccaccgtgcccggctttgccattacttttaaaggcaaaaaccgcaattacttttgcagcaacctaaaatgctgtttcaaaatattgtgtgattctgataacacccttcatggtttatctggtgaaacaaataaatataaaaacccaggtttacatgaaatagaatcagtggaataattaggcaatttgtggaaggatactttgcttttaaaaactgtaattcacagaacaatttcattggtttctttttaagttggtagaagaaagagtacccaatacttacaatgaccttatctttaagtagtcctgttcttttgaggccaagaatcttttatcgtcaccctcagaattgggttctggtgtttctcccttggcttccgtctgtttcttcaccattaaatgctttcatctactttctcactaggaccaaagtgtcttttaaccatgcaaccttcttaatggatttcagtcagatgcacatagaagtttggtattcctgttctttatctttggttaattgtgttttttcatgaagtatattgttattgaatttattatcttaaggggaacatctcattcatttcattacccagttgccattgtcatatgaatgcttgaaatttcatttatatttcattaattccattgaactttggaatcataaatgcatgattcttcaagagcatctacaytaagaaacgtttcttatgtgacattgtttccagcctcctttatggctgtggtcagttctgaatctttgcatcagaaacaaagatataaaatgattgtcatgtctgtatccagagatctagtcaataggtatatttctgaatacatttaagaagtaaktgaattgcatctgatttattcatcattcttaaactatttctttttgacaaactgtcgtcaccaactctactgcagtttcctcatttaatgttctccttctactgggagagttgagctgccttcctttgtaccagttttcatttttatttaaattctacccagaatatgactgtagtcctttggtttttccctcaggtctgtagagtcatttgcccccttttcatttctgcccttctttcatagttgaaaggaaacttcagaactcaaatgctttgcaagttgcgaacccattctttatatcatgtcggtgttacagactgcttaattatttttctccatctggagaggcttagtaattaaatgaattgcagcacctgggattatttatmgacattgagaaggcaggaggagttcttgatgactcatccatccagggctggcgaggaagcctttctctccacttccctgcatttcaccttccccctccttccccaccataggtagatatgatctgtccttcctttgacccactctgacttatagcattccatcttgtattaaagctgttattttacttgctttcttctgcattaatactgtgagatcattgaggcttgagagtcttcattcatcattatgtctcttrcacacggctaaaactgtggcttgattgtgtaaatacttagctgaatttcatggaaacacatttaggctccattgtctagattggaaagggacagcctaatagcttattagctacaaattataaaaaataggcattagggggtagagcctgagactactagagtataaactctctgaagttgaagtctgtgtcttgttcctcttctttttgtataccaccaacccacctttccctagccctcacagtagtgcattgacctcaattattgctcaggaaatatatactaagtaaaactgagttaaaggaaacctctgtgttttatcacattattaattatttgggtttttgaaaagcatrtatctagatggctgtgtaagcgtcacccaaaaaggwtgctgtttgtgtcagaagtgtaagattcttgagctggtcaaggacattgaacatgaagactgtgtaacgattcattgaggttggtacctctctttcctggggctccattggatcaaacatgttaaagggatgcatctccattcyatagtgcgttcagaggccttaaaggactgttttactgtaaagagtatctgggtgtatctttataaggtttcccaayaaaatgcgtttatctcactaggtgatgagtgaagagggttttttggatcattttgctaattttctttcccrttgtctctgcctctttcttgcatttttctttactagggttcctctatgatagttgatgagttagcttctgtgtgttttagttcatctgttaactttttcttgctcttgctattctttacatgtctatgtttttctgcctctttcccccctttctccttcagattttctaagcaaacaatgtaagattttcttgcttatgtattcattcttgcattcatttgctaactcatttgttcactctgcatatttcttaagcaccttctctgtgccatgctccatggaaatcatgaggtatcctcagaattgtgtcctgccctcaaagtarttgagggacagtaagttttcagaagggccttaaaattctytcttcaaaagtagcttcattttatctttgggagctaggggaggacagatcaagtcaggcagataaaatctcaagagaataatgcaagaattatrtcttatgtatatttttaaaatgataaatatttcagtttgagagtatgaagtttcgacttgtaaattttagaattggactcttctktctccatttttcttctgttctggtataaagcagaacaccactattaaagtataattcattccttttatttatggtgacctaaattaatctttttattctttttaactatcccaaaagagtctttttctttttttgatgaagaataaattttctatcgtgttatggttttaattttttttttttcttttcatggttctgatggcagtgtgaaacaagggcctttaactctggagagagagagagaagggataaattagtaattttacccatctaccaaattcccaccctaaccccagacccccagaaaaaaacamgaactatttttgagtctgagaaaattgagtttgtgttggagaatggtggtagattatttagaacttccttcttagactgctttacaagataatgacggtaaamtaatatgattcctaatttattcctttccagttgctgctgtttgaatatcgtccttctggcattttccacatccttggttttatccagatataagttcaattctttcactacattacctagaagtgcaatttcagaatgttttgggttgattaagaagacttttttttaatccacamacaaaaattaaaatacatatgttccaattaaactattttaacagctaattgatttcataggacttaccattaagtgaaggccagagtcattcttaatgttcaattgcagttttggaatagatttgtggatgtacaacattgaatttatagcctatcaggtgttttcagcacatctycttctgcaaatggcctgtaattcaaatttcctcttagtggacattacagaggactatttaattattggcgaagcattacataattaagagactttgaattctttgaatgtgaccatgtgaaaatctatttaaattaaatcattgcacttcaaggacgttaccaagtactttgcttttgtacatcattgaatgatagtttaaaattgttttggccattagttttcatgtaagtcacagaatstgattttcrtaaactcagagaagatcttaggcactctgtagtaaccttactatgacagatgacaggcctgaccctctgaaaggttaagtgattgaccgtggtcccctagctctttgcagtctgccaagccaagaatttgagttgtgtgactctcaatccagcgactttgttttttcctagatttggtcttcctggaatatgacctagtaggatgctttagctgattagatttatcgggagaactcctgacataaagcactttatattcacaaccgttcttacctctctttcctcccccagataaattagttgcaagatgtttctaaatagaayacaaacaccactaataaaagttaacatttgctgaggacttaactgatgtaaaatgctaatgacaactactatacagtgtctcacttaatcttcactgggacccctcaaggtrttattacctccattttatagatgtggaagctgagacwtggagcttttttcagtataaattactcaaaattacacaggccamtaagtgttggagccagcatttcaatggcaaccatatatctccagggtctgtgctctcagtgaagaactgaatgggaaaagttgggttttctgttgaagagggtagagggagaagtatatattattggtcccagttattgtcatctgcatataattgcsttcaggcctctcagttttgctgatagctgaagaggtattttcttgtaacttaaaattatgttcttctttttgtccatagttacaatcttcgatcctaaattatcttaggctgtgtgtctgtaattattttatagatttgatgacatcttttttctttagtttcctcccttttataaaaaggctataaagagtatagaataaatgctgtggttatgtaagcatagtgtgagtgaatggggtaaagatttgaactttgaattgaatgtattaaccttttaatggcagcagttctgaagtggggagggagggaatgggggttttgccccacaggcaatgtggccatgtctggaaacactttaggtgtgtcagggtagaggcactgctggcatctcacggagagtgcccaggaacgctgctgaacatcctgcagtgcacaggagagtcctccacaaccaacagttagcagcccaaaatgtctgtgctggctgaggtcaagaaactcagctttatggtcatcaactagctaagtgactgaagatatcagaatatcttcatctcggtagaggggggtcagttagggctatttgggttattttctgcaggccgaaggccataagaataactaataatcccagtcctaagaactccagtagtccctggstaaccaagacttgracaactgggattccaacataarktgcaaaacttgcatgccaaaatatttaaatctgccctrttcctacatatcctaggtttacctcygccctgttaaattaaagcacccacatgggtatttgtttgcagacactgcagtgatttttgaaacaagcaccaatttaatagaacattgacttagatgtagaaaagtaaacagaggtaagaaggtaagagcatgtayaaatgcttttgaacttgaaatcagcgagagctagtttaaaaaactcataggaagatcaatgaaactcccttgcagaggttgtaggagaacctgcttctgtaaattacagcactacacagtttccttagcattatagraggattttcccaggacaggattttaaaatgataaaygctggcttattttagagggttactgttgtctcttgcgaaatctttttactatctggccatctaggcattgagggccaggattattaaccatctttaactgtatgcatacagatgctactcacctgtgcccatttgagaagaactttacaattctcttttgattttgttgttcagggtttacactgaagctactgttttctctatctacagcatcttaacatttatgatatgtctcaacccatctgaagcccagaacttttgttctttgtcttttctggataatgcctgcctgtctcttgagtatccctgtgacccacattcccaaagcagatatcatgtacatcacatagattatattttaagacagaccagtctgcacagatctttctgattttatggaaatacatccaaccatttttacatgatgtgatggcaaacttggaagaaacttaattttatttgtccgtgtgagactttttatgattttccccatgttcctctttttctgttaacatcttgatcttggtaacaytgttttgctgattgtgatatttttcaagaatgcaactcctgtggtttgtaaaggattaggaaacggtctattgcaagaacgtccatgatagaaatattttatccttcctgccttttaacttgccataggtcagaatctcaatgtgatatagtaaaagacacagtagttggtgctcatatcatctctttattatgattgtacaggtgtcttytgagaaaatttttagcatcaaatccccgtttggggtctgttgggagctatgagcatagctgtgcattcactcacctcaacaagctggtacagcaaattctatttttcttggctcattgtgttctctgagtatgtattaagttgtatgatttttttgtgagtgtgcaaattcctaggtagctgtataaaaatgatagaagagagctaactaatttaggtctygcgtatttagaatttggatttgtccaaagttgatgtaagccaagaattacttatgcatttttaagaaggcattttattagacacatcaggactgtaaataaaattgcaatgggaggagttgctacctccatgtatcaactggccattgtcaacccattttatgtgggtatattcatttaatatagccctttggttataacagaggactcttatgtgttcacacaaatggatttggtgagagatacttctaaaattacactgtcagtaatttgtttgcaccacatataataaaatgttctgcatatgaaacaatactcaattctgactcttggataattcacttccagggacttctccatccatattactgaggtcttactcaacactgtgcagcgtattccctggtagcttggcatccctgaacaccattctaatgaggtttcagtgaattatttctatttttaggcactcttcaaaggtggctgccagacactagttctagtttttttttaaactgaaccgattatagggtttagtgccagatgcttcagaaatgcaagcagctarctaacacaaagccaatacctaagtcttttaggaaaagagatgaatgtttagggtcatatctgaacttagtagcacagctactcccccgctgccctttttaatggctgtcagaccaaagttttgtggtttctctctattttgaattttgtaagtgaaaaatgtcctcatccgactaaaacagatcagacaggtaaaatcccaagtcttctgaaaagagactttcagtgtctgactctctttgaatattaacaatagtaaaaataacagtaggtgatatttacggactctgctcatgtgtcagcgcctctgataattctgccaagcattctatgtgcgttatcccatttcatgctcataacagccctctgagaaggagattctgattctagaaccttccccagatgctaagagtccctttgattctgaaatccatgtctgaggtgttggagtgaggcgtctatgtataaattccaacttgccacttactggcttgttcctttggacaaatctattcaatcccatgccacttcaatccctttgtccataaaatggaaataccaatttgctgcgaacttcaaatgagataatgtctgtgaaagtactgtggagaggtctttgacccaaaaaacattttgatgataaaaatagttaaaataacaatgttgatgatgataattagcaacgactagggttaaaaaatgccaaaataaaaggaaatactttgaaccattacttccccataccatgaagtctgtcccaggacatatatcgcttcagtatgtcaaatatacacatcctcctggcctacttgcatgttgttggagggtgcttcagatctgattgcagttggctgtgagacaaagtcttaactagttgttattggtgctataactcagtaattcaggaggaggtaaccaaattcaaatttcctcaaggagcatctgcatgtctttcttactactttaaagaggagctaaagtaattagtcttaacaccttggatgataaaagaaatagatttaattggagcagccaagtcggctgagagagagacaagtaacacattgatatggacccagatgcctccagatggtggtgaggccattagaacgtaaaagggcccyataagattttcccctggaccccaaggaactgcttaattcctagtagtgagttyctctccagggtcaaagtcataaaacggggatcctttatgtggccctatgtatgctggaaatgtatcctttcctgtgagcttccttattagtgtctacttggttagagacaatgccagcagtgggatgtgatcgttggagattttagaatactagggcatgggaattattacctgttctggcaatttatttcattagtcccagtgtttgccgtggaggggaggtgggagttgagtgggagatgttattctcttctatatggggcagtcttgactcttgagttccccatggtctaaagggacgagatacccccatacagcatcccacctaccttctctcttgtgtcccttctcttgccttctttgttcatttcctttgcaatgttgtggaatcactatagtgtcccatatatggtggttcagctgctgttcacagaactgaattaaacgtggtccctatcattagggaggttaccccttatacatggacacacacacacacacacacacacacacacacacacacacacacacacacacacacaatctgtaaactccttaagacaaggaccggccgggtccagctgcacatgcctataatcccagcactttgggaggccgaggcaggtggatcgcctgaggtcatgagttcatgaccagcccggccaacatggttaaaccccatctctactaaaaatacaaaatttagctggccgtggtggtgggcgcctgtaatccctgctgctcgggaggccgaggcaggagaatcgcttgaacccaggaggcagaggtttcagtgagctgagattgtgccactgcactccaacctgggcaacagagcaagagtccatctgaaaaaaaaaaaaaaaaaaaaaaagaaaaagacaaggacctttgcttgtttggggttaatatcctcaatgcctatcacagagagataatgaatgaagacattccttgtgagtcagcttggtgaagaaaatggactctaaatccagattgctcaattaaatctcagttctgcccattagtaggagtaaaattcagtcaagtacacttaacctttctgtgcctcagtttcctcatttggaaaataggaccagtaataagagacctaccttggagggtcattttgaggtttgtattagttaatacgggtaaaatcaacaggtgactggtatgtagtaagtcctcagtaaatactagctctcattataatttaaacaatagcatgtgcctgtcatatgtgtagtgataaacataagttaccatgtacaacagttgtgcrgtgggaagggtcgttaacctgcatgtgtgagagaggaaaggcattctcacctaacaggtttgtgatgtgttactattttctgtttcttcctctccaaactcagtgggccgagaaagtgtaaaacaactttcctcartcatggctccacactggaatcactgagcaagctttaaataataccgatgctcaggttccacccctgggatttagatgtaattggtccaggagatggcctgaayatcggtatttttaatagctgcttgcgtgattctaaatagtgcacacaggttgagaactagcagagcttatcagagatcccttgrggtcccttaattgccctccatcccggctcctatcaggctagcttgctgcttaggcggttgatgattcatttaggccatactctggggastctagttttcttaaagagcatgttctcaactcctgaggttcatgatcctcccgccctctrcttcccagagtcacaccagtccaacttgaattctcttctcattttatagtgaacggcaggaagccaagtgatcagacgtgccattgtctgttggtttccccaccttggtttattataaaaagtagtagtaatctcacaggtggaggggagcgtggtcatttgtcccacctcattggcaccaaaagaaacccaggtatgagatttgctcataaggtggattggaggataygactggcaccagaggacggtatacgttttcatgcttcctcccttggagatgagcatgtggaacaaggcctgcctggcctatcaactcaggtacaagggattaggagcaggtgcatggttggcccatggacctgcatatactggaggctggaagtaagatcatcccctcgggctgttgcctgggaagatagctccagaggaaagggctgagcttgcttttccttttagtgaacctgcattaagatggacctatccttaccttggggagaggtagctgggggtagagagggaagaaagacagctttttttccaagcactttggaataaattagttttgctacaaattrctacatctggtgagagaggaagggcaagttcttaccttctctcttccttttcctcctgcttctcctattaccagtaatattaaggaagaaaactttgtttctgtgtgccagttcatatccattatctgctttgatgcctcaaacctgtaaagtagggacttctatccccarctgacaaatgaaaccaaggaacagagatattcaatgatttgcccagggccactcaactagaaaayggtaggatttgaagccatgtctttcttactctggaggctctttccctcttctgaacttcaatattaggctgcctcctaccctcctggaaactccctaccccctttttcttccaaagagtgtggatctagggtagggtcagccactccagtatatgtctggtcatcatcccttggtggggtgcccttgtgacaatacttaggacctaagacaattaggactttgaggaaaagtctttttttcagtggagatcttgtactttggaaccacttcttctgcaggtcgctctctcctgaaatctggatggtgctatggtcgtgagagcttcgtgttttccactagtccacctccagacattccgttgaawacctatggaatctcacttcaagctcatacaaattggttgttgacggttattgccatgcagctcccctggtcccattgcttcagtaaaagattttggatattctgtgccaggatgtaccaggctctggcagcacctgctgagttgctcagtacccagagccagttctcttctagtccarcgtccccactgaggctatccagggcctatgctgagaatttgtttctgcagtggaccagaaaagatgcttgtcttatgagactggggagagtagggaggctgatggacccctcagctgctgctgaaactttttagaagcccagaagcagttctgctcatgcctggctgtgttctgccaagaggcacttgcagatattcccacatcaggaaggctgcgacctgccgcaaaggagcagttgtatccacaggccgactgtgccatgcagaatggtaatctaccttctgtgcctttatcttccagagcagcaacatcataatcttctctctggctttataratgatgaaatgtcgcacagggttttctgtcaggcaaacatgtaaaatcagcctggatacccagcaaagtaccatgccttccattacatccttgttatgaaagcttcatttaaaaattcttgggtcataaagcgaagagagagcacggtgtaccatcaccagttgttaagcagacagtcttggtgtcagaggggactcttacgccgtgatgctatcagttacagagaatgtcaaagctgcatcccccatgtgaccttcagtgaggcaaaggaagaatgtctacaaggagatttttgtgaggtggtgtggttgcagcctcgctgtggacttaggaggctctctgggatacaaatgacrgcagttagaggttacaccagtagaggagatcacgtaccatcctgcgttctcaatgaaagaagagtgttactgtctcagcctgtctagcttatacatatatagtataacctggcctccttcagtattcattcatcagctatttcttgtagccaactgtatgccaagcactgtgctaggcactgaggctgacctgattagaraatacctgtgtggccttggtctttgtggacatcacaggctattgggggaatagaagtttatcatgtaaatgtgccaatggacatatgattcaacatgtgtgaggtctagtgagggaaaaagacattgattgctttgagagcatgtgatgagggtcaggtccaggtttgggggagtcaagaaaggctctctgggagaagacaggattcagctgaagttaactagagtggaaatyacaggctgagcagaggagattctcagctactagcaatagcatgagcaatggccccaagcaggagaactgagtgctcaaggaccagagagaaagccctcarggckcaagctagagcattgacttcactagaccacaaaaagagccttgaaggccatcagccctagacttttcttggggagycaatgaaaaactggcagagcaaggggactaacttggttggcattttgagcagataaggagcactaccgagagagttgagctggagagaagtaggggaggacacatgggcacccctttggcaaaaagaggagagatggtggtagctgggacctcgggaaaaatgatatstttctattaccaagattgtaaggattttatcttcttatataggaggaagggagtttgtttcaggctctgggagcatgcatttgaaccaacttggtgactcatgaaaataacgcttctggaggrtgaaagcaggtcagaaggggctttagaaatgctgctcactatcaggtttatagaaacactgttattgttttgatactggcaatttttctgagctcactttttgctgcttttctcatttgatattttctcctgtcgtctttatttcttgttttatgtgtgttatgtgagtgtattgaatgggctttctgctttcttctggttctgttttaattttggagagctggacaagggcatgattatgatgatcagctcatgtgtatgttttgccatgtgttatctctgcaaatacaactggctgctttccattgtaaatgttaattttgcagccatattgtaaaacctgtaaatccatagattgaacttcttgggggatttcgttagtgtatttctgcaaacagtccattgatgtctaatacataaaaatgacagtcagcatttatatagtatcayattattctctccaccctcagagtttcaggacagattgatgaccaggctgaaacctgattataattatccaaataaaagaacaaattaggtggatggttcctagctgcattgggctttaatgccaaacacattttatactcagttataatttgcagttccaaagacctcccatttaggtttcatttgtagtacagaaggatttttaaatgtacacagtttactagcccatcttagaaayatgaagcaaaaatccgcccatcttaaaagtgaaattatgggccaagctggcttaagttgacaacattagcaacccactgtcagaaacacaaagacacccccagccagccattactattatyacgcgcttaagcaaagggcaaactcagagtttctttggaaccgattgcctttgttccacttagtatcataaaggagatattggctgtaaaacctaatggtataagataggcttggtaaaggacgcccttttcagttccttcagatcttgctcatgtaatcttccagctgagaagtgagaatgtgactcctattaaatgcagttcaggatgttctgccaaaggcgatattactccagacctgtgtccgttccagcaaatgaaaacctaaataagtcccacaacagcaccgagtgttctctaaaggactgtggtctgacattttcacgtaaaataaactaacactcataagtaatggtgcattttcaacatgctcgtgtgacaggtatatgaacgcgattggtggtggggggcatatttttgggggcaagagaggactcctcattcacccttccccaagttagaaaatgccatagcatagtaggaatgcrttcaaaaaacaaatttctagatgatatcctgcatatgaaataaactccagtcttttgtaccatctgtatctagcatacttataaaatagaacaaagtgtgcatttttaataaagaagcatggtgttgattttcttcttcagtcctcttcttcttttctattattttataaggtacacaaagtatattatttgtttttaggaatattttagtggggcaacaagcatggccaaacattatctcgtgaagcactttttagaagaggaagcatttgagattctcaaaagcactttcagtgaaatgtttttaaatgcacattatgatgttaagaaattaacttgagttattaaagcggcaagtatgttagactaataactactaccatcatgctttcccaggtttgaagagctgctatcacagagatttaataattctaattcgaggttatcttcattaagaatactaagctttagaatgattgcatgactgataaaagaattagaaaaaatagtttaatatcaatttactcttctatagggcttgacaatttatcaagtgcctttacctatattacatgatttgatctttaagaccagtacaagccctccatatccttgggttctagatttataaattcagcccaggaattgaaattatttgaaaaaaaataaaaaaaaatacaacaatatgaaatcatacaaatgaaaaaataataccatggtttgcatatcacttacattgtattaggtattataagtaatctagagatgagttaaagtaagcaagaagatgagtataggctgtatggaaatactacaccattttatataagggacttatgcatctrtggatttgggtatctgtggggttcctagaaccaatcacctgtggatastggggataactgtgggcaaataaggcattgtcaattttatcccaccctccaccttggccccagcttttattctggccattaaaaaaaacagagttgggggaaaagatcagaggttaagtaacttgcccaaggtcacatggctggaactggcacccagaccctgtagcttttatttctgtattctttattrccttccaggaaacctggtttttctgtagtagttggccttttcttaggttttatgagtggacaggttctgtgaatattctagaagacatgctaagtatgtttatattttctctcagaaagctagcagagtctggtatcttccaacctttcatacttaacatctccttgttaacagatggtagaactgaagggaatgcataaacttgaagggttgtggtcacagaatatgttctgactccagatataggggtgtgaagtgtaggatgttttagaaacaaaaggcatatcgtagtgccactagacagacacattgtgagatgatgcatttttgttgtaatttagaatttagagttgtttgaaacaggacgtatccctgatgcccacctgcctacacatatagttgcatttcttatttgctcttgaaattcccatgtttaggaattttcaccactggcactaaaagtggggctcttgtccaggatttgatggtatgaggaagatttgcctgaatttgtgactcagagtaaagcaataaaatccagaggtccagtagttgaagattctcataaccatctatttctgcctcaccattaattctggtgtaagcaagcccttactgtggaatgtcattttttgattccttactaaccgtcgctacttcctagtctttcaaaatggtattttaggcctgaaaattaattctaagaaaatagttcaaatactagaaaagttgtggccgcaaaagtgttgattccactcttatgatagtgaaaattgttaggaaaaaaacacaaatgcccaacattttggaaattattaaataaattaggtccatcctgaagttggaattatatgaccattaaaaattacgctttatgttcttacacagaaaggtggatggaaaaaaaaagaaaaaacttatgttttatagagacttttaatgacatgagccatgttattaattaatactgttattgataaaatgttaataccataagcaaacactgcaattaagaatagcaaacacgtatatggttcttattacaaggcactcatcaaagcatttaatatatatatcaagtgactttgaggtaagtagtcatagtacttaagtgttaaatctttttttttttttttttttttttgaggcagagtctcactctgttgcccaggctggagtgcagtggcgcgatcttggctcaccacagcctccgcctcccaggttcaagcgattctcctgcctcagcctccggagtagctgggactacaggcgtgcaccaccaagcccggctaatttttgtatttttagtagagacagggtttcaccatgttgaccaggctggtcttgaactcctgacatcatgatcttcccaccttggcctcccaaagtggataaatcttttaataatgtaatttttagatgaggaaactggaatctagctagtaggtcacatacctaataagtggaggagcaggaatttgaacccccgaactcagccacaactgctgtttaccccaaataaggtccacaaatcatgacacaaaatgtgtttttgtgtatgaaaaatttagaagggtctatgacccaattctcagctctggtgacctgtgtggtgggaattggggtgacttgttcctgttctagtcttttctatatcttaaacagaaaaccgacactttggttattacaacataatgcaattttaagtaaataagcaggagccgtctttaccctcctgggatttccttgtggccgaatgaaaacccacccctacgctgtcattttatgtctttcagtttctgtgcagtcagaccacagagaggggctttcttcaccatggatttggcatcccttcagttagagagtggatctggacatatgccagatttgcctggatgtttttctgctttccaatcataagccaaaaaaacaaaaaaacaaaaacaagaagcacacaggaatgtatgatttgaattctggatctctcagttcccatctcttaattttttagttgtttggctaaatgcttgggcattttagccatggaataaatactagtaaagactttatggaatacgtagcaggargcatttttaaatggtgcactgtttccactgagctgtggacagatgggttgtttataggctgtttcatatccagcctccttttttgttttgtttcgttttattttgttttggtcttttgctggtgrgaagtagaaccacgcttcttttgttctttttctacctctctgctaaatcttcttttatatgtaatattctttaaagtataatttgcaatgataaagtggcatccaaaatgctaaaggaacatgttaagacatttgaagaatctctttcttctagaaakatgtatgaaaatatttgttaataataaatgattgagggtttgcttcagcataattggaggagtgtgaggatgtagacagaagaagactggtcatgaagctgagtgatgggtacgtaggagttcattacacttattctttctacttttgtttatgttgaacagttatcacacaaaaaatgaagcagccacttaactagtatctcagcaattctattgcatcacgagatgcagcaaatttagtttgaaagggtaattttcaggaaagaaaacttyaacatagaacttcagtctgtaaaaaccaaaaccaacaattgaaatatggaaaattccgacaggccatcacattgtgtgcatacggaatctataccatgccaaagaataactgattgttcatttcaacttaactttatgataatattattaatcagttttgatatgtttaattatggcttttgagctttaagccctttataaacacttcactgtcttaccctttactactacacaagtatctgaaatgttcactttgactgcagactctcagccttccaggccatcctgcagtctcccttgatgctaactaggagcacttttctttcatcgttatcctcatgtagaatttggcagtggcctccagtggcctgtgaataaaatccagatgttktagtttggcccaaacctacccctgctgattgatttcttctcctgtgaaccacttcctgggaatggaaccacatagagcaaaaataatgaactatttaaaaactcttgatacttatttccaaagtcttcaaaaacagttgtaccaatttgcactcccatcaagtatgtaactctgcccattttgccgtacacaaataaacagcaggcattattatctttcaaaatctctcctgatgtaagccaaagaaaaagtatctctttctttttttaagttatcattgagaatggacttttttttcctactttgattggcattccttctttcctatttaaaatgtatttgctcgtatcttcccctattgttaycgtattccttagtaatattttggtagcaggatagaggctcattgtgtgttctcacatgtaaacttcctgagggggtcttgtttcttatccatttttgcatcyttagtgcctggtctagagcttagcacagcgtggatacttaaggtaactgttgccgtgtttggacacctttctttctgtcttcctttctttcctttcttccctttcttttctttcttttcttgatggagtctcgctctgttgcccaggctggagtgcagtggcgcaatcttggctcactgcaacctccgcctcctgggttcaagcagttcttctgcctcagcctcccgagtagcgtgggacaggtgcacgcctccacgcctggctgatttttgtatttttagtagagatggggtttcaccatattggccaggctggtcccgaactcctgacctcatgatctgcccacctaagcctcccaaagtgctgggattacaggcgtgagccaccacgcccagcctagacacctttctttgaaaaatgaaaatgaacagagtggtgtccattttgagtgggtatttctataatactggttgctaggaaatctgtttttttttctcctctgcagaataaatcatcactactctctgccggtgacccctggagaggtctgagaggtcagtggctacaacacaggaataaatgtccttctgatttgtaagctttgttccccatatcaggagcattggttaggaaaaagaagtgtattgtgctgaaatctaaaagttgctcatattacagggcacctaccagtaatttctcatgccatcatctaaattgaagacttagtattgttaacaagttttgaaaaggcattttttagcttgttcctctagattatttagtgcattttcccccactggtactaaaaatcagaagttaaatcacaagtctttctgttatatcctaccagcccatcttttatgacatcctgcttctcttcttttcttcctgtaaaagaagatttttgaacctataaaatcactttttaaaatagacattttttcctaaccctcagctgttcctcatcaagttttttttttattttattttgtgtttccagctattggaacattcaacctcaagactgtgatctytctgtggcatgcttggactcatagcacgcggaaaggaagcctgtcttgtgcattgttctaggacaaagtccattaagtgaaggtcttaataaaatattgaaggtcttaatgaaatactctcaaccctcaccagctccccaccagtgctaagcagggttttgccttctcctcccacatgtctaactagaattcttctaaaggaataaactaagagcaaaataaaagttatccatctccagcgcctgggattccggtctcacggtttttaaacctttttcctgtttccatagtctgagatgtgcctagaaaggccagccctagaaaggaatacataattatcttctagtttgctccatctccttggttcccatgaagaaatttcaagcctatgatgccttctcctacagatagatcctcttttcattctgatgtcattttgtgacagttggtgaataaaagcagcaagcccaggccaggtggcagagtatctgtgtctgcattttgatgacacctgtcatcagagaatctaggcacacaggctggggcagcatccatggacgaggcagaggaagtgggtagcctagaaactccaccagctgaggagttgtttcgtggtctcaacagcttgtagagtgttgatgtaattttgcaggtagacccaaacctttaagcaacttgcattttaccaagagttgctcatcatttcaacctctcactcgctattctcaccatcagatgcagaatcctgttgcaataaaatcataaatgaaataaaagcacagtcaaaactgtgccatccctctgattaaccaatgttgttagctcagggtctagagtattaggtatatttttgttactttatggagcctaagcttgctgctacatgggagggagctctacttgctttacttcctgccaaaacrcaagatgcactttatgacaatactgatttggaaccttctagggatttttttgttttaattgccaatggcagaaggacactattatggtactattttatacaactcatggactcaggcacagtgtcatggtgaaatgattgtatatagccctgctggccttccatctcatactccttccatgatttgtggttattgtcttcttttgctttgttttgtcagccaaatatgagatttgagcatgaaatcgtatagttttagaaattccagaatacttctttaatccctgaaagtcagtacaattctacctaaggactttcagccctttgccttgttatctgaaaattgtctttctctggataattatcttgactttatttatttgctcattcagttatccacttagtaaattatgatgaagtaccttgtatgcaacaggcagtaataggctatttcgtagcaatttcagtgtccagtggagaaatgtagactagtatttgtgtttacgccagttgaggacctttttaaatagtggacttgagcttaactctctgcttcttcttgcttttgatgaggaamagaattcacttacacatttcactgggaaaagaccttcccatgtgcattactactagcgggaacaaaagctggaaytgatggtctgcaaggtcatatgtcatcatatgtcaaaaacttcagagctttgcagatttttttaaccttgcattatgctgggattattgcattgttctagaactattgcattgaaaaaagcctagaagtgtagtaatcaaaacaataacattgcttatatctaggtaataggatacatttttatttttagtttgcctattcatctttcctaatttctttgcagtttattatacaataaagaaatcatcattacttaaacaatatagttcaggcaagaaacgcctcagttaaaagaactgtggtcattttggaatggtgaattgctgtattttttattaatggatctggaaacttcattgctatagcgtgatgttgggggaatgaaacagttgttcatagatatttatgcatggagctacacaaagacaaataacatgttttagtcattgtcagtgggaaaattggttgtatttccagggcatccgtattagcaggagtagccaaatagctatattaatgttctggtgtgtgatctgagttaattactgccatagttttgttagacttcgacatgatttcttttccagcaaataaaacttgagaaaattcaagattggtattaattatgttgctccaaatgaatttctaatgtagacaactaaaatcaacaactgtgaagccatactrtcaataggagagtgaagatctcctagcatagacatagcatagaaaaacctcattttgattttcacctccttwcagataagattagtttacttgtctagagaggcatttaagaatagaaggtttcctgaagactttctggaggagaggctgatggaattgcctctgggtkcgtaagaaattagcttaaagggaacatatgctagagccacaatatgggtggatttggtattattcagtctgggcagttgaggttctacaaatcacagattctatagtttttagagataccatggagtctttgaggtataatttgtgaatcaggagctagtcagttgcccaacattcatatgtcaacgtagatctcttggtgtcttctcaaggtcattaaatcattcacttaataagcgtttaatgaacattccactatgtgcctagggaacaacaatgaatatgacagatgcaagctatgctttaaggatgtctggtaggattagttttgtagaaacattaacacatttagagattttttctgcyttataaatatcaagactgtatcacagtaactgatctttatagtcatcatctagaaatgaagttcctaaattttattttcatggtgaccttactaatctatatatgtgtgtctcccagataaaacttttatctatagcaaaactgaaaagaaggtgatatgggcagattttctaaatctatatrgttttgccatcatggaaacagaggtagaagaacctagagaaggttggggagggcatcaccaattcacagtgagtgaackttctttgttactggactctaacatcacagttgggtagcacctttgtggtacatctcagcagacaccatacactaagcagggcawtgctgaaagtcataactcaggaaagtgagatcagagtgcgggatctcttgtcagatatccaacagctaaatgttgtctgtcctggggcattaatagataattgtcttatagtcctagtcctgaatttttttggtcccctgcaaactcttaaaggctttttttttttttttggcttgatctcactctgttgcccaggctgggrtgcagtgacgcaatcacggttcaccgcagccttgacatcccccaggttctagcagtcctcccacaccagcctccccagtagctgggactacgggcatgtgccaccacgccttgctaacttttgtatgttttgtagagatggggtttcaccaagccctcttgatatctttggtgaaactatacatacctctaggaacagaaacagcagtcttgtgtttcatctggcctggcttcctctgatggaagtcatatacctaagagtattttaattgtatctatttccacagcactgagtatctttgggtgtrtgacttatatccagtctcctttctaaggaatcatatggtttccataggaagaatataatgatcgatattaatacgggaaccttattgaagaggaaaatgataactgccttttctggattaccttcactggcaatataagtgtcaggctactctcagcattaagaacttgatttcctattttgaaccaggatctctctcacctgtaagttagaggtgttccaattaagagaaatgtgaaacagttatagaaatagaaacgacagtcatatggttggttatatctcacttttcacagttggcatccctgttragaattatgtttccatccaaatcttgtcactagaatcagattcgtagttacatcatgggagccaactgttccagtgatctatatggcaaatcactcataccatgaagcatacttctataatatgattagtcacctcctaatttgagatttttgtktccccaagttttcattaaaaggaagcttctgggctattaaagatgcattgatatgcctacagcatgatagatgcacatgaaatactcctataacagataacacaaagaagatagctttttataactcaaacaaaatgtttctaagtcccaggcaataacctgctaacttgaagacatgtttatttctgctataaataccagtgtataaaatgggttaagacccctctggagatttttttccatgtgaattgaattttgaataatatatggtacgtactawagtgaaagtttcttaactgatcttgtaacagagaaaatgtacaaaacacatattttggtgtctgaatactgatattctcttctcaaactggaaaactaaccagagtcacggtcaaagataaaacagtaaaaactcatatttgttkattcatccattcattcattacatgtttattgagcacctatttgtgctagccaatgtactaactacttactaaattcccattcttctgttactgagagaaaaagcttttaatcaatgccttatagactttttagcatatgctgatgataaatccgtggaaatctctgcactctcactcagactctaatggaaagtatgccagttagtcatttattacctctcagttacaagtttgccttttcttgcccaactttgtaatcttggtgtagaaccctggaaacatttctctctckctctttttttttttattattattaaagttctgggttacatgtgcagaatgtgcaggtttgttacatacgtatacacgtgccctggtggtttgctgcacccatcaacccgtcacctacgttagatatttctcccaatgttatccctcccccagccccccaccccgcaacaggccccggtgtgtgatatttccccgctgtatccatgtgtcctcattgttcagctcccacttatgagtgagaacatgcagtgtttggttttctgtccttgtgatagtttgctgagaatgatggtttccagcttcatccatgtccctgcaaaggagatgaactcatcctttttaatggctgcatagtattccatggtgtatatgtaccacattttctaaatccgttctatcattgatggacatttgggttggttccaagtctttgctattgtgaacagtgcctcagtaaacatatgtgtgcatgtgtstttattgtagaatgatttataatcctttgagtatatgcccagtaatgggattgctgggttaaatggtatttctagttctagacccttgaggaatcaccacgctgtcttccacaatggttgaactaatttacactccctccaacagtgtaaaagcgttcctatttctccacatcctctccagcatcttttgtttcctggctttgtaatgatccccattctaactggtgtgagacggtatctcattgtggttttgatttgcatttctctaatgaccagtgatgatgagcttttttccatgtgtctgttggctgcttaaatgtcttttgagaagtgtctgttcatatcctttgcccattttttgatggggttgtttttttcttgtaaatttgtttaatttctttgtagattctagatattagccctttgtcagatggatagattgcagaattgcagawtttctccaattctgtaggttgcctgttcaccctgatgatagtttcttttgctgtacagaagctctttagtttaattagatcccatttgtcaattttgrcttttgttgccattgcttttgatgttttagacatgaagtctttgccaatgcctatgtcctgaatggtattgcccaggttttcttctaggatttttatggtcctaggtcttacatttaagtctttgatccatcttgagttgatttttgtataaggtgtaaggaaggggtccagtttcagttctctgcatgtggctagccagttttcccaacaccatttattaaatayggaatcttttccccattgcttgtgtgtgtcaggtttgtcaaagatcagatgattgtagctgtgtggtgttatttctgaggcctcygttctgttttattggactatatatctgttttggtaccagtaccgtgctgttttggttactgtagtcttgcagtrtagtttgaagtcagatagcgtgatgcctccagctttgttcttcttgcccaggattgtcttggttatgcaggctcttttttggttccatatgaagtttaaagtagtttttttcccacattcctcctttaatagctggtgcagcagtgggttgtgcctgtagaggacactgggggcactgcagagggaagtcagaggtggggctttccctcctgctctctttgttgcttaagggccctgtaggcagctgatcagcaagagggaggcccarccagtgccactcatctcagcagctctcaaaacagctgcagcccacaccctccagcagatgtctttctgggctgctccttctaatctatgctttctggtaaatttttccacaacccagtgagtcactcttctgggtatgtgctggtcmgctctcactccacagagtttcttcatcacctagtgggccattcctataaaccatcaccagcacaccctctggcagtttctttgccagaggttccatgttcctgtgacattcatgccctctcaaggtctaaatatcagcctttgcacagagggccctcttctgagttcttagtttcttccttgttcagtagctctctctctattctagaaataatggctttttttttttttttttttttttgcagtagcttttcctgtaccccttagagacctccctccccatttttggtagttacctatcttttacttgtcagcaattctttatatattaaattttccctgctcaaattactgacgtggtttctgtctcctgacaggaccctaactgaaagagatgtgctaagagagaagccacctacaaaaagaattgccaccaaactaccaacttgtgaccaacagctattttgttcagcatgctcaataattgattttagtctgattacatcrgacgttccataatcaggtgctgaatattttccccagcgygactttattgagtacaaaataaataaatgccctcttatgcttccataatatgaaggcatttatccactcagtagagatttattcagtaacgtctgcaggcttggcattggagtagatgctttaaaaaaaaaaaaaaggaatgatacgctctaccttgcaagtttttcagagagacaggacttgtgtgtgtgaaaagtgcaatagagtttgcaaggcagcatacagtcccattagcatttgtattgcttcatatttctagactaagtgatgttgcagaacaccagtattctgttctatacaatccgttcacatttctaagagcatgagcgttcatttgtcttttcaattgtttcccactttctctgcatacacaatacttgctggtagaaattgcgagggctgtaagttggtaggttctctgtaatcaaggaaaataaatagtttctgacactagatctttgaaatggtgtctgaatatgcacactttggggctttaggaggcatctctttggctgtataaattactggaagcaagctgtgtgggatgaagcaggagagcttgtggaatgtcattgttttagagattgtagggctctgtgggaagtgattctagctttggaacctttacacagccaagattcttggagccagatgtagggagtctggtttctcttcatacatgtacactgtatggaataatatttaagatgttattatgccagaattgttgtagtgagttccttgagtggaactgtgtccccttctctgtgcatttcttgtagagaagttaagtcaaatcaacaggcagtgcctgcggagctcggaaactgttggtgaacgtggtattctggaatccacgaggccagcctttcccagaacatcctttgaggagcagtactcctggaagatgctccacctcgatcaagtcctggaaagtgatgtctagtctagcacagcttcctcttagagactgacagtgtgctttaacataataaaggctctctgataaagactgaagtaaaaagaatctgtcattttcttttctgtttagagacaaggtctttctctgtcacccaggctggagtgcggtgtcatggtcatagctcactgcagcctggagcctcctaggctcaaggaattctctcatcttagcctccaagtagctgagactacaggcacgcatcaccaagcctggctattttcaaatttttagtaggaacagggtctcactgtgttgtccaggctggtcttgaactcctggcctcaggtgaccctctggcctcggcctcccaaagtgctgggattataggcgtgagccaccaccgggcccattttctaacatagtattccagaaatatcattgtcaccctggatctttttttcctttaaatgtcaattgtcccacagaaacattgttttccatatgcaaattgaggatgttgattttgcatatctgtcctcaaagccctcatctacgtgtatgtatgtatgaatctgtaggacttaaaaaattttgttttggtgttctctgccattcttaaggacttgaatgattagataaatgaggcctaaagaggaaaccatgcatgtgagttataggaattatgatgagtaggcagtggcttgggttgtaccagaaacaccatggccccaggttgaagcccagtcactaccactttctttttttcttcttttttttttgaaatggagtttcactctgtcgcccacgctggagtgcagtggtgtgatcttggctcactgactgcaacctctgcctcccagattcaagtgattctcctgcctcagcctcctgagtagctgggattacaggcacgcaccaccatgcgcagctaatttttgtatttttactagaggcgggtttcactatgttggccaggctggtctcaaactcctgacctcaagcaatccacccacctcagcctcccaaagtgctgggattacaggcgtgagccatcccgccctgccagtcactactactttctagctatgcctttaggcaaacatttgttctctcaaagtcttaattgccagagctgttatatgagaatgattatttgttctaactcttaaggttgttgtagataaagagaaataatgaatgtaaagcactagtatagtgaatggtcctttataagctcccagtagatattaactgttactattatttgaggaacagattgcttctagcatttgaggtagacctttacgagtcctatctgggcattagaggcagggactgcagtcatttttgctaagttttcagaggttctgttggtgaaatgaaagagatcacarctgatatcagggtaacacctggaaacattaccatctccctaagatgtatgtacgttcgtgtctgtgagtagtggtcctgaaggaatgggaaagaaaaacagcaactcaaacctgaggtgacttctccagtttggtgtcagatgtccatgattgactcttcttctgcgactgtttctttggaggtcactttggggtgtatgtctttaggtctctttcacctttcggagcagaccgtaccacctgaagtcctgttgattatagagaatcatatgtatcacaattcttggggcaaaaaaaatgattcatgtctgagagatgatttaactttgggcctatttgggaaaccagcttcttaggtttagtgcaacatcttcttgtgctccttacccaggtcaggatgaggccaggctcccagaagtttgctgagaaattccatattggcatctcctgaccccatccagctccacatgggaggagaagtagattaaagattagctgtgtgggaatatggcctgttcctattacctgccacagaggagtccagctgtggtttgacagcatctgacactgtgtcagaaacacagcagccagctggaaaccgatcagcaccactctagttcctgccactcaccctacctaggttactctttgctgaaatgcttactgtgatatatttaaatacttatttataatttaatcatttatatatctgatacaaatgtgccgaatttgatatatacacagatccaaatcgtaaaatacacataccaaattatatataaaaatatgaaaattgacatatgcaatatatcaacatttgaatacaatgtgttttcgaaatgcagatcactttttctggttgtaaaaataatcatgcttgtacaaatgtcaagcaacatgagggactattaaggaaaaggggatcctaccctctggagggaaccagtaaggtttgcctttctgctgtcggaagttttaaaaacacttacaaatatgttacctgaataaaacgaaactactataaagtggttttgaccctagtaatatgtaataatcatgtcttgatattagaagatacagattttcctcatcctttttaactacttcatagttgacactaaatggcggtgccataattcatagtaggtagctrtttatggatttattagagtaacttcagattgtcatcctctgataaaaaatactgatatgttgtattgatatgtttatgcccgtatccacttatccacattattttttaaaagtcttagaagtggctttccgaccgggtgtggtggctcgcacccgtaatgccagcactttgggaggccaaggtgggcagatcacctgaggtcaggagttcgagaccagcctggccaacatggtgaaaccccatctctactaaaaatacgaaacttacctggacatggtggcacctgcctgtaatcccagctacttgggaggctgaggcaggagaatcacttgaacttgggaggcggaggttgtagtgagccaagatcgcaccactacactccagcctgggcaaccgagtgagactttgtctcaaacaaaaacaaacaaacaaaaaaaaaacgtagatttcctaggttaacaagtatactcagttttaattttgaaaggctgttgttcatgtaattctcttaaccaagtacacaggtaatcagttgaccatattctcattaacacagggcatttttgttgttgttgttgtttaggagtcattattttatctcacaagtttcttgtgcttttatgatattctttctctttcctacatgtagtagccaaagtacttcatatacttcaactgtttgagttatgtaacagagtcaktaagaagcagaataaggaatgttaacctctaaacataccaagataattttttaaatgtgtttatttatttatttgagacaggatcttgctctgtctctgaggctagagtgcatttagtgcaatcataagtcactgcagcctcgaactcttgagctgagacaatccttccatctcaacctcctgagcagctaggacaggtgcatgccaccttgccctactaatttttagttttttgtagagacagggttcactatgttgtccaggttggtcttgaactcctggcctcaagcaakcctmccatctcagcctcccagtgtgctgggattacagrcataagccaccacacccagccataaaaatgttagtaactattttaaagccccaaatcactatggtaatttacattcttgggctactatttactgacactgttttgctaaactgggattcaactgactgttgcaattatacagaggcagagttaaagctcagattttcaggtcatcagaaaaatagagattttcagagcatcgtcacatgtttctcatctcttatcttcctacctcttgatccataccygagtgacctgactaccaaccagacagagttttaatctccctcaggtttcatggaaggtggtgtacagagtatctaaaattcatagataaccttcctattggtttatcttctcaacattaatgcagatgactagaaatcacacatgaaaaaaacccctttcccttgggtgatttaaagagtgtttatctttggtgcagactctcaactaaaattttttttggtagcatatatcaagaggttttcaagggttgaggagtataagcaggtaggttaccactcgatgaaaagtgattggtaatggaggaaagaccgtgaaactcatgtttgctctttactgatagccaaacccaaagagaattaatgtcacttctatatctgcttgaaatcaatattattaatttctagtatctcagaatttcaacttatagagtataactgtgtcaggcaccatatagattgatccaaggcacattcttttttttttttttagagacaggatctcactctgtcatccaggctggagtacagtgggactaatttttgtattttttgcagagacaagggttttccattttgcccaggcaggtcttgaactcctgggctcaagggatccacctgccttggcctcccaaagtgctaggattacaggtgtgagccaccactcctgaccccaaggcacattcttacagtgggaaagaatatcattacaagggttgctcaaaaaataagtttcctatgatgtttttaatttgccggtcaaggtttcagtatattttaagcaactttttcaattacagtaataaccagtattttggggtgtttattcgataagtggattattgtagcaactctcatgacagctgtaagaggtttattgtcagtgttgtctttattgtcagttgttgtcagagttkggggaattgagtctcaaggaggttaagttacttgcccaaagtcaaccagctaaccagagcccagaacccaaacctgaaggtctgcccaactcttaaagtccttgcacttgcctrtgaggttctgctgacttccgttgtcataggacagattgaaaatccatctagtatcaggtaggccttttagtatcctttggaaaaagttaaaattcagcatgattgctgtgctgcctcctttcctgaaatgttacaccctactctgatgtgctttattggccggaaatcttctttccataaactgcatcaagttggtgatgctttatgcaacagaaagagaaataatttaccataaacacagcaaatcattggataaatctatcttgatattttcacataatggtattctctacagtaataaaaatgaactactacttggacaaacatgggtgaatctcagatataacgacgagtgaaagaaggtgagacaagattctggtgtatgtttccattaatgcctatggaatatggggctatcaactggagggtcttaaggaagccttctagagttctggaaatttttgtcttcatctggctgaggttgcatgggtgtatacagatgtgaaaatgcatctgactatatacttaacatttgtgtagcttactggtttatgttacacctcaatgaaaaataaagataacaggcaaatcacaacacacatttcttctgggacctcaatgtctaatgggaagaccattttaaactaaggacttccacgttttagagttgtttcctaatgagacttcttataagtcacccagcttacaagtggatcagtgacctgacagtcttgaggagctaatgcacaggcaataattttaaaataattttaaaggttcacaggcaccaatttatatgtcaccatatctatacactaaaacacacatactacattcactagagagctcttcagggttctgtgtgtctttactttctatgacacttgcagaagaacgtgtaccctgagactkctgctttattagaacctggtgacccaattattattcaaacggaccatctttagtcatttatagagggttaaattatgtttaaggaggcaatgaagcatgcaatacattttacaaaggtttcatctgaaaatgtaagaataaagtttgagaatttaaaggggacttttcccagctagctcacaaactgcttgaattctgtatattgttctaccaacagaatcattgcactgtgccttatataaatgttgaacttcgcatatttaacattctaaaataactgtcacgtttctcagagcatgctcagtcttttaaattacatttgcagggataccaagatctgattaacacaacacttgtaaaaagctgtttctagatttttggagattttcctgtgatgtttacaggtatggttcatttactgtgccataaaacttgtgcagttttttatcattagaagcctccccggttggtaacaactatcaatctatcagtcattccacaaagatattttgaaggcttactgtggaagaggcactgggtttcctattgcagtatatcttcaaacaaaacaaaacttgtagtctggttaacatagtattaatactatatctactaatatcacaattacacaattcacagggttcgagcatctgactggcagaaaaatttcattttcttttgtctgtacttttgtttgtctaatagatatatttgcagtacaatacatcctagtataattgttggcacttattaggtgcttagtaaatatttgttgaatgtatgaattagtgggtgaattaatgaataggtggatggatgaagtttagcactgataattttaacagtaatgtttactgttcagtaatttcatcagtgaattcttgccatgtgcctggcatcgtgtgaagtattttatgtggattatctcattggtctctcctcagccctctgaggaaagtacagccctaagagggargtattattaatatctccgttttccagactgaagaatctgaggcttaggacagttaagtaatttgtttgtgtaaaactggaattggcaaactttttctataaagggccaaagggccagattgtaatatttttgactttgcaggccatgagctctctgttccaattgcttgattgtggttttgtagcacaaaaacagccaccaacgatatgtaaatgagtggacctgactgtgttccaataaaactttatttacagatgcagtctgtgggtgggatttgccttggtggtcatagtgtgctggcccttgtcacacctcatccatgatagaagtgtaatttgaaccaaggcaacctgacttggaagaccttgtgtttaaccagttaagagcaaattctacacttgatcttagccaaaaggctgagaagtgttaggagcaaattctgatctagaaaaaggaaaaaggctagaaacttgctttagaagtcctcgttaataatgacgactattattttttaaattttatgttttttgcttttacctttccttcttaattccataccacttttcagtcatggattaaaagaaaataaaaagaaatctcaccacaatgtgataatcccctggtctgtatacagtggaaaaataatgcctgtgtcacaggcatcttttcattttacccctgcagaacaacccaggaggtgtgtgtcattgtccacttgcccagagtgattaaagtcacttacctcaggtcacacagccaagacttggatcacatcttttggacataaatcccagaactctttgaactctctagataccctgattaaagtcttcttttagcttcatcctccttaacgtcttttccctgcttcacctctttaatagctatctgcttttcttctaggaagcaaacatcttgttagcaccagctctgtattggcactaagatagagctgggaatacgaaacaaactaaataaagtgcaagccctgccctcagggagcttctggtccagtcaagcgatcagatttctaaacaggtaattacaatgaagggtaggaagtgcaggagagaggttgtgttacaggtgggtgtgagcatttctgacctgcttaaatttcagagactctccagcctggatttcctcagctgacgcaaccagttgggctgtaccctgagctttaggaattgacaaacagactggtgccaggaaggaactaacaagagtactgagttagcaaacatttggaatgggccagggaaggcctcccatgggagccacattgagcttagctctgatgactgagaacttgccctgcaaagagctgaggaatgagcggcctaatcagtgggaacaatgcgggcaaaggcctagaggcagtgaaatgctccgagtatttgaggaagaggaaggaggccctggagtcctgtagggaaccatggaaatcstggaagaatccagaggtcggctgggcccagatctgggagagcttttacgctggcatgggttgtgattagattttttttttttaatttttttatttttttatttattttgagacagagtcttgctttgtcacccaggctgcagtgcagtggcacagtcttggctcactgcaaactccacgtcctgggttcaagtaattctcctgcctcagcctctcgagtagctaggactacaggcatgggccaccacgcctggctaatttttttttttttttttttttgtattttagtagaggcggggtttcaccatgttggccaggatggtctcgatctcctgacctcgtgatctgcccaccttgggctcccaaagtgctggaattacaggcgtgagccaccgtgcccrgccagatttatttttaaaagctcattctgactcagtggttctcatccctgcctgcacatcagaatcatcaagggagcttttcaacatccagatgcccaggccacaccctcaggtcaatcagaatagtgttttgtcattgttgtagtctacttttgtttttagttttttgggtttttttttaagctggttaaagatgattccagtgggcagccagggtaaaacaactactggtctatcaggcagagaaagaattggagggtacagcagagaaagcaggcaaaccagttaggtcaggcttctggaagtggtttaggtacaagatggtgttgatccaggatacggttagaccagaggaactgcagagaagtggtggtcatatttaagatgcatttaggaggtagaatcttccagaattttgggcgtcaagaaaggaagtgaatgggttaggaaaggggtggaatcaaaataattcctaggtttggggatttagtctgctggatggaaaaatgttaaaattgtattaaaataaaagattgaaggccaggtgcagtggctcacgcctgtaatcccagtgctttgggaggccgaggtgggtggatcacttgaggtcaggagttcgagaccagcctggccaacatggttaaaccccatccctactaaaaatacaaaaattagccaagaatggtggcatgcacctgtaattccagctactggggagcctgaggcaggagaatcgcttgaacccagaggtggaggttgtagtgagccgagatagtgccactgcactccagcctgggtgacagcaagactccatctcaaaaaaaaaaaaaagaaaaagattggaagatgaaagattggggtgtgggtagacgattatgattgactgaatttagttcaggactcaaaaatgattgacctgtctatagccagaagttggagtatttttggaactttgtgtgttcctggttgggtaccagcagggcatgcctgcttatttgggagaaagaatggcttatagctataggttttttttcacaagacagccagctctgtcgcccaggctggagtgcagtggccctatctcggctcactgcaagctgtgccccccgggttcatgccattctcctgcctcagcctcccgagtagctgggactacaggcgcccgccactagcctggctaattttttttttttttttgtatttttagtaaagacggggtttcaccatgttagccaggatgatctcgatctcctgacctcgtgatccacccgtctcggcctcccaaagtgctgggattacaggcgtgagccaccgcgcccagcctatagctacagcttttaaggatcttggatgtgttaggaactgtgctaaatactcacggatcttggatgtgttaggaactgtgctaaatactcatttaatcctcttaacaaccctatgaggtttttcaggggggtgatctcaacattacatatgaggaaattgaggcacaactagattgtaattcactttcccatgactatacagctgctaagtagaagagctgggttgtgaatcgggctctagcatcctggtttcagaaaccctgtacttaaccactacactagtcttaggtacccagcttgcagtttaaaatgagctcatcgtgttcacctacaggggatccatctgcacgttttctatggagttacttattcccaggttastgtcaatggcagttttcataagataagcctcttcctggctaaatgttacctacaccaccctctcccctactgggaccatttttttccatccaaactgctggaagaattgaaagatcctgagcacagttgcttaaataagtagactacatgctctatgaagaaatcatattattttctcagaggagaragagttggcccagtgaggaaatgattgctgggaacaaactttctggttttccattttgttctgctacaartggcacgttctatcaatcaaggcctgccaggaaagattttgtctttcctcattgcaatttaattttaacctctgttgaactcaggtgcatgttaaatacaaagctgaactcttcagttagcattaatctatgtcctcctcgagatggggctggattttgtttagactgcctcttcccagaaaggaatttccctaatttgtggattttgagatgtttgtctacttaaataagctatctgtaaccccccaccctgaaaaaacatagctttactgagacccttaaatcaaatgctccgacagctttaacagtagctccctaaaaacagttttcactagtttgtctgtgaatgaagtacaatgtttaggtgagttagcaggtttatttcatagaggatgatgacaaggagcttaagtttctcttgtagtatcaggcagcaaaccccttccatgagcccatggtttggaatagggaatggcctgtgaggtattgcttaggagagtgaattgatacttaayctgcagagactacattatgagagcaatcattcagtgctccaagaaagcacagagtaaaactaccccctcttaaaagaaaaaaaagctttaggatatgtaattagtttacacttaattgctgtggatatgaaacagcagcacccaygccactgcataacrctctgtgacttgttcagtggcacctttcacttaggttctgtgctgcaattaattggttttctatgtttgtttaaacataaaagctactgaaaattctatatcccagaattgattatcgatgtttatttgctccatttggggttcgctcattatttttgccaagttttcttggttggaacttggattttaaacaaactgcttcttttcaaactctagaaasggtgacatagcagctgaggtccatgaggggcaagaactcatctagaaggaggggaaatgccttttgatagctgatgcagcagtgtaaggaaaatggtgttgtgtgggttcattacagaagccagggcccccaacctgtcttgtgggagctagaactagatcatcagttctatgagggcagagcactgtgatttgttcaatgacrtattctattccgctactcagttcttggcatacggttatctactgatatggagcaaattactacaaactcagcagcttaaaataacacacatttatcatctcagtttctgtgtgtcctcagattcaaggtttctcacaaagctacaatcaaggtgtcaactgggactatgatctcatcygaaagttcaactggggaatgattcacttctaattttacttagattgctagcagaacccagttcctcaagggctatttgactgaggagcttagcttctctttagctgttggccaaaggctgctgtcacttccttttggcattatcatagctcactgtagccactaactcccaggctccagctatcctcccgtctcagcctctggggtagctaggactatagatgtgcaccaccaaacactggctaatgttttttatttttgacttcagacatgttttattataatcttatacagtctacataaatttgaacttgtatttatttgggttcagttataacatagcataataaaaatcaaagcactggtcctctgaaataaagcaggcaatcaccattcaataaacacacttgatttattttgtataaaagggttacgtttacaactaaaagtttaaacttktataaaaagtttakcatgaataagtacatcattacactttttaatgcagaaatagacatctctgccactatacaagaaaactctaattaaagagttaacaaggtttcacttaaatagatatatttatatataaatatatacacggcattcagtaggcttgtgtcaaaaaggtaatttctgaccaaaagacttcatttaagtgactgaatactggatccttctggtattgacactccacctttgaaaaaaggcaaagtctgcttagattgggcaattccttgtgattttaacgttttcgctccccatggtgggaatagtatatgaaaaaaaccttccaactgcagaaagggcatttaaaagtctttttcataaataacgaatatcacagtccaagtgagagaacaccctgggaagatgatcattcttagttttccttcccttttttttttctttttaaaaaggtccattcaacttgtcctccttgtgaaatggttgaaaaataagttcagcgcttaaaaggttctgtgaatttgttgttgtcgttgttgtgcaaagaaaaaaaagaagtcatgattattcagccacacagtgctttcctgtcatttgacattaactccgaagggaattcagaagcctgcaaggacaggatgctgatgtccgtgttragggtggtcagcggcatcctggatgcctggttctgcccgggtctctggtgatgcaggctgacaatagtgggatgcaagtccagggtgatctgcaggtccaagatgtagtcgatgacgtgctgcaggatttccatcttgctcacattcttgttctgggggatgctgggcaccagctccttgagcttggagtagcagtcattcatgttttacagcaggctcatcaggtcatccaccggggttttgctctgggagatgcccaggcggtggtccaacaggctgtttttcctaatggacctcacgggactgaaggctttcatgctgaccgcgagggaaggtgagaccgggagggagctggctgtcctgaagctcaggccaccgctgccgcctgctgagctagctgygcttggcaccggacttggctcagaatcacactggctaatttttaaaattcttttctagagatgttgtgttgcccaggctggtctcaaactcctggcctcaaatgatcctcctgcctcagcctcccaaagtgctgggattacaggcatgagccactgcgcatggccagaatctttcataacattgcttttgccttattctactgaataaaactaagccactagatctagcccaccctcaagggaaggtgattacataaggrtctgaatacctggagtcaggggtctttgaaggatcatcttagagtgagcccatcacagtctgcagtagaattcagtacatattggttgaatcaatgagtttaaggagccagtgcttataatttgagctgagggcccctagctttgtccccctgtcacctttttatataactataaaggggtatttaaggtcatttacgtcattttaacattctacatatgatacctacatgatatttacatggtcttcccccgttcctaatactgcaaaatgataatcttacctactcctatggagggattctttttcaaaagaaggatcaacctggcaacctgtttgatccaatgtgccttgtctcttatatttttcatgctgcatgcatgatgggaatttaaagccatccccactcagtgttttctggatttcgagccttttgtaaatggagtgcccytgagtagctttttgcttccagggaatgaaaaaacaagggtgagagttcacatctaatgtgttttggttgaagtcacttgctacatgtgaaaacagtcggctctgccttctccactaagcctttgatattgttggggcttttcagtgtatggcgggattattaacaagggaaagtcaaagttgtccagcactgccacacagaatcaggagaaacttgtaggcaagtcactgaacctgaaataagctccttttgccccaggcttccccagatctcataccttttttttttttttttttaaattcaaacgtcatgacaatatctgtgtgaaacagtttgcaacgtagcttaagactctaggtcatgctttgcaaagctggaatttctgttttacctctccggttcaggagcagcctgcactttgagaagattggcaggggtgggacagacaggttctgggaccccggcttgaaatgctgtaaagcctttcccaaaaccttcttgtctctgaaacacagtgtattaaaaagacagaaggacaaaaatcaccatgcgggcccccacgggagtaccatttgccaggcaccccagccatcccacttcctccctctcttctgctctggctttgaaatggcgtgttgagagaatccaaagtttgatcctcatgaaaatgagaaattgcatgtattgacaatctgcaagactgctcctggcaaaatctgccattttgtacggatttgctaccagccttgctgtcaccctgcggggattggtttttccagtaatgcactcctccaagccaagtctgacaatgagatggtaaatactctggtgggttggggaggcaggggcaggaggccagagaatggtcagtttaagtagatcaaaagcacaaaattcatttcctcaagtggccttctctgaccatgaatctcaattctctggagatgaataacctgtgaattaactagtttccattaatattatgaattamcagtaagtaagccatgtccgtgctcaagctgcgtttgaagtggggagggtgaatcctattagcatttataattrtgtttcgttttcatattaatcccttcccaaggctgaggaattaggagttttctcatctgccgatggaaaccagtcctaggagtctgtccctgtcaaatcctggaaaatagatgatgatacagggccataccttttgcttcagtcaggggcacttctgtgagaggcctcggtgacattttgcttatctgttagattaggcttaatgtatgatcctggaatttagtagttgcatttaaagcaattctctagaccaggaatccacacttggttactcatctttatcgggatttcatgaaaagtcctacaggtttacagagctcctttttcctttgccattcatcactctcaattgtgtctctgtattcctctccgacttatttcatggcagtttgggatgccacatgtgccaacatctctgattctgctttttgtaatatcacattgcagcagtgataagagacactagaaaatgatgttggaatgtcaaaagggaaaaactacatttctatatcagaaactaagaccattggctatacaagaaggaaggtaatatttgtgaagactaaaaagaaaagtcaggaaaagaaaattgttttcaatatagctcagtggttagtggtttcatgctaaaattgtcttcttgaacatggccacatttcctaaattattgccaagtgtttaacttattaataaaggaagccaggcagtgatctctttctgggtaagggctaaccaaaatgcaaggatgcaaaataaccacattataaatgctttctgacagcaacgtgaaccaaaatctagttagtggtcactaggatgttgaagtcagaatgaaagaagctacagcatccttgccacgtggctctttaggtaagagccacggaaggaggggagattcagatgtgaaatcaaacatcctsagaagtgcttgcccttgtcctmatacagcaaattagcttctgaatacacagttacctgctaactgctggggtgggtgaatcctcttctctgcaattctggaaggccatgtggagtctctggtcctgccctttgtcactttcctctgcagccatggttaacggtatagccattcaccctcagcatgcataaatccttttttcccacaagaggatatyggctggatgtgatgtttatggaactaaaggagcagctggcggtgtcggattcaaggcaagtaggttgtcttgaccatcctatttagcagatggccaggacttgatagagcaaaaattattaggatccaagtcaagggccaaatggcatgggggacagtagaagtaaatggcagcacatatctgaacgcaggcacatgtcgtctgatggggtctctgtgcttccttttcattttacttcaagcaagagtaaacacaggccctcctgtagagcctccaggtaaacatatctctagagattattgatagcttggctactaatttgataattgtgtggatccttatggtgggctattaattgaaaagaaaatgttacgaagtttagatttcatgagcgtttatgtgaatttggccttcagtccgaacctaggtttcatggtttttctgtattgtcagtatctctatatactttggttgtatctaaagacaactgaaaagctttaattcagagccctttttcgagtttgtgtgccatctttttgaagatgactaatgccacgaaagctgctctgaagtggaagtgccaggagcgaagttttgcaatgagagtacgaactctgcagggaaagggggtgtctgtttcttctagtccattttaagctcatttgtgcaattgctgccttctccgtattactgcataactcctttgatcttaaagtggaaggaagcaaatttcaagagccaggatcacttctcatgtggctttaaaaggaacagcatattacaaaattgagtggatgtcaagtaaaacataaatttggatcttttgaaatttgaactcagggagatattactttcagagccaagcacattgacaagctcagggataaattgcatttgtttgtcattcatttaaattcaagtgttaggtcaacttgttgcccggtgttattgtcctttattggatgtggcatttgtactcagcattatactctaaactttaaacgtttaatcctcatgacaacattatgagactgtatccccatttcacagacaaggacactaaagctgaaagcatccatacctgactcagaattccatattttccccatccctggcctcctgcatcctagatggagaataaaatgtaaacacaggttgctaatacagccctcttcactgttgtcatatttaaaagctgccaaaattgcttagcttatgcccatgaatttttttttaagtggcaaattgattgaaacagtgagtgaaagggattatttcagttagggttatgcctgactggaacaaatccacttattagcatgctctttggattccccaccctgacttttggaaccaagacatagaccagagaatgagctcagtattattagtaagttactttgaccagccaataatctccattttctctccttttctcctcattcatcttctcaaccccagccatattaaccaccagtgaagacgatgggagctgaatggatgttgtagaaggctttgcatttgtgcagttgtttagaatctggggtcacgttcctgagctcagatgaggtgaagtctgagtatcagacatggagaagctgtaatcagaagtgaccaaaaattgaacctgggctaggttgactggttgttttccttttgcatagcctacaaatattattggtgtgtatcagtcatggaagattagaaacactttctttgagccttcacattatcagataatactaaatgcattaaaaagttcctgtcgtagtcttttttgtgctgctgtcacagaatgccacactgggtaatttataatgaacagaaatgtatttggttaacggttctggaggctgagaagtccaagagaatggccctgacatctggcaaggctttcttgctgcattgtaaccatggcaacgcgtatcacatgaacaagagagagaatgtgagagagcaaragggggttgcaagggggccaaactcacttttataacaaattccctctagcaataatgatgataatctattcatgagggcagaaccctcatgacctagtcacttcttaaaggtcctacttctcaacactgttgcactgggaattaagtttccaacacgtgaaatgttggggatacattcaaaccatagtggtccccctgactataaaatattccctctcattcaggatccaagatcagagtatctgagaaacattgccatggtagagaagggataacacctttttggaggagcacatgagttgatcaggtggccagcaaatgttgtgtcttgtgatgtggaatattactgggaaacttttaagacaaaccgtaagccagatatattgtttcaaaaaactactggtatcatagcctgtttctcattttttacctttgcatacaactcatggaaactaatggctaaattttgctgtgtascaaatgattccagttagttaaaacagatcgttttatgggtcagtaggttggctggtcagttgtgggtatggctagttcagcccatctctgtggactgcagatggttccactgaggctggatggtctcaaatggactcactcacctgtctggtgatggcaggccagtgagtctagaagaacgttagctaggactacctatgtctactccttgtagtcgctcatcctttaataggctaacttggaattcttcatttgatcttargattccaaagaatctgagtgttttatgagcttgtgtctgcatcatgtwcactaattctccattcactaaagcaagacatatggacaagcccaatttcaaagaatggaataattggtgtacactttccatagaggagggcaaagtcaagttgtaaaggcacatgtaacagggatagagggaatttgtggccattttgtcatttctcacagatattagagtaactaactacagatagttaagctggcatccccaccagaatgaatcaaagggaccatctttttgtctatagcttcaatttggtatggaatcattctctgggatccttattttattctattctggcctcttgaaacttggccacttttactggttaggttctcttctcttgcattcctgagctgtaattccatttttgaccaggttttaaaattttgatcaattacttgctaaggtacaaatacgatgtttcttctaatgcaattttgatttggtgtattctgtgcagttacctttcaagaatgtttcacgcttcagtccctggcttgagcttcttctcaggcaatttgtaggcacacttatgccaactcccagaattccacctttatggtctgatacactgggttcctattcactgattttttttttttatctgtaatgtttacaatgtagtagcaaattccacatattttattagtctataaacataatcctgtgtttagtagcacctgtattctgaatttacgctctagacattaagatataatcactattaactcatagagcatctaatgagggcttctgaccctcaacctctgcaccactgacatcttagccagaaaagatattgtagagagctattctgagcattataggatgtttagcagcagctctggcctctaccttgatgtcagtagcccctccccttctcatccccctcccactgctatgtgacaacgaaaaacgtctccagacatggtcacatgtccctcttgtagggcaatatctcccccatttgagaaccactgctctcttctggagatgctgaggcttaggagagatrgaagtgtgtgcagtgtgtgttattgtcagagaggacacactaggaacagcaacccaacagggaaaatttgtaagagtaaaaaggaatgtggaaaattttcagtcaccttaaaattaattctaggggtggctcttgattcctctgaatkgacctgaaaacatcaaattggwttgtgctacacagtgaaaggttcatcaatatctcaacttcattatgtgagaagtggattagatataaatactatcaatgggggatgggggaagcaggagctatgctggccgtagataatagatttttgaaaaactctttattttggaaaaacttaaatatacataaaagtaaagaaaattgtataatgacccatcctatacccaccacccaaggtcataaatgattgattcaagctaatcctgtggcatgtataccccrctcactccccctgctgttcactcttggattattttgaaacaaattcaagacgtcatttcatgtcatttgtaaatatctctgtatgtctaaaagaaaatacttgaaagccaaaattgtaatatgctgctagaattttaatcttctagaatgggcaagaatgaggagttctgctgagtagtatcagaaagttaagggaaagaagaggtgggaagaagactgaagaggcttgacttttgagggggattaaaaaccccaggaggaaatgaaggtgggagacactgtctcttcaagcttctctcccctcctcttctgctttccataacttttagaatatgtgctttttcacaggggactgggatccttacgaaggagaataggctggcagaaaacagattcattttctaaaaagaagggaaaaacacagtcaccagaagatgttgaaattttccgtcaatgatggattgctctctcatgactttcaatgactttttagccgattgggcctacttttaataaaacaaggcaagaagaaaatcttgcagttgctttttaagattttgctaggactatagtatttctctcctgttacaatgtattctgagaagtttctttcttttgatttaaacttcctcacttgattttatgatgtcataaatctcctgcatttggtgagagccatggtgtatgtgagacctaagcagcttgctagataacattctattctcccccttctctttagaagattaaactgagactgttgtgcctgatgccagaatagatttaaccaatcatgtttcctttacatttaggtcagtccgagggacaattctgcactggatcctattatccacgggttgaagggtgtcgtacatcatggtaagtatgccacatacacttccttttgctgggatgygaagggctcagatctctacctaaaagaatcaggttatcttgcagaggacagagggtgacacctattcctcatcccctgatgttgaagggcattagagccattatatgatgkgtaaagagcatgcccatttattacctgcaaatgggtctgtgttaacagtaagcagtttgtttcttttcaggtactagtttgaatgcatatgttrtaaatcagaacaccttaagatgtactattcttatgtgttgaacttgccatttgtttcatatctctcctaaaaatattctttcagttgtcttttcacctataaatgtttggtttgcatcacagatctagggcagcattttaagtagccagacaagttattaaactttgcagcatgtgaacaagcgtcatgcagctactagaatggaaaaggccaggctgctgttctgtgctgcagatctcttatcctcaggcataaaaccgggagagaaagtaagataaatgggttctgtcttttccaactggtttttattggaagaatttccctgcaactgtattatctgcactgcatcattacctatgacatcaagatcctctaatttcaaaagtacccttgtcrcagtgaggtgtgtagtcgagatgtaatgtaatgatttgcaaagttttaataatctaattagaattccagagacgttgacagaaatagcattagtaaccataataaatctccccttcatctccacagctgtgataaaacatcttcacacctttttgagaggattgtctttagacattagccaactccatagagcttaacaaacatcttccccctctctttccgtgaaactaaaaccagttgtcaggggtcaattggagcaagtaggattttggattaattgttccgttctcaaaattggtcagtcatgcagcaggtaacaatagtaaacytactcagtgtagaaaaatagggttactgaaaacaccacatagaggctttcattttaagatatttctgggccaggcatggtggcttatgcctgtaatcccagcactttgggaggccgaagtgggtggatcacctgaagtcgagagtttgagaccagcctggccaacatggtgagactctgtctctactaaatacaaaaattagctgagcatagtgataggcgcctataatcccagctactcgagaggctgaggcaggagaatcacttgaatccgggaggcggaggttgcagtgagccaaaattgcaccattgcactccagcctggacaacagagagagattctgtctcaaaaaaaaaaagatatatatttccattgtttcttcccagttctcagtttctggaagggtactagccccattcttcagggctcttacctcccaaagactccacctcatgtcataaacttggggattagcatttcaacataggaatttgcttaggggacacaaaccttcaggcgacagcagaggctgctacatatggaaaaacgatatctggctctgggagggttgccaagatgcccggggtgtggtttcaaccctaccctctaagtgggaagtcagatgagacctgcaaaatacactgacctacaaaggaagttcacttattcattcagcagaaatatatttcatgcccacgctgtgcaaagccaggtttggaacactgattaagacacacacaggccagctctcatggacctagaagggaagtgaagtgctgccttcctctcccgccagtctgcctggtatgcagcccctcccagcttgtgcatttgctgtttcctctgtcgggagagttcttccttcgcttgtgccaagggtgtctccttcttatgccttcaggtctcagctcttatcttgcctccttagaaagttgtttcttaagtatcctatcaaattattcatcccaccctactcccatcactctctgttacaccatcccaggtttctttcttcaaagcacttaaatgtatctgaaataactgtgtttgtgtttttggtcatatatcagcttcttgggtatcagtttcctgagggcagaaaaccatgttgatgtggcacgctgtgtccagcaaatagtaggtactcagtatgttagtcaaatgactgaatcaagtaagcatacaaataaataagtgaaaattttcaaaatatgaaatgggatgaagggaaggaggaactaaagcccatgtgggtattgccttgattgagaagaaaaaggagtaggagtatgtcgttcttccaaaagggaatggaggacattagaaatagttttttaaaaaaaacttttgttggaggccaggggcagtggctcatgcctataatcccagaactttgggaggctgaggtgggtgaatcacttgagcccaggagtttgagaccagcctgggcaacatggcaaaaccttgtctctacaaaaaaatacaaaaattaactaggcgtgatggtacatgcctgcagtcccagctacttgggaggctgaggtgggaggatcacctgagcccaggagatcgaggctgtagtgagccatgatcatgccagcctccagcctgggtgacagagtgagattctgtctcaaaaaaaaaaaaaaaagaaataaaaataaaaaagcttttgttggaactagaagcatttcagttgaaagtcctgtgagggatttgaatgatctattaatttgaaggaacataaataatcatgtccttcacagtctctggcttgggaacaatgacagagatgtgtaaagagaaaaatcaatatggatttctgttgcagttcagaaatgacttttatttcttcagctctgggaatcatatattagaatgttaatttctcattaatttttttttaaacaagaagcatcttaaatgtttcttcagctgaaatgtgaaggaataacctgctcatatcagccaactgtatttggcagttggtcattagggtcctctcttaagcagacgccaaggtggaatttgaagtgcaagaaagatttttggcagggagggtctgcctgggaaggatcaaatggagaaggaccaggggttggtggggagagcgtttgggccacgcatagtgcaggtctgacacctctgcaaggagagaggtgagctaggaggattggctgaaggcagctgtaaggaagtctttgccaagctgtcagagagccccagagcaaagactgcccctgaaaggagtcctgtgttggcaggaatggcccagctcttgttccccaccatgtgttgtcattggctggagcgtcccagcaagaatagcctgattgtagacgctgggcagatcctggaggtgcagctgctgcaggctgtcagttcaacaagctcctcacagcagcttgtctctgaaagggggatctcaggggtgcacgcttaagagtggcacagagcttcacgtccccttccagaggcaccttcctaatcacactcccgtagtgctcagagattcttacaaacagtcctggctcattctgtccgtagttactgagtgcctaatctcagtacaccatgaagctaggcattgagacatggacctgccctcaccatgtatgcatatgcttggtagagatgtacaattaagtatgtaatgacattaaagtgtgggaagcagcacacttaactcaaactttggtgattggaggtggctcaaaccaagtgaacattaagacccaaagagtgcatagagattatccagacagagaagggatgcaggcaggaccagtatagatgaaggtgtctgttggtaagagaggatgtggagaatggtgagaatgtggagaatggatgaccagctcagtggttggactgagaagaagctccaaagcatttcccagtgctttgaggcttggagaatggtgactgatacggtttggctgtgtcccacctaaatctcatcttgaattcccacgtgttgtgggagggacccagtgggaggtaattgaatcatgggggcaggtctttcctctgctgttcttgtgatagtgaataagtctcacaagatctgatagttttaaaaaggggagtttccctgcacaagctgtcttctcttgtctgccgccatgtgagacatgcctttcaccttccaccatgattatgaggcctccccagtcacgtggaactgtgagtccattaaatctctttcttttgtaaactgcccagtcttgggcatgtctttatgtgcagcgtgaaaacagactaatacagtaacattgcttctctattgcttttctagggagagacaccctagaaacctcttgaccacataaagtgctgtgtcttacatgttcatttgtctaggcaaattgtgacttttactaactcaaaagccatgaggaaatataaatagaatggagtgaggtgatttgccattgattctggtcccatctatctactcatgcagtgatagatggaagcactaaaaggtatctaatcaagtattttatttgccctattatcaacatccactggagaagaaagacttaggggaaaattgtaaatcctattcactgtattggttcagtcattaccagcactttttgtatacaagaaccagcagttgcaagtggccatttctgatgaaaatactggttgctaaaacttagtctagttctgatgtgtttaaaatccattttttaaaaaaaaaatcctgtttgtgaatcggtgtaaaaatatagtctttccttctaagtgagaggcaagaggtcaggtgaatatggcagatgaggcaaaactctgcagcccaatttgttcaacttttgaagccttaggttgtgcagcatgtggtcaggcgtggtcatggagaagaattgggccctttctgtcgaccagtgctggctgcaggtgttgcaggtttcagtggatgtcatcgatttcctgagcatacttctcagttgtcatgggttcgccaggattcagaaagctgtagtggatcagaccggcagcagagaccaccgtgatctttttttggtgcaagtttggctttgggaagtgctttggagcttcttctcagtccaaccactgagctggtcatcactcgttgtcatataaaatccactcttcgtcgcatgtcacagtctgatcgagaaacgattcattgttgttgcatagaataagagaagaccacacctcaaaacagcaattttaaaaaaatttttgctcaactcatgaggcatccacttatcgagcttttttactgttccaatttgcttcaaatgtcgaactactgtagaatggttatcgctgagttctttggcaacttctcatatagttgtaagaggatcagcttcaatgattgctctcaattggtcattgtcaacttatgcttctcatcttcaaggctctcttctcttttgcagaacttcttagaccactgctgcactrtatgttcattagcagttcctgggccaaatgcattgttgatgttgtgagttatatctgccgttttacaacccattttggactcaaataagaaaattgcttgaatttgctttttgtctaacatcatttccatagtctaaaataaatataaaataaacagcaagtactaagtcattagcaaaaacacaaagtgagaaatgtgcattaaaatgatgtgtaacataaccatatttattgaagaatgcattcccacatcattgttgcaaatatgaacagtgcaaaaactgcagttccttttgcaccaacctatttgcatcaacaattttacctaactggtccatgttaagaaatgtgtgtgggccgggtgcagtggctcatgcctataatgtcagcactttgggaggccaaggcaggtggatcaccttaggtcaggagttggagaccagcctggccaacatggtgaatctccatctctactaaaaatacaacaattagccagacatggtggcacgcatctgtaatcccagctacttgggaggctgaggcaggagaatcacttgaatccgggaggcagaatttacagttagctgaggctgcgccattgtactccagcctcagtgacaagggcaaagctccaaaaaaaaaaaaaaaaaaaaaaagaaagacgaaatacatgtgcattatacgtcgcttctcgtcctttcggctaagatcgagtatgtgtgcrttatgtcctgtgtcagttaagaggtgtgtgttttttcttttcatgttgttggaatacataatttgtcttcctttttatagtgctcactccaggaaaatccagcaggctgtttgtgtacatacacatatactgtgaaaagacttcaaaacaccatcctcttgtgtcagtcgtctaaaacggaccacttttgtattcctgataggaaacttgcctgtggtgattgcttggtattttatcattgtctgcttgtcctcttttcccaccccttcctcactgtcactttcctctcctggagaatgtaccatcttagtgaggtgtaataggtttctttttctttcagaggaaatgtgagggggacagtcagaaattgccacagacagctgggtacagtggctcacacttgtaatcccagcactttgggaggctgaggtgggtggatcacctgaggtcaggagttcgagaccagcctggtcaacatgttgaaaccccatctctactacaaaaattaaccaggcttggtggcgggcacctgtaatcttagctactcgggaggctgaggcaggagaatcgcttgaacctgagaggcgaagtttccagggaactgagatcgccccactgcactccagcctgggagacagagggagactctgtccccccttcccccagaaaaaagccaaaaagaaagaaattgccacagacataatgaaatcttctgctggtcagagctagacggctgctctctctcggtcttcccttccctggctcttccaagaaagctatcagtgaaaggacaaataagttatcacctgagaactcgcttctattagtgtcacaaaatgaggctcttgcaagcttttcttgtcgaaacacggcactggcagttgtggctatgacaagatcaaaacttttctagcagaccagctttctcatgtgactagtttgttcacttggctcacatttggggtctccctccacctttttgcccctgccctgggacacccatcatctcctcaccaaatctatggacaaagccctagaatagctagagtcactccaggcctctagcaaaaaaggaagaaataacagtgaatttgcaaatatgcattgactgccctgccaagcatttccagagagtggagaaagctatctgagaaactccacatcattcatctttccgtattccacctgctgggactgaagtttctacaataaagagtaacggagtgtcatctccaggtcagtcctctgaattccttctagaacagtgggtagacttcatcttacacaattgctgttgcatcaccagccacacattcactgtttaaaaagaaaccggccccaggatatggtgctgcctgcactgttcccctgccggggatgcacttggttcagccccttaagaagaccatgtgcctatttctgctgacgttacacatgcaccccgccctctgagccagaaataccacacttaagtatatccccaagaaaaatattgacaaaagacttgtgcatatgagccttattcataatagccacaaactgaaaacagcctaaatgtccatcagtgggaacacagatatagaagttatagactgttcatacaatggaatattatgctgcacttacaaataatgaactatatagatttacacaaaagcaaaacagtgggtaatgcatgattccatttatgtaaagtgtgagaacaggtccatccacaaaattaatccatagtgatgaaagtcagaacagtggggaggaggggccgggtgcaatggttcatgcctgtaatcccagcactttgggaggccgaggtgggcagatcacctgaggtcaggatttcaagaccagcctgaccaacatggtgaaaccccttctctactaaaaatacaaaaattagccaggcatggtgttatgcgcctgtagtcccagctactcaggagactgaggcaggagaatcacttgaacccgggaggtggaggttgcagtgagccgagattaagccactgcactccagcttgggtgacagagtgagatgagactcggtctcaaaaaaaaaaaaaaaaaaaaaaagagtggggtggaggaatatattgagtgaaaaggaacctgaggaaattttcttgggtaataaaaatctttctctatcttgatctagaggatgattgcccaggtataatataaaaatttccatgctgtccccttagatttctgcatttgagtgtttgaaaattaaagaatagctcatatatattacacattaatttcccaaatatattgcttccacaaagcttaaaaaaattagcagcacataccaaatagtcaaatattaaaaatcttgacagtgtcaagtgttggcaaggatatgaatgcaggaactctcatgttgttggtaaggagataactgatatgatcactctttagaaaatagtttggcagtatctagtaaaatgaatctaagagattccatttctatgtctgtcccctagagaaactcatatatgtgtaccaagagatgtataggccaggcgcggtggctcatggctgtgagcaactttggagccgaggcaggtagatcacttgagcccaggagtttgagaccagcctcagcaacatggtgttttatctctacaaaaaagtaaacaaaattagcctggcatggtggcacccacctgtagtcccagctattttggggagctgaggtgggaggatcgcttgagcccaggaggcagaggtttagtgagccaagattgtgccactgcactccagtctgggtgacagagcgagacctggtcttaacaaaaaagaagacatgtggctggccgcagtggctcacgcctgtaaccccaacattgtggggggacgaggctggtggatcccttcaggtcrggagttcgagaccagcctggctaatgtggcaaaacccygtctctactaaaaaaaaaaaaaatacaaaaattagctgggtctggtggtgcgtgcctataatcccagctacttgggaggctgaggcatgagaatcacttgaacccaggaggttgaggctgcagtgagtcaagactgcactccagcctgggtgacagggcaaaactgtctcaaaaaaaaagaagacatgtgggcaagaatgtttgtggtggtgattttcctaattacccaaacctagaaatgcctcaggtgcccatcattagcaggctggataaagacgtagtggtgcagtcatagaatagaacatttcaccacgatgggaaagaatggcccactcaacaatatgagtgcatccgagattggtaaagttaagcaaggcaggctgaatgagaactggcctcaaattcaaacctaatctaaaaggaatcacctttgaagtctttttacgtcttagcaagcttctgaagaaaacattgtgcattcccaaagataaacttcaaaacatgagaaaacccaatctttattgcttaggagtttatatgtgggtggtaaaacttaaaaggaaacccaagtgattatttcaaaatgaggatggtggtgacttcttgggggtggatgagagagtgacaaggggctggctggccgggtaggggaaggcaaggtcttctcgtgttctgagtgttggtcacacacccacacaccagagctcacttcaggatcatttttcaacagtaccttgatgttttgcacgcctttctgcatgggtgttatatttcacaatcaaagaagacaatgattaacattagaaaggaagagattcagacattgctttcctctgggacacatcaagttccaagtggcctcacaacaaccaaaggggagtgacagcactttttaaaaactttcttaccataactacccctgacaggctgtgtgttctctccacaaattgattgcagtccaatgaaagaactctgcctgccttggaattgtatcattaagaggtaactctgagagcaaatatctccttgtagagattagaaacaggaatcagaaacaaaggggatgggttgtcaagtgacaggtttaaacacaaagggcgcctcactgctgctgtgctggggcatgcttgctctgtctgattagcccagcagggatcactgcatattccagaaaccctctgagatacaaccaccatggcccgcatcatatagaaaggcaagcaaagcagtcagaggcggggcgacttgccccagcgtcacatcatgagaagtgacccagcccagagtctaaccaaggtcttcctgacttcagactggctcttctgactccaggtcctctcccgctcagatccctgccaggctccccacctacctttttccatcttgattgaagctcatcatatgggttttgttgaaggggcaagtgaagacatattgaacaggaccataatctgtcactgtcaccctgacaccattgtgactatccttgtggtccaaaagctcgaaataagccatctgaggccaaatggctgaagtttctgaaaatatcttttgtggactttggaagaagaggacaaattctagaacaagcgacttttgggaaaaatgaatcctgaggcagaaatgtcattataatccagcagcaagaaaatggagcagagctgagttgctgtgaggggttcttgcctgtttttgtgtgtgtgaactgccaagctccctgaatcagagtccacacatccttccatcaactgactgcctaaggtgctgagggtaaaatgaacaatatttctcttgtccttggaaaaattttagtctcatgaagaatcttttttttttttttttaatttttttgcccttgactttcttagcgtaaagactaatgttacttgcatgcaaagtaatctcacgttgaacctttggaatgagctttattaaaagtctccattatggaatacttttaaagaaacagaattttgttatttttcacttgaagttggactcttaggaacacaactgaatgaggtttctagagcagtacttcaaagttcaggctggcctgggtttgaattctggctctccagtttgggagctgtgtgaccccagtacaaattactgaacctctctgtccctgactttctgccttgtaaaattaggataatgaaagtgcttatctcacgagtatcatcgctaaawgcattaagacagggaaaacacagagaaaagaaggcgtgcctggtatgtgttcagtgccctctaaatcagtggtcagcaaactataatctgcagaccaaatcmagcccactgcttgcttttgtaaataaagtttcattggaacacagctgcactcacttgtttacawatcatctatggctacttttgcacaacaatggcaaacttgagtagccgtgacagacgcactggcctgcaccaccttatgtgtttaatctctggccctttaaagaaaaagtttgtcaatcctacctcatctaaacggtagctattgtagtagctctactaatagtgttgcctgcacccagtaatttgtttatgttggggcaatgtaaatactcactcaggtcattacttaccatttgctaggctttacagagataggtttcagttttcattttgccaagatcatcacatgtttcaactgaattaatgagggttctgttttaatgtttaacttaaagaaatcctccaaattattttctcccttttgaacaggaaaaccaatgctgtattatctatagctcactgataattttgaacatctcaacatgcaacaaagtttcccgtttgaagtttgtgtttccagcatttaattacatggaactttcctgaaatgtgctataaatatgcagcaccctgatcttggctaattggctcacatctattaaggatccaggaaggactgatgcttatcagaacacgtttgatctcaaaatcttctagaaacaggcacacttaagccatttccaccatttcctggatttcagtgcatcagaaccaccaccatagatgtgagctatttccacttcttttcttagccaggaaatgggatgctgtgcgacttctattttatcactaatagtattgttaacaataatgttaagacgtaaaaagacttcaaaagtgattccttttagattaggtttgaatttgaggccagttctcattcagcctgccttgtttgtcaatattttatcgtttgaacaggattatgggaacccagggaaatgccgttttcctgcttgtttcagtgggatgtgaagagcaaagagagctcttaaaaaaatacctccatttgcctactgcaaaagtgcctgctaaagtgcttgggactaccgtgtgtgattttcttaacctgctcgcctgctctatgtatgtcacctcggtataggagagacagacactattgcgtagtgggtttgaaatccagttctgcctttgactagtcgtacaacctgaacaaaccacttcacctctttgtggctcagttttctcaactgcatcgtgaggtaatactaataccagtcttgctggtttatcctgaggattcagtgacttactgtacataactgtgcctggcatgtggtaagcactcagtgatagctgtcaccactgccaccaacccccactgcccatcatcatcattattgttacttgtggacttgaatatggaaaccacgtgatgacaggaaatgactgcagagttctgggtactgccaccatcactgcccatgtagtaaaatggaatgcatgttgctcaacttaattcgtccatacaaaaataaaatgaaatgatgaagatgatgatgatgatgatgatgatgacgaagatgatttgggtagccagtttcttttgagatcaggggaaagggtagtggacaaagaaccaggaagtgggtgaaaggaagaagcagcagcctctctgcttctgcaactgttaacctctgtctgtgcacctaaccctacctggatgttctataaatacaatcttattgaatcccatcagcaacacgttgrggtaagaattcttaatcccattttataaataggtaaagtgaggttttagagagatgagcgaatgtatcccagccatgcagtggaacagtgatttgaacccagttgtattggactctgaatcacatttctttgtgctctgctgggccagcttctaagtcccagcatcgactaactttctgataactgtcaaaagcacttaactcttgtatatcttggttttcctttgtgaattaggtcattgactgagcatcaaaaggaarctaaaagaatgtacacgtcgtgtcagttatggccaccagaaccctgtaggggagaaaggcaatcaatgaaactgttcagtgataatattgggtttttgtcactgkatgactctatatmatttaaatgtcatgttcatttccttaattgttgacaagactgctatctttatgtgctttctctttggaaatattaatgtcaacatacatttcatttaaacatcaacccttaaatcaaaatgccatccttggtcagctgaaacctctaataaagttggaggaggctagatgtcttagatgtctttgaaccctgtggggtggctattcatgaccttggattgctcttctccaggtgcttcaagacagggatctgattaataaggtggactgtctccctcccaggccacctgcttcagaccccacagcactagttattcatgccatagtatgggccccgggattttctctggactgtgcctgtaaggaaggccatgaggcatgcatttaatcctctgcctgctgatggagagtgtttcacaggcaaaagtaaattccatacctccatcactgcatggagttggccctattcatgctcatatgtattgcctgttgcttttaaaaaaaaaaaaaaatacgccgccctcatataggagtgcaggggttggcaaaatttctctgtaaggtgactgatagcaaatattttaagctctgtcagccatatattctctgttgcaactactcaactctgcagtggtagcctgaaagcatccgtagacaatgcataaacaaatgagctgtgtaccaacagaacttcatttacaaaagtaggcactaggccagatttggcccatgtaccatagtttgcccacttttgacttagagatatgtcgtgagttagtttggtcaatttcttttagccatgtatgaaagacctactttataaagtgctacgttgggtgctggggataaggtcaggaggcatggtcttgctgtaacagagcctacaacctgtcaaagagaccatgttagccaattacgcagactgaaacccaggtcttaacaacctatgaccttgggtaagttctcagccctcactaggatgttgattcctacttcatagggttatgaagcttcacttagagaaaggccacagcagggcctggcacccagtttctgaaccgtaagtgtgaactgggaaaaggaggcaaactgaagcaaatcccacagtgtggaatggagtcttggggtgcaggtcagtgaagggtaaactgaggctagagaacccagtcactgtaaacagatgagagtcaatgctgctgctgcctggccctatgcacatcctttactgtggtcacataaaacaacaagctctagacctggcttctactagactcagaaagttgacggggccctttgctgtgagtcctactgaataatgtcagtatcttagttaatcaattctgcgactctcatgtcttcatattttagcaactctaaaattgggatgcatctttgagttcatatcaagtcattgtttaattagcaacatgtttcctttattagtggtattggaataatgatgcatctcacgattgatgttgacttggagatgaggaaaacagtatctgggacttrtttgttatttaaaatataccaatagctactgtgcttgtttgtttcttcattctcttttcacataattattaggcacctactgtgttctggggaagtgttttagctgctggatatatgtacaggcaaggtcttcgctcttgtggaataatcaagctgttgtggcagacagtaaacaaaggaatgctggaaaggaaatgaaggtgtgatgcagaaagttaataacaagctgggcgtggtggctcacgcctgtaatcctaacactttgggaggctgagccaggcggcaggagttcaagaccagcctggctaacatggtgaaaccccgtctctactaaaaatacaaaaaaattagccaggcatggtggtgcacgcctgtagttcaagctactcgggaggctgaggcaagataatcacttcaacccgggaggtggaggttgcagtgagccgagatcgtgccactgcactccagcctgggtgacagaacaagactctatctcaaaaataaataaataacagagaaaacatactgagatggggggctcaggcggtgacatttgagctcagacatgaaggatgaaaaggcatcatctctatggagggtggtgggaggggaagcattccaggcagagggaacagcaaggtgaggaggcaggtaggtggtcagcaagggagagagaggaaaatacaggctgcagtggtagacaggtcatgtcgggccccatggccaccataaggagtctggattttattctaaatgaaccaagaagccactggaagattttaagctggccagtgtcaggattagttttacatttaaaaagctaaaagaggctgggcgtgggtgcccacgactataatcctagcactttgggaggccgaggcagacagattgcctgaggtgactcaggagtttgagaccagcctgggcaacatggtgaaaccctgtctctactaaaaatacaaaaaattagttgggcgtggtggcgtgcctgtagtcccagctactcgggaggctgaggcagacgatcacttgaactcagaaggtggaggtggcagtgagctgaggtcacgccactgcactgcagcctgggggacagagcgagactccgtctccacaaaataaataaataaataaataaatagctaaaatagttgcctagtcttcagtgagatttcctcacctgatcctgcagatgaggaccccagagcccagggatccagaatgagggtggtagaaagatgggcataaggagagctagatcccttcccatgtcacacacagtgcagttgtggtccagcctctttccttgtaaaccttgttttcctctcatatataagacaaaaaactagtgtctttgagacctcgatttccccatcacccaatcataacttcagtcttgtgcctgttccttaaaatcatttactgtgaagccttgcagatggccctactttgcaaacaggacagccccattcccatgctgtcattcccattacatcctacttattaatgacagaacgatgacatgctttgagaatcaacaccctgctatagagagcaagtatttttgtttgtatttggatcataaaattaactccctctggggtccccctagggaggcctcttttttttttttttttccctcaaggcaagagtctcactctgtcaccaggctggagtgcagtggcgcgatcttggctcactgcaacctccaccttcccagttcaagcgattttcctgccccagcctcccaacaagctgggactacaggcacacgccaccatacctggctaatttttgtatctttagatgtggtttcgccaagttggccaggtggtttcaaactcctgacctcaggtgacccacccaccttggcctcccccaaagtactgggaatacaggcatgagccactgcgcccggccatcttcgttctaatctaatactttcccacctccctgctgccttctggattctcaccctcagcctctttctttcctcccaacttgccgtttctcacccctgtgtttggcaggccctcctgttgcccactgtcacacccacctaagactcctcccaggttacacactacattcatggccggtctagacttaacccagagctgctgactccatgtctagtgttttactcagttgtgtcacctcttcataattctgagcgggattatcaattgtacttacccaaaagctgattttttccccccctcaatcctgggaagttttggacagttgatcttttccttctgttttccctcctgcttacttcactccaaccatttctctttaaaccaggcagagtccctctgcactggcttttctcccttcctggagtgttcttctccccatgtagccatgtagctcagttcctcactgccttcaggctttcaatcaaatgtttccttctcagtgatcctgcccttgaaattgctgtttgcaaaacagtggtcaggataggcctcatttagaaacggtgattcaaatatgactaagtttgctaacagctgcagaacatttggtcccaaagcagccgtgaatggagtaatgaagaaatgttctggacagagtgaagagccagtgcaaaggccctgggggcagtgtgttcatgggacagcaaagaggccagtgtagctatacctaaaaatcagaaagtggaagtgaatgaggctgcacaggatgtaggaaccctttgatacagtccctgtagaaagtggctagtcagatatggtcctgagaccagcagcatccattttattaaaaacgcagaatctcagctctcatcccagacctactggatcagaatctgcattttaacaagcttcccagatgatttgcctgcacattgaagtttaagtggcgctgtcataaatcatcttccatttctaatgacttaatgcccaattctttccactatccactccttccttccctccttgcataacaccaggcagaggctagccctgccccagtgatcttaggcatttaaggaaaagttaattgcttttcctctaaaaaaaaaagttgtgggaaaccctgaagaaaccaaataatcattgggctaaaaacagaagcttgggctttcatacactttcctaaaattaattggtcctttgtttagggaatgcctcaggttttcttcccctagaaactaccacatcctgtccaaataaccttccaatcttccaatgtaatacattgtttattggggtgtgggagtgggtgttcagtgcacttccacaattcctgattactgcacaggtctcttctatacattgactgttcatcgtattttataaagagctttctttttttcctatataaccaaagcattgaaaatattaggctattaacataccaagaaatgcaatcaatcagctgattatcatctaatgttttaatgatcacatttttaatccaattatccatgtttgaatctttcagattttctttaattaaaaattgcctccttgcactgctatcagaagtaagaaattgaacagaatcagccagatataatttaatgttgaaaggaaactgcaaggataactgggccgcgctgggcttaatggttgaccatgacttgaaagcccttatacaaaatttcctaattgataagaaaaatttaatcatcttcagatataaaccctttgcattcaaataaggtatttctttttccaaataaatctcccctaactggttattcatattgtcattcaaaatgcttaaaaatgaaagaaagcgttgggtgaaatgtagactacttaatacagtgtgtatttaatataaaagtcatacattattcatttttgcaatttgaataactttgaatttagcatcgctgttcctcatctttttctttgatgaacaattaattattaaaatataatattgtctgcatacagcacccgggatccttgaaggtggaatacgagatgcatttcttttcaattcttttatctagtaatgcacagtacctgcttattatggtataatggaatgaatggtggtataaatagtttttcaaatatttttctcaactagtaagtggctgggacaggaatgttttgaattcaaatgactaattatgataaaagttggaggcagaatgcactgatcaggatgggcatggagtcacactgcccttttatagcaagacttatttaacaagcactatgcatgcttactgtgtcaagcgctctcctaagctctcacctgatgttaactcatttgagtcatactcagaacctccttgtaatgtcagtgttattatcccattttacagatgaggaaacacttacacaaaggttaaataacccttctcaagtcaaacctttaagtagaatagttaggattcatatccaggggacctagctctagcacttctccccattttataatatctacatttattaagattttattagccaggcatatgggctcacagctgtaattgcagcactttgggaggctggggctggaggattgcttgaggccagaagtttgggaccagcttgggcaacacagcaagacctcatgtctactaatttttttttttttttaattaggcaggcatggtgatacaagcctatagtcctagctactcaggaagctgagaggggaggattgcttgagcccaggagttcaaggttgcggtgccaccacagcctagtcaacagagtgagaatctgtctctaatttatacaaacaaaaaaaagattttataaatggaagagtttacgttttcagctgaaaagtgctttatttcttcctcccagtggctatactcaggaaccaccagtcttgagtctggccagttgagcccctatggcttaagctggcatcagtggacagtactagaaatgtagagctaccatttctaaaattgtttctaatttgtaattaagcattgcaagcaccccatttatcagtagagcactgtcagtgggactgagcaggcaatgaaattttcagaaagatcactgcaaactgctcttcgacttgaactgagatgggggaaaaagtcgagagttaattctgtaatgtattgctcgtgttaattctgtaatgcattgtcatttactaatgggggcacctgaacatatagcataattccccccaccccacaggtctggctatggctgtcaaggtgactttctgatacttgggattcctttcccacttcccacccccaacacttgtgttaaaataggggcaggcagaatatgaccgaaggccaaatccattctactgtctatttttgtatggcccctggsstaagaatggtttttacatttaattcctaattaagtgaaatgttattcccccaaaaaagaatcatattattctcattaagtagatatatattttgaaaattgttctcagttattaatagcatttcaaatacagttaataagattgtgaaagtgtgcttgttatttaagtacctacataacatcttcaaattcacctcttggcctgcaaagcctaaaatatttactctttggtactttatagaaaacggttgctcgttcctagcttaaaacccaaaatgagccagcctgtacctcatctgggcttgtggtcagccacatgcttgccttgataaatctgggcttacactgggccaggaactataccaagccccttatgtctgttaacttgcttaattgtcacagcaaccctgagagtaaatattctcattattctcattttacagatgatggaagtagctcagagaggttaaggcctaggcctaaggttgcacagccatcaaatgtcagttaattcgaagcccatactggagctttggcaaagaaagctttaacctagactgctcatgctgatggacaatatatctaacatggtatgcctttaagggcacaaggagtaatccagttaaaaaaaaaacaaaaagacatgcacaaaacattaaagaaagtacatgacagaacattggtagcttagaggaataatagtaaaagtaacaacaatgagagtaagaataatatctatcacgtatgagatgtttactgtgttcccagctctytctgaacctctwtcttttattgacttatttataatcttcactactgcagcctaggaaggtttcgtaacttgcctatgctcacacagctcacagatagcggagctggtatttgaacctgggcaggctgaaaatctgttctccagcagcaacccttgaaggaactcacaagtgctgggggtgctggtgcaggcagtggttagatgtcagttttcagccctgaatgatgttttctgctctccaggcatactgtttcagattccctgaaraaagaatcccatgtgagtctctgtattcttcacatgtttttgaccttaggtcttttacttcatcctggtcttctatttatccagccctaaagtcaaagaattggactaaatcgatggttttcaaaatgtccctggatccmctactcggcttcagccaccagggctgacttaacttatttgagttgctggggtcttgagcaagattttgtttgaagagaccatcctttggcctccaaagccactgaactaagccactgaactgtccaagtcccttccagatcacaaagtcctaagattcaatggcagtgatagtggtggaatgaataagcagtgaagccaggccctcctcccctgtcccttgtactgggtctacccacctcgccaccgatctgactgcacgtgctgatcagcaaaaaccagagcttgcctctgaagccctggtgttggtcaagaacagagatgcccttttgagtttgcagcaggggtcacacgcactttccatcatgcctgcttaatccatgagcccatctgagaacttacataagagtccgaccctgcccaatcagcgttcccctttgaaatctaatctcctcctgttggtggggcaggtgcttttgctttatcttttgatgctctttaaagccatggcctcttcctatagtgtgtttagatgggggctcggctgccaggggtttgccggggttgtcttgtcacttcctgtcagcatacagcatgcttaactgcaaccctaatgttggactcggctctgaggggaaaactcttctgattctctagccattcggcctggatcccttgatcctaaggcaggttggtgtgctgcagtgtgactcgaagttcacctacaacatgagggagacatgaaggtggtagttttgcagttggtggtgccaagccctacccacaccctctatcgcttggggctttgtgttgactctttacacagcccaggaagctcagaggcagcaagcaaaggccaaaatattttcttctccgggccaaaccagtccccgccaagcatgcttgcagagatttcccctgtcattaggctgctggtaaccaggtttaaattaaagcccagacttgccagtgggcggaggggcaattccgttatttctagccttttgtacagcagaaattgtttttgtaattttgattatagaaccctatgatttgaagacttttgcatttattgggtaatactaaatttttattttagaaaaagacgaattgaacacctctctgagaatcagccaaggtttctgagcctcacgaataactgctgttacttcgctgttcaccagtgcttgggcttggttatttaacctctctgttccttgatttccacatctgtaaaatgagtattagaaagcacacacttcatagagttgtgaactaagagagcatagtgatgtgaataataaaagcctggattctaaacccagctacctgtttctgcatcccggctctgtaaactggggataatcatagaactaacttcatggagttattttaagcattaaataaattaatctttataaagctcttagaacagggcctcttgcatataataagtgctgtttaagtgtttgcaacctgtaaatactcagaatagtgcctggcatataggcgaagctaaatcaatgttaagtcttcttcaactaatcttttccaaaaggaaattgcaattttaattataatatagttgattcttgttgggtttttgcattatcccctagttacacagacttctcgagtctggggatgcacagttgcccaaatttctgtactagttgttctgcatgaaaatgagaagaggaaggaaggaggaggtatgaggcttgggaatgatattcctgtagcctcaggtgtgtctatgaggtcacctggaaccctgttcccggggctggtggaagccatgaaggagctaagggaccccatgagcaggactccagtagtcttattgcatctccaacagggaaggggagagaatcccagatgtaaattcaagactagatgtctggagatgtatgtagagactagaaccttctctgactcacgaaagaagctagatagtttactgggcatgcttggaagaattataagatattttcctcatcttctctacgacactattccttcctgtcccagggcctttgctcatgctgtttctactgcttacaatgtttttctttaccttgtttgcccccacccttgcattttcacctggctaacctcagtgccttctatggctgagtcagagctgtgtggagtcttcggtgtcaagacacctggattcacatcctggctttgcttcttaggagctgtgtgaccttgagcagacactaacccattccatgccttgctttcctcatagattaatcatattttcattgttgggtctgaacttaaatatcatttcttctgtttaagggaagataccgccacatttgtaaaaagaatgctggttcctggggccattctttttaaatttctagttgtgccttggttgggcttcacttcgatttggagaggacttgggtgaaaccataatgaaatgtagccagctttggaattgcatgttactggtgacttacagttttcttttcacagtgattctctcattgtgtcccaaagtttgttccactgattatctatctgttcatagataattagagaagagttctatgatgaaacaagattgggaaggggtgggttaaacaaagtcaagcccatttcttttctgcaagacttctcagagattttggtatgctagaatattttgtctatttcctggggaagggagagggactttaatgtggcccaaccatgttcatcatggaacctgtattttattgaaatatactgtggtactggtgtcctcagaacacaccctgggaaatgctgctttgtttactgaggctctcccaccaccaaatgctagtgcttctcaggatataaacaaacataaggcttgcgatgtggcaccagcatgccgagggtgttgactgtgtctgcggctcggaatggcatgacttaccattgtgcttttcttttccctttttccccaaacagagaaggagacctttctggatcctttcgtcctccgggacctcctgcctgcatccctgggcagctattatcggtacacaggttccttgaccacaccaccgtgtagcgaaatagtggagtggatagtcttccggagacccgtccccatctcttaccatcaggtagatattcttcctcaagtggggtttctgtgtttacttgttttgtattgacttaacgatccagcatggctagagtataccactaaggaatttgttcttgatcctgtgcatatcattgattcytgcagtctttcccacaaacatgtttttgaacccaagaactgcaagcgatagaatgtggtttcttagccgcaaatgaaattaactcactaaagagaattgcactcatgaaatctgagtattgtttaagtattcaatcttgaggaggtaataatagctatcctcaatgatgatgaccttttgtgccagaaactcttctaagctctttataaatgttgacccatttcatcttcatgaacaacactcttgtgaggtagatgctatttgtacccccattctacagtcttatgaggaaggtgctgtgcatacccccattttatagaggagatcaagccacacagaaggttatttgcccacaatcacacaactggtaaccatgccatggtgtctgattccaaagagcatgctctgaccactaagcctacccacagttcagaaaagaaagagatttgtggacatggagaaatgaaataaaacataccattgattgagttctttctgtgtgctatgtactttactcagcactttatacatatcaacttaatcagtggcaacacaaacatagagagatgggtattcacatagaacatcatggcgtggagagattgggtaacatgcccaaagattcatggttaatgaatgatgaagccaaaaactaagcctgggtttgcctgattccaaaacccatgtttctgaccactatattgtactgcttccttctgagtgtggactgagaacacttcatgggaaggcatgatttaggctgggcagttaactgtgggtaggaactgatgaactggagatagaattgaggcagtgtcagaggaaggggaaccatccaggcagtgagaggtctttaagtcacctcatgaggtttgaatgcatggttggggatgattcttaggagggacatgttagttgtgcaaaattcagcatggactgaattacaaaaagtgtcaaatttcttctgcattattcccaaaaatagagccaggaacgatgggtaggatttgtaagaaagtggatttgagccattaaccaagactgtccaaaactggaaggtacttaggatgtctttcatagaaatgaccacctcctccagtctgattgttctagtaccagttgaccttctgggtcttatgtcaagtattccagtaggtgggtctgaatagacattggccaaccaactacttggctggccttgggtcacatgtccatctttgaatgagccatcagaggtgaatgagccatcagaggtgccagatagcatcctgaaacatccagtgttacctgtcagtgggtaaatggggcaggttccctagaagaaggtaggggcagtagagacactatccccctaaccaagttaggtcatgtaaggccaggctgaacaaatttatttggcctcactgctgttttggcaatcattttactttcagatttttttttccttttaatctgaccctgacaataaagaaaggactggcgatttggtttcagaacaggatctgccagccttaaggagataatgaaataagaaatgagttttcttcctaatggtgatgccaacattgtttcattaaaaaaaataataaagttacagcccaaatatttatataaacagcgttggtggaaggaatttttttttcaagatccttttttgtcagttaataaatacttttgtcttgaaagattgaaaggtttacggctcagtggctcatgcctataatttcagcactttgggagggtgaagcaggaagaacccttgagcccaggaatttgagaccagcctgggcaacatggcaagaccccaatctctgcaaaaaaaaaattaaaaaattatccaggcgtggtggcacatgtctgttgatcccagctgcttgggaggctgaggggggaggatcacttgagtctaggaggtcaaggctgcagtgaactgtgatcatgccactgcgctccagtgtggatgacagagtgagactgtctcaaaaaaaaaagagaaagatttgagataatgaagttaaggaatactgatttggctacttttcatatagaattccatgtaaggagaggcagagagtcgttgattagctggagagaaataaggaccattaacatatgctgggtttcattatagctccagatttgaaacaaaaaacagtttggggcttggatgttttgccaagtgtttgtcttttagaagcattttgatcaccatttttgtaactggggctctgagaaagtgctttttaaatatctcctcactattccactctctgccacccatacgctcaaagaagaaataatgtaagatttgtatttgccttccaatatataacttctctctaggtattgtatttcagggaaatagaaaagaaatcagtcatatttgctttccaggttctttgctacaaaccgtcttaagataatactttagttttatcagacactgcttcatgtgtccctctctctctcccaagggaggaaaacagctcatattcatgtggccaaactggatccttgctggctggctttgtggaggtcacagctgtgtcagcccttggaaaggaaagcattcgccatccaagtattatcgcttcagaccttcccaccctgaccctgccaacattctttctgaagttagcacagaatgttcatttcagaaaggcgaacagccaattcggaaaagccaagtagtcaggaattccatgtctgcctctgacagaaagaaaacattcctagtctctcgttcttctacttctctacagtctctgtattctctcttttcttccctgtcatccagcatgggtgcctgcactcaatgaaaatttgagcatattcaccatgaaatataacggttagcacaaagtgttgacttgtatgatgtggatttctttgaagcctttcagagtacatacaggcaaacagtaatctttcttctcttgttcccttttgtgagtctagttgggcattcaagtcagccctgccagcctgtgcacttgtacctctggcttgtgtgataatctagattaaaatacagcattgctaatggaaccgcacattggtttgggattccccacttagtcagcatggcttatgtggcccctctaaacatcttctgaaaatatcaggccaaaatcatgtcccccaaacaaaatgggtcaccccaacaaaatggcagcactctcggcccttctgtgggatgtcagaggagccggacaacacatggagatggttgcaggcaacatattcatgatcagtcatagaagatgattagctttcagtccagttaactaggatttgttttcttctagaatagtgcttctcagatgatggttctttgcccataggcaactaacccaacccttcctttccaggactgtttgcatcttgtaggttaaaataaggcactacctatgattttccccagcttgaattttacttaagtgcttgtagggggtgctatcaaaaaggcaataaataagtctgactgcatctactttgtttacctttagatgtgtgatttttttttttttttttttttttttctgacagtaagctggagtggacagaaaaggtttaattgcatgaccctttttaaccaaaggtatctgtgagaaacagtagagcagctctttgaaattaaractgtgtgctttggaggcaaactgcctgggttccatttatggctttgttcttcggccaaattactcaagtactctactatttggtgcctcggttttctcctctgtaacatcatgatgataatacycccctcatggagtcacaataaagattaaatggtggaatatgtataaaatgcttagactagaatatgtataaagtgcacatcacaggaagtgctttggagatattaggcgttgttgttgttgttggttttgttgttgttgcaggtattaaatgatcaccagcctttaaagcaggactgtctggtagaagtaaaatcacatcatttaaaatgttgtagtaatcatgttaaaaaatgtaaagagaaacaagtgagattaattttagtagtataatttatttaatcaaatgtatccacaatattatcactgcaaatgtagggctagccatatttctaatggaatagccacgtgtggctactggctgtcacagctgtaaggtttatctcaaggccacgacaactggtgagtcacttaattcagaacgtttctatttcaacacatgacgtgcagtgcatgtgaatgaaggaggttttttaatgatggggtgaagatgccatattaatccaagagagatggctttctttgttaattatggttaagtccttttccttctataaagccctttctataatcaccttcatgcaaaactgactgtagccacaggaggggcatggccctgcatttagctagctgttcttagattttatgtttgcagctgtggttcagtaagtaaaatttcggatgctccaggctactgggaatttaatattccattatcattgtcttgtttaataaggaggcaacaaacacgacctgccctgtcatccctcaaatgtgtggtgaagctaaaataatctccatgaccttaggtgagattttccagtttctagttagtatccttgggttccttgctgtgctaataatggaccgtggttttgtttaattgccattatatgcccatcccttaaactattgtacatatcagccttttaatggctcataattatattacttttggtattctctcatttctccctttcatccacagtggtgtcctgcccaagtcttgtggacaggagctctcgctacacacgaagggcatgaatagatttcagcttgcctttgattcgaaccgacagattaaaaactaattattctccgtaatacttttataataaaaactaagttgaaatgatttatatacacttcgagccaacacatttgcaattcaaggttaaaattgttcttgaaacagcaccagttaaactgcaattacaaatccccaagcagggataaaagaaagaaatgttttacacattcacttcaaaagtttaagagtcaatttaatattatagaaataaaaactttcatttatttttactaaatgataaagacttcattagttgtattaaagtcaagataaatccaagtgtgtttattaccctgctgtggcaaaggatcagccaagaaaagtgagggctttgggaggtggacgggattttctccttgggcctgctgtcttgttcatgcctcccagttctttctgcgttgggctattggcagtttctattcagagtgcagaaggatgaagatagatagatgtatgttgctgatgcagggtgccctgtgtggaatggccttgaggttagctaaagggaattgtttcaggacttatactatcactgcatccatttctccactgcagtgtggctctttcagtggataatgctaaggccttttatgcctgtggcatgaaatagctgagagcatacaaaatagagtcacacagacctgctattctaagcctcacttcacctcttggttcccgtgcctgcattagtccattttcacattgctataaagaactacctgagactgggtaatttattagaaaagaggtttaattggctctgcaggaggcatgattgggaaggcctcaggaaacttacaatcatggcggacaggaagcaggcatgcattacatggctggagaaggaagaagagagagaaaggggaggcgctacacacttttaaacaaccagatctcgtgagaatccactcactgtcacgggaacagcaagagggaaattccgtccccatgatccaatcacctcccaccaggcccctcctccagcattgaggattacaattccacctgagatttgggtggggacacagatccaaactatatcagtgaccttgggcaagttactcaatgcctctaagcccaatttccttactagtcaataaaacttatactaatactgctattaataataatattaccaccagcctcatgggatttctgtggattaagtgagagaaagcacataccagtctcagcacaatgccttgcatgtaataggcactcagcaaatattggctgctagtgttcatgatataataagagtgttctgtaatgctactttaatgtcattatttaatgtcattactttaagctaaaaagaagttggaaaccaaaataatgtctgtaaagtacttaaagaagtacctggcatgtcataggtttgataaatataagggggataaggaagggaaggttgatacagcattttacagttgttgtaagcttagagtacaattgtagttaccacattcctcatgaaataataatgacagtagtgatagtacttactgagcacctgctgtgtgccaggaatcattccaaatattttatatatcacaactctttgaatagttacaaaaaccacaggaaataggtaatgctgttacctccattgtacaaataaagacactgaggcacagaaagattaaataatttgaccaaggtcacacatttagcaagtagggtttaaaaacaggattttgtacccaggtagcaggggtaagggttttgaatttggagaattaggcataggccagatcataagggccccaccattaaggatgggaggctgttaaaaagtattgaacggagacattacgtgatctcatatatatttttcaaggatcactgtttagctattaaccagatctagaaaagcagaacagattacggaccaaacatcggaccggtcaaagacccagaaagacacaactttgtccgtatggtttgttctgtggctccagcctgatttccatattgcacaactctaggggacactttctcatggtgggcttrtggcaccttttggaatcaaacaaagtggaggtccaaggcaagagtcagggtgtggggacagactgaagttgctgtgtaatgatgtatcagtagatttcgtcactgcccacttgccaaagtgagaaatgtagactcctctcaccaatccaaggctcctggaggtttttaactcactggccaagcatgccagttgccaaagagacaggccactggcgattttcatttaagttagaaaaatgacagggttttagtgaatgccgccaacccacagaaggacatttgatgagtgtgctaagctcgtcctcctttccctcttttgtatgactgtcaagcgcaactgtgatccagttgacaatataatatcattcaggtcatcagttcactcccagaaccatcacatcctttcttcaaaatcttggggcaagttaagttaataacaaggaagccaccatgcttttaaaccgtagcatgtcattaagctgcaatagcaatttaagtgaaagcatttttgtgttaaattcacaacctgcctcatttttacagttatgtgacttgttctttcctgaggcttcagaaataaactttttaggagaatttaatgctggctctgaaagaagcaagtattctagagaataaacaaactgcagagtcgtattgctgagacagttttctgagacaggccattcttttctggcatctcagagattaaactattttgggacagatggctgtctcttccagaaaatttccggtctaattcacgatgtatggcagcccagtccatttctctaaaaagtcatcctgaaagttaaggaatgtctctctctattaaactcacgtctctatggctttaatttaagccaatttccgtttatttggtcttctctggacatggagaagagctggtcagcatcttccacatatgaggggctttatgaaattactccttactcaccttttcctcaggctaaccaattccacttcctttaacctttcctcacaggattttttctccatctttttaatcattttgattggtctttttctgggctgtctccagagggtctttgttaatacttctcatatgattttaagaagttattttctctgagaaatcagaaacctgctctcacatttgatgcattcagttctgactttggtagtccygtcaagtgagttcatatcatgaggtggaggtgatttttcarcatctttagttgtcttcatttgagtggctcacatttggacaaagtaatcagtccaattttcctaatttttctgtcatgtcttgcctttcctttgctgtaaataaagaaggaatagcagaaagaataggaaggcaggcagatgctacctagagacactatgagtttttatgatagtaaagtaactcagagaattgaagtaacacaagagtaacaggctgctttggcttttaggctggttgtgaatccgtcctggttctatgtaaaaggcagaaaaaattccatggtttattatcattttacataagctgtggaattggaggggaggtagaatgataggtgaattcatatacttcaatgatttttgcatggctaatatcactacctcaattcatcgctttctcatgcaaagagagggcagactgtttggaagcaggtcattttctgtgtcattctctgaggctgtttgagaaacagtgggggttagtyccagggttcaggatgaccacctagaatttgcagaaacccagagagtgatttcccttttttattttccacattagtattaactgccttctggttccccgaagccttgacagtcactcaatgcacagagagcatctttctagcaccattcgaccatttctcctgcagaaagcactcttatttggcaccagaggatccagatgggccagaaacagttcattcagcttttctcttcattctattttcttctcctattagtatttttggtggctgcatatttcaaattacagttctttttttttttttttttttttttttttttttggtgacaagaataactttgtggcctgttgaggacaagtctctgtcactcagttgctgttccattcctcatatgtaataraattactttttttatttttaaaaatttttttattatttttttgagacagagtctcattccatcacccaggctggagtgcagtggcacaatctcggtgcactgcagcctccgcctcccaggttcaagcaattctcatgcctcagcctcccgagtagctggaattaaggcatgcaccattatgcctggctaatttttgtatttttagtagagacagggtttcaccatgttggccaggctggtctcgaactcctgacctcaagtgatccacccaccttggcctcccaaagcggtgggatttcaggcatgagccaccgggcctggccagaattaccttttttaatgatcacaatgttgagggacacaaaaaaatcccttttttgttctgttctgtttttgagacagggtctcactctgtcacccagactggagtgcatggtgcaatcatagctcattgcagcttgcaactcccagcctcaagtaaccctctcacctcaccctcccaagaagctgcgactacaggcatgcaccaccatgcccggctgatttgtgtattttttatataggcagggtctcgttgtctgggctactctccaactcctgggttcaagcgatcttccacctcagcctcccaaagtgctggaattataggcttgagtcaccrcacctggcccaaagaatcccttttgataatagaaatatgatttgggcaccctgatttttttcctttactttccataaaagttagatcggcagtcctgtaagagatgtttcttaataatattaataataatgatgatagctaaccttaattgaggacttaactgtgtgctaagcaatttacataaattttaatacttctgacaactttataaggtaagtattattacgtgttttacagttgtggatacttgagttacagaaaacttgaacagttcatctccgattacccatctggtaaatgttgaacttaggcagtttgacttgcaagtcacacatttagtgacttggcgactttgccaaacttgatcactagtatgtcggaagatgccaagaattaaatccctaatatttatgaagctcttatgatatactaggaactgttttaagcactgtacttggtttaaatattttgtcagcacttaaaattgacaaaaatccttttgggtaaatattgttatgattatcaccattttattgaggaaaaatggtggctcaggttaagcagcttgttcaggtcacagagtgggtaggcgatggagttagtattcatacccaggcagtctggctccgggacataacagtttgaccgtgaccctatgtttcttgctagaatggtaaaggcttttccagcagggcactgcagaaagactgggactctctcatgggaggcacaaactcagagtgyggtayagccctcaaatgaagtgttttgctggttagttggcaggacagaaaccacagccagatgagcctgttggcagtgtttccagcaggcagcctcaggtcctgctgggtttagcagccctggcattgggcacttcctaccgtttcatgctcttatcaccttcacctgctttggaccaaatagcttttctaattgatgtgtgttttttgtgttgttttttttttccccctcccctctctggtcctctgttcagcttgaggctttttattccatcttcaccacggagcagcaagaccatgtcaagtcggtggagtatctgagaaataactttcgaccacagcagcgtctgcatgacagggtggtgtccaagtccgccgtccgtgactcctggaaccacgacatgacagacttcttagaaaacccactggggacagaagcctctaaaggtatatttggcttaagtgccttgcccagaggaagattccttatcataaattactttaaattaaaaggaattcaaagccagccaggaattgggacttggtgttaaatgcatatgtttctctgctaaagggagcctgtctggctgaaaaataggagcaggtgtgggaatatattctgttaaataggtatgatagaaattgcccttttgaccaataatagataattctgtctgcatttctgccttgtaacttcaaaacttactagcagtgtctagagaaagctttctgaaaagtgtcttactttttatgtgtttccctgttgatcaggagcttatctctgagctcagacatcagtgaaacgggagagttccctgaccccactccccgctttgaaggacatgcaacaggaatgtggctcatctgttcagtcaccattcgctgctcagacacataaggtctaggggagcacataagggagggggagcacacagatgggcaggtgcaggagccagggtgagctccttggggctctggcactagggttatgtgtctgtgactcctgaagcccaagtgggcatgtgttacagtgggctctttcagccttgccgtctgtggacagcttaagtgttaaccagctcagtgacctcttggtacccaggtccttgtctggcgtccaggaacaatcaggtcgcccatggacttgaaggatgaatgtgggggttttattgagtggcggagttggctctcagcaggatgtatagggagctggaaggggtatcaagtgagaagatgatggagttcggccattcggtggscagtctcctctctgattgtcccttgacattcagatgctccttctcttctccctgccacgccattctgctgttcttctgctcttctattctatccctctcgtctgcttctggagcctggggtctggggtttatatgggtacaggatagcgggatatggcgggccaaaaggcaacttttggtcatgaaaacaggaatgtctgttttcacttagggcccaagggtctccaaatttgagggtggggcctttgcccgggaactgcccgcttctagccagtatttccctgtctcctgtccatatcatcaggacctttgaattgctcccaacaccccagtatatagcagtcttrctaccatccacccccggcaagaactcccataccagcctcacccctactggaaatcacttgcttattatttttttaacctattatttaacagtttaaccccggtatctgataaacataagtttatcattttcaggcatctcagtctttttccatctctacttgctcatgtgaaatgaatatgaatctctctcccaggaaactagaacttctggttctaccctcacacctctcctctcaggctctgggatttatcagaattgggtcacagagctccggaaatgctgaggggagcaaggctgatcaaagccctattacttggaagggaggaaggaaaaagaaggaattttcttttggtgcgaaaagggatatttcccaacccagtgctatccttcttcaaaattatgagcttgggtaataaagggagagcttgtgtcatttatcaacactggaggtagagtgggctactgttagtgtggtacgttacgtggagaggttttctttcaagagtgcccccacccccaacaaaagggaacagtttattggcatatggactttgtaggaacagggggaatgggattctattccacaagtaactgcagtgacatgcactttgatgatatgaaagagcccattttctaggctcatgtttctgaaaaggagctaaaagaagaggagagggagtttaagaatgtgatcatttccttcctgtctgtgtgattttgtttgaggttagtgaggagaagtgagtcaggcaccaggttccctcaagaaatgcttgagattcaagtaatttggggacaatagattgtcaagggcatcattctctgggaacaatgggagaattaagaagctcacaaacctgtgaaatatcttaggttgggctgccgtggaaaacctcacatgaactaattttttttttaacctagytaaaaaaaaatgaagaaaataacccaactagaaagctttctcccaagagaagttgactgagaaaatcaggtctcctggggattttgtgagagttatatgcagaggatgtggattgggggggtgaggaattcctatcacaagtgagtgcaagatctgatagctcagaattgctgagatggtgacagatacaaagctctttcctgaaaaaatgggccaagcatatgatatatcagctgtacagagaaaatgcatggcctttattatccaagaaagctagggaggataatggtttctattgtgttaaattgtcaaagtaggcacgatcttccactgaacgggccttctctgaatttgaccacaaccacagaaccatccttaaatacggcaaattcatgtgtcattctactaggtttgtttgaattatcatagtgctcgttgctgactctttaagacatgggaatattaaaatgttttctgatatttttagagccaaagagagagcaggatctagatgcagtcctatttgtgtgtttaacktattattggagagctacacrtamataaaagtgcagtacccgtaatacgtgcacagcttgatgaattttcacaacctgagcacacctgagtaacaagcacctagatcaagaaactcccgtctaggatctcaggactcccccatcatcccccttcctaatcactctgtgttcccaagggtaaccacttccagaaattcacttagcctgtttaataaattgcataaagttagaatcattyagtatgtcctcttttgtgtcttgcttcttttgctctacagtgattttaagcatcctctctgttgtggcctgtagttgtagtttgttcttctgtattgctaaagcccattgtgtgattatacctgaatatatttatccatttcagtatacatgcatatgtagattattttcaagtctgggtgattacgaaaactcttgaacctgccttttaatgaatatgtggatatatctctattgggcatacacccaggagtaaaatggcagcatcctagagtacacatattttcaggtttggttagagactgccaaatggcttcccaaagtgactgtatgtgccactttacacttttgccagcagtttaggaaattttcctatttttacagcatttttttaaaggcataatttacataccataatatacagctatggkaaatgtataatttgataattttagcaaatttatacttgcgcagccatcactgcagtccagttttagaatattttcatcgccacrgaaagttccttcctgcccatttgcagtcagttatttctcctgccctcaaccccaggcaacctcaggtctggttttgtctttcacttggtgttaatgattttaacatttacccatgtttggcatgtatcagtaggtcattttttttttattgctgaatagtgtccctatttttttttaataacagctttattgagatttaattcacataccatgaaattcattcttttaacgtgtacacatcagtgttttttactgtagtcacaaagtcatgcacccattgccaccrtttatttctggaacattttcatcaccccaaaaagaaactccatctgtagcaatcactcccattctccttcccttcgtctgccctgtatgtccctccctcccttcctccagggctaggcaaccactaacgtaccttttgtctctatgaatttgtctattctgcacattttatgcaagtggatcatatatgacttttttgacttagcataatactttcaaagttcatctgtattgggggctgtgtatcagaatttaattatattttgtggccaagtaatataccacataatatgtggaggtgccatgttttgtttatccatttatcagttaatggacattgagttttttccacctgttggctgttatgaataatgcttttgtgagcatccatgtccaagtttttgtgtaaatatacattttcaagtcttttagatgtaaacctaggaatagcattgctgggtcatatggtaactttctgtttacagttttgaggaactatcaaactattttccaaagtggtggcatcagtttacattcccatcaacagtgtatgagggtttcaatttctccatatcctcaccaacacttgttattgtgcatctcttttattttcaccaacctagtgaatatgaggttgcatcagtttatagttctgatttccatctccttaatgactgatgatctccctgtttgtttttaaatgcacatgtcatggaaccacagcccacatgaccaaatgttcctccttttttttccctacgaagactcaggtaactcagcgccactataggccaaaagatgctgacacatcatcaaacagcctggagggcttasattattgaccttagagatgtaagcaggaaagagccaaagcayggaacaagtccttttccttcctctactcttctgcgaaaaaaagttytaaaaagagaatgagtggtattctgtaatcttcaggtaattcaaaacgagcaaagcctgcctgattggtattctctatctgataattattggaagctttcaatgcccaggaaagctatgatgttttatgcattcatygggctgttgtcacagaagaaggaaaaataaattaattacrtaaggcaggagtcatttaacttttttggttaagggccagatagtaaatgtttttggctttgttggccatatggtctctgttgaatcctgggtacttgtgggacattggttccaggacccctacggacaccagtatccttggatgctcaagtcccttatataaaatggtgttgtatttgcacataacctgaacacatcctccagtatactttaaaatatttctagagtacttataatattaatacaatgtaaatgccatgtaaatagttgttatactctactgatttttgtttgtactgttttttattgttatattgctattttttattgtttttttttccttccaaatatttttggtctgtggttggttgaatccatgcatgcagaacccatggatataagtgccgactgtactcaattctaccagtatagcaggaaggcacctgcagatgatatgtaaatgagcatagaaaatgtcttgcggtaaagttttatttccaaaaaaagatggcagaccagagttggccttgggactgtagtttactgacccccactctatggagtagcttaaactgagttggagaaccctaaatggggaaatcataggcttgttgtaagatacatattttctgtcttcaaggtggtaatggccatgactgtgaatgtgttggatctgtgtttccattccactgaaagaccctaggaccaaccagagattcattaacttggtaaccacccacttacacttcactttaacacccggtcatctttcacatcagaggggtaaccagagcctcagttgactgaatatagctccccgcctcctctgttccctggttatgatcgtgaacttgaggcagccagtggtgggggcctgtgttcatgcacccatattttatcaggatgattggacgtcctggaatagagaatacagaatccagcctttcggtgccaagcacaagaggcagggccccttaagaaagaagtgggggaaaagtcatcttaatattgtattgttgctgaagaaagacttctatatggatgtcatccataaaaaataataaagctctagttgcagtaaatggaaacaatatttaggcttattggattgttcaagggacatccgatttgccactctgccctttgtcggcaaataacttagacagactttaggatttaatgggctgtcatttcagttattctgcagcatatcccgggtacatgggagagcattcagtgattaagtgctgaatactgtctattgtgaagacttttggaacagggaacagagaaaaataactttccttccaacaacatgaaacatatggtttattaatttaaccaaacctgttcaaaccgcagtggaatcaaaaccacttgatctgataatttgatttgatggcttaattaaaatgacactgtataatgtaataaaagcaaaggaaatggagaggacaccgggctgcctgcataccctctaggctcctaagccgatgtcgtgtttttttggtgagtgttttttgcctctgctgatggagggatctcttttttagctatgttttcaattctaaacattgcttcctgttttggttaaaagcacttttaaaggacatgtaccaccgtgcaaggatgcctgagtaagtagcctatttaaaatcagtacattgagaaagagggtcacattttctatccaaattagcaaacaaagaagtaaatccatgactggtttaaaaaagagtttgacattgaaatcatggttttctgctattttgggagaaaatattaatgttgttctattttcagtttaatcatttctactcaccagattaatgagcttgaattacttatcttattaaaagaagctctgatatgaacacttaatgcctttgcaggcagctgccctcctagaaactcttgcagaaagttaccttgttactgccagaaacttttagcataggaaagtattaagaaaaacaaacttttcatgcagcccccatggagagtttttaacccccttctttcaaaaataactttgatttgtcattctttttttaacctggagtgtttaagaaagaagacaaaaaaaacaggtctgtttcaagacccttggaacatcctaggctctcatacttctgaaggtcctgccatattatatccaacatttttaaatgctcagacatttcatgattactctaagtttatgtaaatatatgagttggtgttaagttgcatttgataggttgacataatgttgatattttatagacttttaatgtagcattaaatattttgtatcaattgttgtagctagtaaatttcttttcatatgtcagacattttttctagctttgaaaagcttattgactctaggagtggtgcctgaaacacctgtggtcagaaaggctagcaagagagccgagtgccgtggcacgcgccagtagtcccagcttcttgggaggtagaggtgagcagttcgcttgagcccaggagtttgaggccatcctgggcaacatagtaagcctacgtctcttaaaaagaaaagaaaaagaaagtctgggaagaggtttttgtgtgccagatgctgtgctattgtttcctattcatagttgttttatttaatcctcaaaacaacctctgccaggatttgcttttcattcattaaatatttattgaccatctactataaaaaagttctaggtactagaaataaagttgaacaagggatggtccctcatcatggagtttacattctagaaaggagaaataaataaacaagtccactgatgatgggcttcaatgttgtcccaaagggaatcaaatcaagtcgtgtgctaagagcggtagagtgtggtgaggtggtggggaggagcccttctagggataaggcaagtgaggacagggagccagccccacagagatctggagaagaaggtcatttgcaagggccctgaggcatgggatccaacctagagcgaggtaaacaaagggggaagcaagatcagagagaagagctggagaagyaggcaagagcaactctggcaaagacttctcttggtaaagagttaagactgttaggagttaagatcttctagcagtgggaagcctctggagggttttaaagaggactctggaataatcacaacgtctataaacttattgttctggctgttwtgtggcgaatgcttgcagaggacttgcactggagtctgcaggaccctgcaagaggctgatggaaatatcgcaggttggatgaggatgatcatagtaaaagtataagtgatcattaggggtggactttggaggagagctttggagatttactaacagtttggatggaggggtgggtagggtgagcaaagtgagaaatggagtattattgtttctctttaacaagtgaggtgtctaacgttcagagagggtaagtgaatcatccaaagcctctcagccaggaagtggtagagctcagacgtgaaccaagatcctcttatgtccaaacgcaatatttccatcatccaagggaccgccatcttccacaagaacttgcaagtggtgcctctgtgttttggatgtcatcgggtgacttgaacaacacagtttagtactccttccctgaatgaaggagctttaaaaggaaacatacttgtgggaatgaggtgctcttaccttcctaaaagtcatcactgggctcagtctttatctgcttggcttttatctattttgtcaggttatcttgggtgctcagggcatagggtattggtcacagggttagtcctgagagtcctgcacccacttgatctgtaccgtggggccatttaggcagaagatcttgtgcatccttggatgaggagggcctaacacagtacctggtacatagtaggtgcacagtcattgctaagtgaacgaatgaataaataataagacaggataaggcagtgttagaatacagacttgggattcaagcatacctagactgaaatcctaggaacgattcactcctttgtgaccttgctcaagctaatatctaagcttctatttccttgcctctaaaatagagataataaggcagagcccagtggctcacgcttgtaatcccaacactttgggaggccaaggtgggaggatcacttgagaccagcagttcctgaccagcttgggcaacagtgagaccccatctccaccaagaaaagaaaaaaaaatttatcttttttttaacattagctgggcttggtagcacacacctgtagtccctaagctactcaagaggctaaggcagaaagatcacttgagcccagggggttgaggctgtagtgagccatggtcatgcccactgcactccagcctgggtgacacagtgagaccctgtctcaaaacataatagtaataaaatagagataataatcatacactctcttcctcagccagtggcctttcaaataagacttatagtacaggatcttggatatggaaattactctgcaaataattgtatcttcttatctgtaggtcagcaatagcttctttgtatgcccaggacaacctgttatatgtgacatgatcattggagaacgtatttcagaataagggtgccatgccctcttcctgttagaagtgtgaagccaggctgttcgaacttgtcaaaacctttctgatgaaatgtataatccttaaggtggtccacacatcaagtcctgtccccctctccagccccgtcttgtactttccttcccttggcatcctacacttcagtccagcagccattctgcagtcccagcaggctgttccctctacctggaaggcccttgtcccacctctgtacctaactgacccctcctcagccttcataactcagcgcaagggtcccttccccaaggaagtttcctgactgccttgacccagccacttgtttcagggcaccagtacctttcccttatagtacttaccaaagttgaatttttacatctgattatgcgatatgtgatttttccccctaatatccagctctcccactaccccataagttctgtgaggggtgagacttttccttttctctgtttttattggagagagggtgctatggtaactgttgactcctcagtaaatactggattggatgggttgttgggtgggtgggtgggtggatggatggatggatgaaaatgtgaatccatggatggataagaggatggatggatgtgtggatccacaaatggatgggaggatggatggatggatggatggatggatggatggatggatggatggatgcacatgtggatccatggatggatgggaggatggatggatgcatggataaatgcatggatccatggatgtatgggaggatggagggatggatgggaggatggagggatgcatggatggattaagctaacatatacatatcaggtggccaggaataaaaaattcttaccaaaagagtttgcacaattgggacatgtatgatgtagcccaggctgggtgctcctactggggagcattgccaggcatctgaagtaggatgtcatgccagtactacttcctgaaatcagagaggctcctgggattggggaagccaccttttactctgaccaaaagccaccttggatggaagcgtacatttcaacaaaacatggagcgagggcttttctgtctgcctcaaggaacagcctaaaagcagagaatggagtcacttaaagtgtcaggcactcgtgtcaggatgctctcaggcagaatcggctgttatggcttgggagcgtttgagctgatactggtagcagactccaggggccatctagtgttttcacactttacctaattacttaatcctctccatctctaggcaggtagacagagtttgatcttcaaggccaacttagcaaccctactctggctttctttgctcactagaaaaatcttctctgacattgggtttacttgtgtgggcaccatggtgcttgtgaacagcaatctggaaattaataaaggccaacagcttccttactcccagagcagcacacttcccctttttcactaactagcattcacagcctatgaaacatgaggctgcgagacattggtgtgcctctcattggagccataggaggtatctagctgggagacatcttccccattcatcccactcattattcctcaaacaaacacgggttggttgaagctgtttttcttcaggtatctgtccaggaatatggacagaacccttctttcctagggcataagaaacagtctcatctccctgcccctgaagcctgaaaatcaaagaacaactgttaagacccagaagagggagccccatgtggtgtcctcttgagtcaggcttttcttattccttctcagcacagccagtggttgttacggttgctggcttcactcctgggcaactctcttgactggttttgtgattcctaagcactggctgggaccgaaataagtatcttggctgtcacatttcaaatctctgcctgtgctgagaaggcgctgcctgtatgtctgagactaaatgctgtcaggtattatcaggtgcacagagctatgcaattctttgcttccgggctggcaccaggaaaggcttgccagaagagaagagccttctcgctgaggagtgtgctgactgttgaaaacttggttttcacccaccagctgctcttcagagcgtatggacctatttgccaggggcagccaagagactcaagtggctcagtccctgccatgtgctgaattgatgattccacttgggcccactctcgggcagtgcctgcccatagcctggtctctccatcaactgacagtctccctgtttccttcttgggtccctttgaccaagtcttgacctgagggcagtaccaggtgtgggaggccctgaaaccataccagatagggccatccttaccaaatgatcagttggttcagacgccacatctggggattgaaatgaggttggaacccaaacattggagttcatcctaccactccacccacactcagccagagcagagaacaagtaggagtagcaagtggccaggaagtagcagagatgcagagttaacaggtaaatgccatgcgtgagccaggacactrcttttaagcatagtaggtaccaagccgagcagactacctgtttccaagagaaattattttaaggctcagatggaaaacaaatgagggcaccttaaccatttgcatcataataatctagactcaagtatttctataaaatcccagctaaagccatctgtgtgggtcactggttgatttcctgacgtggctgttgggatcactaataaaaacagctcatgggatcttagatcttggatggtgtttggataccagtcttgtgttgctaagggcagctttagagctctattttaggtgacccgctgtttcttcatagtaaaggggactacaacattgtctcagcagtgggaagcaggagaaaaacatcgttatgaaagaaggacactgggcatttacccaccctagctccgcagccaggtctgtggttcagacactcagttggagcccttcactagggcaagacatggggagaaggtggaaggtcagaagcaccacgagggaaggatgctgtgctcaattaaagtgggataggtccgctttgctctcttagcaggaaatcacagcatcataaagttgaaagggagagaatgtaccccagggtacatggaatccagccttccacccagcgtccaagatgcacgcagctgttatcaagtgaggctgggaagatgcatcatcctgaactttgtcacctcccttagcgctgagctgaacaatgctctttcctgcacaggacatggacacctcccatggcctttagctctcagaggaagagggatatcatgtagaaaaaagaatccaaggaggtaagagaggtcagggagagcataatgtgggaagtcgaaaccagtgcttgaactggagaattgaatttctgcctctgctttcccagatactgcctatttctgttttctgagcatgtagctctgttacatgcacagcagagacagccaacaggataagaaacagttttcaaatttgctttcttccatggtaattgcaacacagagcatctaatactcatttgtttgctgagaaactgaattgtaattcagggcttgttcatggaaagggagatgtcattgtactgtgtagaagaaaagtccgcaggtaacaggtggcatcagtgaagacaccatggatttaaaacytgaaagcagttgtcctagcacttaggagaatctgggggcaactccgcaccagggtcccacatcggaagaaggtggcgggctagccagcaaattctggcctcggcagccagatccaccccgggataaaccccagctccagtgcttcctagctttgagacctaatcttgggccactctcctcctcattccctgctcacagtcacactagtttccttcccagttttctcatcacagggcctttgtacacactttttttttctgtctgacatacccaagcctccttttttcctctttcctctataaacacctactcattgttgagatttcagttcaaactatgctcagtaagttytctaagcaactccccaagtttaggtcagggttccttattaaacctttatacagaactactataacattttccttaaaaagcgtgtaattatatatgccttagtgctagatgggtttaaccattttggtgccatggactcctttagcttatcttctcatattgatggttttagatgcttaaaataaaatataatagattacagaggaagccagttatcctcagatattttcgaaatatctttaaaattgtactaacttacctgcttcttgatgagggcattaaattacaagatccagctgcagatctaaaaatcattataatgttgatataatgatgaacatgaaggaaattttgaaatgcaactgagtcctgaacaccatggagattggagtgtccacacaatcaaatatccagtataaattttgactctccaaaaagttaatacttaagccttaccagtaacatacacagtcaattaacacatattttgtatgtaatatgtattatatgctatattctcacaataaagtactctagaggaaagaaaatgttattttgaatattataaggaagagaaaatgtatttactgttcattaaatgggagtggatcatcacaagggtcttcatccttgtcattttcttgttgagtaggctgaggaggagaaagaagaggaggagttcgttgccctgtctcaggggtggaaattcacttataaattgacccatgcagttcgaacctgtgttgttcaagggtcacctgtattggtaatcactgtaatctaacaggaatagctttgtgatatcttttggtgattatcacacaagtctcgtaacactactgtagtttgttgccaacatttaaaatgtaaggaaatgctacatttttgttagagattagtgaacataaaagtggacttttttgctatctaagttcacaaacttctgtgaattctatgcagatctcctaaggacactcaaaacctctgttttacggagattctgttgttgatgtgtgttctcccactgggctgtcatctccagggggtcaggagcatgacaacatgtgttcacctttatccatagttcctggtcaagggcctgacatatggccggtgccgaataaatagttaacagtaactaattctttgtttgtttgtttgtttgagatggagtctcgctctgtcgccaggctggagtgcagtggtgcgatctcagctcactgcaacctccgtcttccaggttcaagcaattctgcctcagtctcccgagtagctgggattacaggcacctgccaccatgcccagctaatttttgtatatttagtagagacggggtttcaccatgttggccaggatggtctcgatctcttgacctcgtgatccacccgcctcagcctcccaaagtgctgggattacaggcatgagccactacgcccggctaacagtaactatttctaaagtacgtttgctatatgtcagtccacgtgcatttgtgcatttcatgcatttatcccagaagcttttacccaagctttatccaaggccacacaactggtttgtctaaaaccaaagcagtctgaccctagagtaagcaagtgaatgaatgaccctcttagatctaggtctctaaaacaagggtaatgatagagccagcagccccacagaattcccgtgaggatttgatgacataagctgtgaaatgttctaacagcccagagctgggctcatcagataggactcgttactattaatatgtcagtacagagtaggccgggcgcggggctcatgcctgtaatctcaacactttgagaggccgaagtgggtggatcacttgaggtcaggagttcgagaccagcctggccagcatggcgaaactctgtctctactaaagataccaaaattrgccaggtgtggtggtgggtacctgtaatctcagctacttgggaggctgaggcatgagaattgcttgaatccaggaggcagaggttgcagtgagccaagattacaccactgcactccagcctaggcgacagagtgagactcgtctcaattaaaaaaaaaaaaaaaaaagaatggcacagaatraaggccttggtgggtgggcactatagcagcaatctgtatatttccagcatcctgtcactccttgaaggaccatgagctccctatgcgtttctgatgggggaagaggcgattgctgcgtccagttttagagagacccgaaggagttggaggctgctctggaaattgtcaagagaccccacattgtcatttgtcattgagaactgagaagggagtggggatggggaaggatgaaggagaagggaacgggaaggaagctttttacctgctgggacagctttccccttttaagctcttggagtaatgcccctgacatctttattagcatcttgaagataggaaaacagttacgggacgtgtatggggcaagtacatacatgactgctccatggagtgccctgtcaactctggttcagactcaggcagattgggattcagttctccattctcttctcactctggttccttggcccagcccagtaacttggtctctctgaagcccagtgtcatcatctttcatggggtgaatggagcccagctctcggattcggttatgcgttgtgtgcgggggatgatccgagaggaatgcacagagccgggcccagggcatgtgcgtggcagccgcagctccagctagaaatgattcagatggaaatgcacattacactggagctggggtcctgctttgattccatcgttcccagttccttcctccgtgtggtttgcccatcttgagctcttgggcagggatgggggaggcaacaccccaagcaccaagattccaggtttgaagtcctacgcgggctgctgaggaggattctgtgtttacctagacctctttcatatagcccttcaaaaagataatcactccctgaggccatttctctggaaatttcccttaaaggattccatatttgaaggtgataaagaaatgacaggcatttaagcagtctaaggcaaggcttgggctctcttccacctgactggttccctcctgcttttaacaggaaatgcctcctgctctttctccccaccagggccaggcagtccccaagaaacaggcatctcccccacggtcgtctgctggcttaagccaagctgttccctctgacaccgcccctgtgtggcatatgatgtygcaacacctcccacccaggaagcagcagtttcatctgtgttgacaggcactgtgaaatagtgaatctgcaccgaattggtttgtttgagtagtagtactgtctctttgactcctgatcaatatttggccagttgcgtcgggtgtgaaactccgagggggcaggtgctggaagaaggcccctggaggaaccttgaactgcagatagtktaaggcacttggaaattacactgactttcagacagagcatatcacattagtttatctaaagccccaaatgaagaggatggggtgggggtggggagcctactatttactgtggaaccactgagaaaatatccttgacattgatttaggatcagaggaccttgggtgctctgctagaagactcttcattacttaaggaagcctgggatcataattaaaggtggttcagagtgaaggcagaaattctcagagctggtgaggagcagtaccttcatgcctgtgagaagcaatcggaccccagtgggaacataatcaggcccctgaaaggggaaaggctgttgtcaggaggcctcacaggggatatttgtttagagatccgggtgtggcacctcccgcatggttaaaaggcttcaattttgtgcaaaaggacgtatcaagaggtctatcagacttccctttgttaggtgcagtttacaaggaccattgagaagagatagataagtacaagtattgggcatctgtggtgtgccctcgagagtgctcctggtgttcattttagaccagtagaaaactcacctcgccttgggggccagagagctgccggggaagtgggctgagcagaggcaacggggagtggtggagactatggcaaaaaaaaagaaaaattgagtacacactcccatctaaaggaaatggttgctctcctgctctagctcaccactgccacgtgtggatgcaggcgtgattttaaagcccatatttatatgtaaaatataccatttttttaacactgtgtgggccatagagtgtgtccacgtacttgccattgggcctgaggcccacaactttgggtttatccacagtgttccctcgtaatcctcactgcaaccttgtgaggaagataattgctagaccctagtcatccattttacagatgcggacacaggatttgcatgggtctggctccaaagcccacactttctgttataccagctcttccaaactgatctatagaattctgttttgctgcgtttgcctgtttcctttttggacttttgagggaggtgttgtttgaaagaagggtttccatcacttaaagagcaagcagaactttggaagcacaaggcacagtggtgtctgcctgctcgcttgcctgagttatttgacgggtgtctggtactatcgttgccccagtcgccaagcatcggtggtttttgttccctctgtagactgaatgcttttcttattagcagaaggcatgagttaaagaccagagacaagatcctcaacacatttgaggctcctggcagtgaccccaggaatgaattgtgtggcactgattttgtacatggaatcctcttcaatggaggacgctcaaaacagcatccctcattccgtcagagaaacgcgagcccctgccaagggtaccagtgataaggagcttggtggtccctgcctgggagatgcttgcagctcagtcagggggacacagaggtgggtaggtggtgaggacagagggtgatgggcacacagggtgaggagggaagcagtgagagtgcaggaggacacgggtggcccatcggcctcagaggggaagcagggtgttgaagctggatttttttcttttcctttttttttttttttttgagatagggtcttactcggtcacccaggctggagcacagtggcatgatcaaagctcacggcaaccttcacttcttgggttaaagtgatcttccaccttagcctcctgagtagctgggactataggtgtgcgccaccacacctggctaatttttgtgtttttttctagagccggggtttcaccatgttgtccaggttgctctcgaactcctggcctcgagcgatccacccaccatggcctcccaaagtgttaggattacaggcgtgagccaccacgcctgtccttgaagccggatctttaagggggctggggtgggggctggccagagatgcgtccatgaagaggaagatggcaagccatgaggctgacgatgtggaaggggaacatgtcacacaggacctgtggaccacgggaaagactaaggctgttactccatatacaaccaactttctgttcattcagcaagtattgattgagagcccactacgtgccaggcactgtcttagatgcaaggtaatgaaccagacaagacagaaaaggcgccagccttgtggagcttccacctagtgggggagatagataattacagatcgtcaatgaagtcaataatacaactccacgtactagtaagtgctgggaagaatctaagctctgtgaaggagcaggcctgtcagcctgtgcagaggggcagaattcagtgccaagaatacagtgcagttgataattgtgtttcaaaaaaaggcttggcctctccttactgtcgcaatctgggatcagcactgatccacgggccgaaacttactccccaccaccttttgtgtaaccatgagctaagaatggtttctatatttttaaacagttggagaaaaatcaaaagaatattttgcaacacatgaaaatcctatgaaattgaacttgtgtccatagatatttctgctggagcacagccacactcattcatgtttacatactatctgtgctgctttgtgcttcaaaggtggaatcagtagtggttacgagagaccatgtggcctgcaaagccgaaaatatttactatctggccctttacagaaaaaatgtttgccatcctctattctaggccctcctagtactctgcaaatgcctcctccaaatttggcccagtakagctagaaaaagccactacccaggatggggggtagagaacagaagagacatctctcatcagactgctcttcctatagctcctcagcctgcaaagccctggcctcatgctcctcctctcgtgtaatcagggacaagcatggatctttggaggccattaagttacagaattcccttcctggcaggtgatccygttagagcgaggccagatctacctcctttgagagcttaactcagtattttttaatacattgagacagtgagattctgtaccatcattcaagacaatgacactaagctctacttattgacgaggaaatatacccatgagttgttgagtaaaacacaacaacaaaaaattctagggccagtcatggtggctcacgtctgtaattccagtactttgggaggccaaacagggaggatcacttgagcccagaagttcaagaccagcatgggcaacatagtgaaaccccgtctctattttaaaaatttaaaattagctaagtgtggtggtatgcacctgtagtcctagctacttaggaggctgaggtgggaggcttacttgagctcaggaggttgaagctgcagtgagccatgatccagccactgcactccagcctgggtgacagagtgagacaccaccacaaaacaaaaccaaacattccattctagtgccatccacatcctattctatttctatcaattgtgcgtatgtactttcacatgtatataaagagataactgcatgttggagtcccagaatgttcacaatcgttttctctgggcactgagatttggggtgaattttttcttttaactttctttttacttttttgtactacttgggttccttttttaaaaaatattaacatgaatcatcttaatgcacacagaaaaacccatctattttaatttcaaaaaataagaagaatggttgcatctgtatgtgggtgacagaattatttatgggggtatgatgtaactgtcagagagggatgcttccccatacagtgttcattgctatttggagcaggggaatgaatgctttcagaatgaggaagataaataagaacatggtgggaggtgagaaaagatagagaagttaggaaatctgagatggtcatcattatgggatatagaagcttcccaatatgtacatctcggttcgttattagtatttggaacgctgggggtgtagctatttcctgatctttcccccgcctcctccgtgttctgtcttgaaaaactatgaagccacttagaagccggagtatttaaaaacagtaggttggcgccacctagtgcccacgttctgtcactccgccctcatgtctccgtggaagcctcccttcagattctttgtttgatgtcccttctctggtggcatttgcgcagcggacagcgtgatgcctcccaggggttctgcggggcagtgggaatgacccactaatttatcccttcctccctccctcccttccttccgtttctgtcgcactaagtgaaccttaccaactgaactggggtttggcagttgaagagtaaaaggtggcctccctgtcaaaaccaatctacttttctccaccggccaggtcctcaaagctgggccatgcgtctctggcaggaaagccatcctgtcsccagagctgccttgggttttgggttcttgagtaggaaatacgggagtctggttcctggtgggctgcagggcatgtgggtggtctttggaagatgccagcgggtcagaaccaagccgtggtcccctggcctgtctctgccagcacgcccgcttacttcttacccggttcctgcacccaaaccagaaggtcctcctcaccctcccctgccctccttacccggcacatcaccaggcctctgcgttttacctcctaactgtaagctctaggacctgccattcctccctggtcttccagcaattggccattgccgcccctcctcacaggccccctcctccacacttggcttctctggggccttctacactcagctgaagttcaggggatctttgtaaagcaccaacctgattgcatcactctggggctcagttctttccaggggtgtccaaggactcgtgggagaaaggccagagttcaaatctggccccaaggcttctcactgcagctacacctgtgccctgcctgcctgtcttttctgtgacttgctccagcccctcagaccttcccaccggatccctttacagctcccacccccttcatctccataagctctcagctctcagttacatgaaccttcctcaagggcatcttccctgggtgccaaagcccgagccacctcttcctctccctcctctccctccatcctgtcctggcgtgcagtgatggctctgcgcatgggattctttggtgagcctccatctcttagagtggaggttctcagccgaaggtgattggcccctgcaagcaacctttggcaacacctggagacatttttggttgtcacaagttgaggacggggagcagagctactggcatctagcagatggaggccagggatgctgctatacagtacacaggacagtccccaagagcaaggcattgtctagctcaagaggtcatgggtgctgagggtgagaacccctgccctggaccatcagctccatgaaggcaggcagcacggccacacgggtctggacacccctgagaaagcacacatttccggctgactggattggacctgttgagcatttgtataactcattcagacctgtcaaggtctcaacactttcataggtttgtctgtaaatagatttagatccaccgtgtcccttaaacctctcagccccaaggaataagaagatgaatgagcctgacttttccttacaccccacgtcaggataattacacggggttctgctgttccagagaaagtcatccttgtgttatgtgactttgctttaaaattatttaaagtctcatcttaaatttatttatttacactcggacctgtttacaataagatttcgtctacaattttagttagcacactccaccagtccaacggcctggcttcttcaaaacgtccatcatgaagaaaaaggctgttgaccatgaggctgaagtcagggggacacagtgattaaggatcttttggagacagcggggaaaatttgaatatggactatatatgagataatagtattgaattcatgtttagtttctttcatgtgaaactggtattatggttacataggagagtgtcctcaatcttgggagatgcaggacagagtatctagaggagaagcgtcagaatgctgcagtgtttactggcctagcagaaaaacagttctgtgtgtgtgcgcatgtgcatctgtgtcccgtgcatgtgtgtgtgtgcatctgtgccccatgcacatgtgtgcgtgtgtgcgtctgtgtcccgtgcacgtgtgtgtgcgcatgtgcctctgtgccccgtgcacatatgtgtatgtgcatttgtgtcccgtgcacgtgtgtgtgcatctgtgtcccttgcacacgtgtgtgtgcatctgtgtcccgtgcacgtgtgtgtgagagagagggagaacaatgttctccctctctctctacacacacaatgttaagaggacccaggagaagggagcatgggtgcttcctgtattactctttcaactttttgaggctgcagtccttaggggcacggattgaatggcgcattgttctgaaagctccctgagctgagccctgtgtatcttcagtttgcagctctccacccatccacatgaaggtgcagcctctgaaccagacggcactgcaggtgtcctggagccagccggagactatctaccacccacccatcatgaactacatgatctcctacagctggaccaagaatgaggacgagaaggagaagacgtttacaaaggacagcgacaaagacttggtatgaagcccctcctctgattcagggtacatgctgcagagagggactcctgctgcagctctctgccaggcactgcacagtgtgccagctctgtgtcatctgtcctcacactgtctggtgaacatgggcactgccattgctgcgctgctcgagagtgccggggaggacagtggatggagcctgcctgggcgccatcctgaccttagacttaacagctatgcaacccggagagccggttcatttctttagattggttcctttaaaactgactgctttttctttcattattaacagcctcaattaggcccttttcatctgatgggattatcataaatactaaatgagctatgcaagtattcaacaggtcctatataactgtataaatattaactattatttattacgatcattctcctcttcctcttcccctactaaagctactgctgctgatgtcaccaccaccactgtccacagtcgctgccacttccctttgtcacatttgttctgccttacacatttccaatacctgccaaacccctacagctgtgtaatattttatctcttttctcagatactcaaatgctatactatctgacctcactttgggctacacgtgcctaattcaatgtctcctctaaaaatttacataaatgtttagtgtccaacacacaagccccttcagaacagatgtttgcagaagccatctccttccctataaagcaaactccacaactactgtcttttttttttttttttttttttttttttttttgagacagagtcttgctctgtcgcccaggctggagtgcagtggcgcaatctcggctcactgcaagctccacctcccgggttcatgccattctcctgcctcagcctcccaagtagctgggactacatgcatccgccaccatgcctggctaatttttttttgtatttttagtagagacagggtttcaccgtgttagccaggatggtctccatctcctgacctcatgatccgcccacctcggcctcccaaagtgctgggattacaggcgtgagccactgcgcccagcctacaacttctgtctttaagtctttgcctaaaaactcaaagtgacacatttggtttgaaagccttgcgtttattgttaatcaaaggaaggctctggaataatgaaacccgtaattgtatatgcacatgaaaaatgcagtagcaccaagtgggattcttaatgactgttatcactttttttctccaatacagagtcctccgggcccattcaatcagttatagaataatacttttcatatttctttagatgaagattcttttacttcatttccatttatattttcaatttccccactagacattgttatctgggtcacgttagggaatgatgagcttcgtgaaatcaaagaggaatgtgttgaaaggcacccaaggttatgatgtattttaacctttctcttgtcacaactggaagtccataagggatttttctctttctggagtgaagatggcttgcattaatcagcagaaaccatctaggcgcttatgcagtttcttgttctaagtggaaaataattaaacatgcaaagatgaatagataccgtcttggagtgaattctaataaatccctgcatagatggagtgaagatttcgctctgaacagaagatggggtcagaggtttagagaatgaagcataaattagtttcagagaaaaagagagatgtagagaaaaacatgcattgacagcaacttctttcttacaagaatttctagggctggttattttctttggggacacacaaaattaatttttctaattcctcagcgagtgaagagtgctgacttagtggcaacagagctattctctaactcatcatggttattgtggcccagaaacctggaagtaatacatatcatttgagcagcattttctagagggcatccaccttccgcatcgtcaccacaaacctgtgggcaggtgttattgcccgccttttccaaacgagatcagtgaggcttaaagttaaataacatggccctagcctacccctctcactaggaagctgctttcaaggcaacagcagcaggtgtggccacaataacattttaataccagttcagaggttttcaatagctgcgttgggaaaacccactcccaatcggtggctaagctcacagagctgcttctatacttggcccagaacacatgctttgatgataagacaactcatctattaagaagagtctttgaaaatcagttgcttttgttgttcgtttctttaggaagcaagtgctgcctgttttttaggtagtttccattttctcgtttttaaaggctgtcagaatgaaactgtgaggaagagggacctggatttggctaatgtttgacaagaggttggcaaacttttttctggaaatggctacatagtaaatatctgaggctttacaggtcatggaatctctggcataactactcaactctgccattgtagagtggagggagccatacacctacctaaacaaatggccgtggctgtgccaataaaactttatttataaaaacagacagtgggccacagcttgccaacacccctatgttagccaagtggcattctttctgttgctcggtgtggtctacctctgagcaaggtttgctgggcctatgttatgtaattctcacaagtacctatgaagtagctcttcctctccccattttacagaagatagcagaggctgaaagaactgactcagaaccccacagcttgtgagtggtatgaggagactatgtcctctgccttctagcctggtgttcttccttgcatcatgccccatactctgcgtaataaaaatacagcgaggcctttgaactgtaaagaaacagacctgggcaggcagggtggctcacgcctgcaatcccagcattttgagaggctgaggcgggcagatgatcgagaccagcctggccaacatggcaaaaccccgtctctactaaaaatacaaaaattagctgggcttggtggcggcctcctgtaatcccagctactcgggaggctgaggcaagagaatcacttgaacctgggagacggaagttgcagcgagctgagattttgccattgaactccagcctaggtgacagagtgagacttcatctcaataaaaaaaaaaaagaataatgttactctttcctgtgtcctgaacatttcggtgttgaaaacaggttcccagggaagctcataaaaatagattcccaggcagggtccaagcggtctttccttccaaagtgagcctttggtcagcagggaagcatcacacctgtcaggcattgtcacggcactcaggtttggctttagaatgcaaagtgtgccttggccttcaaaactaactcactgctttttccttctttacttacagaaagccaccattagccaygtctcacccgatagcctttacctgttccgagtccaggcygtgtgtcggaacgacatgcgcagcgactttagccagacgatgctgtttcaaggtgaggctggcttcccctcctgtggccggggtgcccctgagactccctcccaatgctttctgcttcttcctgctcaggtgctggggaaaaatacaaacaagcctggcagaagaatcagtgtagggttttaaagcctatgcgggaagccctagtaatttaggtcttttaggttggaggttttatcggcagaagaggggagaaaaaacaaaacatttttgattgttttattgttattttccaactgtggggaaccaagtactcgggcctttttctcggtcactgtccagcgctgtgtcagatcacacaatcacttccaagttgtaccgctgaatatcctctttgtctttctaacgtgattcagttagctgttctctcaaaaactgcagcccatagcagctacacctcacccttccgacttgcaagccacacaaacaagcgcctgcatgcaggatccttgagattcctggatctagatagatggtcctgatgacttagggactaatagaaaggtccagggccagaactagggtgaagcaaatgggacatttgcctttgctcaaaattttaaggggcaccaaaaaattgagtgaccaagagacataacattttagtgggattttttttgtttgtttgtttgttttgagatgaagtctcgctctgttgcccaagctggagtgcagtggggtggtgttggctcactgcaacctctgcctcctgggttcaagtgatgcctcagcctcctgagtagctgggattacaggcacctgccaccacgcccagctaattttttgtatttttactagagacgggggtttcaccatgttggccaggctggtcttgaactcctgacttcgtgatctgcctgccttagcctcccaaagctctgagattacaggcgtgagccaccacgcccggcaatgggatgttttttaaaagcaaaattaggctgagtgcggtggctcacannnnnnnnnnnnnnnnnnnnnnnnnnnnnnnnnnnnnnnnnnnnnnnnnnnnnnnnnnnnnnnnnnnnnnnnnnnnnnnnnnnnnnnnnnnnnnnnnnnnnnnnnnnnnnnnnnnnnnnnnnnnnnnnnnnnnnnnnnnnnnnnnnnnnnnnnnnnnnnnnnnnnnnnnnnnnnnnnnnnnnnnnnnnnnnnnnnnnnnnnnnnnnnnnnnnnnnnnnnnnnnnnnnnnnnnnnnnnnnnnnnnnnnnnnnnnnnnnnnnnnnnnnnnnnnnnnnnnnnnnnnnnnnnnnnnnnnnnnnnnnnnnnnnnnnnnnnnnnnnnnnnnnnnnnnnnnnnnnnnnnnnnnnnnnnnnnnnnnnnnnnnnnnnnnnnnnnnnnnnnnnnnnnnnnnnnnnnnnnnnnnnnnnnnnnnnnnnnnnnnnnnnnnnnnnnnnnnnnnnnnnnnnnnnnnnnnnnnnnnnnnnnnnnnnnnnnnnnnnnnnnnnnnnnnnnnnnnnnnnnnnnnnnnnnnnnnnnnnnnnnnnnnnnnnnnnnnnnnnnnnnnnnnnnnnnnnnnnnnnnnnnnnnnnnnnnnnnnnnnnnnnnnnnnnnnnnnnnnnnnnnnnnnnnnnnnnnnnnnnnnnnnnnnnnnnnnnnnnnnnnnnnnnnnnnnnnnnnnnnnnnnnnnnnnnnnnnnnnnnnnnnnnnnnnnnnnnnnnnnnnnnnnnnnnnnnnnnnnnnnnnnnnnnnnnnnnnnnnnnnnnnnnnnnnnnnnnnnnnnnnnnnnnnnnnnnnnnnnnnnnnnnnnnnnnnnnnnnnnnnnnnnnnnnnnnnnnnnnnnnnnnnnnnnnnnnnnnnnnnnnnnnnnnnnnnnnnnnnnnnnnnnnnnnnnnnnnnnnnnnnnnnnnnnnnnnnnnnnnnnnnnnnnnnnnnnnnnnnnnnnnnnnnnnnnnnnnnnnnnnnnnnnnnnnnnnnnnnnnnnnnnnnnnnnnnnnnnnnnnnnnnnnnnnnnnnnnnnnnnnnnnnnnnnnnnnnnnnnnnnnnnnnnnnnnnnnnnnnnnnnnnnnnnnnnnnnnnnnnnnnnnnnnnnnnnnnnnnnnnnnnnnnnnnnnnnnnnnnnnnnnnnnnnnnnnnnnnnnnnnnnnnnnnnnnnnnnnnnnnnnnnnnnnnnnnnnnnnnnnnnnnnnnnnnnnnnnnnnnnnnnnnnnnnnnnnnnnnnnnnnnnnnnnnnnnnnnnnnnnnnnnnnnnnnnnnnnnnnnnnnnnnnnnnnnnnnnnnnnnnnnnnnnnnnnnnnnnnnnnnnnnnnnnnnnnnnnnnnnnnnnnnnnnnnnnnnnnnnnnnnnnnnnnnnnnnnnnnnnnnnnnnnnnnnnnnnnnnnnnnnnnnnnnnnnnnnnnnnnnnnnnnnnnnnnnnnnnnnnnnnnnnnnnnnnnnnnnnnnnnnnnnnnnnnnnnnnnnnnnnnnnnnnnnnnnnnnnnnnnnnnnnnnnnnnnnnnnnnnnnnnnnnnnnnnnnnnnnnnnnnnnnnnnnnnnnnnnnnnnnnnnnnnnnnnnaggcctcctatgtgctccatccaagagcctagaatctgcagaactgccttacctgattaatagacccagggctccctggcttctgcatggactttgaaaaattaaatgtttgtaatataatgtaattcaaaaaggccctgtcagctaataagttcaaagcatggaatagtttaaatgtctgatgacgatgacttgctgaaaatggccagtgtctccttgtctacagactttctttcctcagaggtggacgtgagtttactcattacatatattggcatttatccytctatgttgataagggggcaagttttaaaatggaaagaaaaaagatatctcctttttcagaataattaggtttctcagtaataaatttaatctggcttgggagcattaggaagccacatggaatatttaccatattatagtaaatataacactatttaggttgtatgtaacattgcaataaatatgtttaccttactgtggaaaatataacaataatataacaataataatagcaagcaatatttgtagaatggctcacagtgacagcattgttacataagttatttcatctgaacctcactttatggcagctggtgcagtaggggttattttacaaacagggaaatgatggcttgggtgcaggtgacttcagaagaactctgctactaagctgagttgggttttcttattgcaaagcccaatcactaacacacagcaatggcccaccccaaagagtaaaaattaccaaatacctgcagtcttcaacaaaaggttgaaaatattgatgagatattcaaagcctttttgcagttctcaacagtcatggaaaatgggggtttatatgcttcttctctgagccacagactcatccgtggcaaagcccatggatcctctctcagactggttttagataaataagtgaaatacacaggaaaggaaccaattatattcaatacagttgtcaaaatattttaaacacatttgggatataataatatatgtgctttttaaaattaaggtattaaatgacaagtggttggtctgttagctccagtgatttttgaatagtgacgaacatcaatgatattccaaaatagctacaacaactctaaggcagtaagaaaatatctgagatttcaatcagagacaaagctgcaggtcctgcgaatgcagttgagattggttgcctacatgcatagtggaaaaaagggcaccattgcagtgagagcttagaaaaaccccattaggcccatggaccctaggttaaacactcctgatctgaaaggtcctgtagaagctagtcctagttactagggctatcagtgaccccagtggatattgaccccaatggagattgttcaagaccagtggaaagccacatgctgatggggtggctgttcagtttgttggcattaaatagagctccttttaaaggggaggtaaagtagttcctcctgggaatcttttttcctgtcttaactaggggaggcatgcacacctgtctgaagcatgaagtattgatctttgagcagctcaatgatcatgggaggctatatttaggctgggtgagacccctgttatttgctttctttgctaccttatttgacctgggacctacacacgtttgactttccaactgtgcaaaatggatatatcatcaggtcaaggttgcaaactctggcatccatggggccaggcagggggcatgtacacatgaggggagtgccatcagtgggaaattggagaccatgtggccacctaaagggggtgatggacactcagccccagccgaatggtgccctgctggaaggtgagcctagttttgccaatatcgtgagttttcagataagcaagagattgagagctttagataaagctaccatctacaatattggtggcaaattctgttttgttttgttttgttttgtttttatagaagtttgcaggccaaacaaaaatatatgtgggtcacttgccatttctggttttggtacctgtcatagcaggtacaagtgttattacagcattttcgctaatctctcagtgtatataggaagcagcttttcagtttatatagcacttttgttttttgaaagaaccacatagaagcagtttgatggagtttttaaaaagtcatgttgtttagcattatttgcaatagccaaaaggtgaaagcaacctaagtgtccattgaccgatgaagggataaacaaaatgtgctatatacacacaatggaatattattcaccctcaaaaaggaagggaattctgacacatgctgcaaggtggatgaagcttgaggacgttatgctaagtaaaataagtgagacacaaaaggacaaatatgtatgattccacttatatgaagtatccggagcagtcagattcatagagaaagtaccgtgatggttgccagggttgggggaaggaagaaatgggttcttcaatgcgtgtagagtttctgttttgcaagatgacaaagttctggagacggatagaagtaatggttgtacaactgtgtgaacaaccttaacactactgaaccatacacttaaacatggttaagatagtaattattttattttattattttattttatttttatttatttattttttttgagacaaagtcttgctgtgtcatcaggctggaatgcaatgatgcaatctctgctcactgcagcctccacctcccggattcaagcgattctcctgcctcagcctcccgagtagctgggactgcaggcgttcaccaccacacccagctaattttttgtattttagtagagatgaggtttcatcatgttggccaggatggtctcaatctcctgacctcatgatccacctgcctcagcctcccaaagtgctaggattacaggcttgagccactgtgcctggccattttgttaaactttaagatgataaattctgtcatgtattttaccgtaatcttaaaaaaaatttttttctaagttatattgtttaatgataacacatagaacagagctacaggaagaaataaacaccagaaagggtaatgtatggttaatacgaaatcattagaccatttaaaacaattggcagtagcttacaggattttaaaatataggtaggaataaaaatataacagtacacaaaaggtaaggtgggcaaatagagttaaattattgtacagttcatttttaataagtggtgaaattaccaatttaaggtaaacagtaataagttaaggatggataattagaatcacaaaaaggataagaaatcatgaccaaaaagatagtagaggaggaacaatggtgtaatacgattccagttaaatcaagttcaaatacaggtaaaactgacagagtccaaatagtggctagctttgggggtggaggtggacattgactagatgagggcacaggtacaccttttctctagcaacgtgctggcgatatgtctttatattactgtggggagtggttacacaggtgtttacatatgtaaaattcattcaactatacacctatattttatgcattttaccgtatgtaagcttttacctcaataaaacagaaaacagtaaaaattgaaaaataactttttaactaatagcttaagacaggggtcagcacgctactacccacaaaccaaatctagctctccgcatgtttttgtaggactcgtaagccaagaagggctttatatttttaaatggttggmaaaaatctacagaataatattttgacatgtgaaaattatatgtaattcagatttgtgttcataaggaatatcttgttagagccacaaaaaaagttatattgcttaaatgtaatttctttgtttctcagctaataccactcgaatattccaagggaccagaatagtgaaaacaggagtggtaagtagagaatgggaaattgctttgtcgtggctggttgttaatttgcttgcagttaaaactgtcaccacgaagtggcagtataatgttgttaaactgctcagtgtaaagcggttatagtagagaaaaaattacattattcactttttataattcagtaccttatgaacacaagctgtgcaacagtgttaggtggttatattatataattttgtgaaggtaaaaattcttcatatttttagttatgatttgtgggatcagacgatgcaggaccacaaaggagttaaatctgttccaaccctttcatttgacatatactcaaattcagaggttgtcatttgcgtaaagttatatggatctgaaaatttctggaaccagaattaatatcttagtttccccattcctggttggtataatgaataattaaaatactaatcacagcagtggtgataataataatagcctaaaattcactatgctcttcctgggtttcaggcacagattattttatttacttctccaggcagcccacaaggtcagtgttactgttgttcccgttttacagatgaggaaaccgaggctcagtgagttaaagtaatgtgtccagcatcacccagcaggcaagctaaaattagactaatagctcagagcagcacttcttgttttcctaagataccttatgtgagtaaaacccccagacttgagccccagtttagtatggtggtaagaacaagccgagtcttagacccaggcagccctgcatttgtgccttccaggtcatgtaccttgtgtaagctctttaacatctctgtgtctgagtttcctcacctgcaaaatggggtgatgatcatgcctgcctccagagtagcatggaaagccctggcacacggttggcatttgttaattggaattcttgttattgttgttgatgttgttgtcatctgtatgggctcagattttcccacggatcaacttagaaactgcaaggtacagtgactctgcagtgcccaacatggagatgcagagatgtaaaccagtgcccagagcatgcagtgcagagcatggctcctgcctctgaccctgtcattgcagacctgggcaggctgctttccctccttgtccacccacttcctcactgggagacagtggggttggactggatcacccagtatctttccagacctagagctgagtatctactcaagtgtcagtgatatacataaaatcaaaggtcttctgcctctcatcaccccaagaacagatgaccatctgatttttccagttcatgacttctttgttgtgtaagtcagctttaacactacttagtttttttggcacctagcctcatcttgggtaatatcagtgaaaagctgagtttgatcgactagttatgcrttttaacatgttcacaattataaaaccattaaaaataaaagttgatcacccatggaccacctaatgtcaactttatgccatacattggaaaactccatagcatagatgagtaaaatcctcagagggtgacaaccagggcctcattcccaatctcaattactgatgcttctctgctttttcttcttctgcctcttttccacccttgccgggtgaccctttccagcccacagcgtctcctgcctcttcagccgacatggcccccatcagctcggggtcttctacctggacgtcctctggcatcccattctcatttgtttccatggcaactgggatgggcccctcctccagtggcagccaggccacagtggcctcggtggtcaccagcacgctgctcgccggcctggggttcggcggtggtggcatctcctctttccccagcactgtgtggcccacgcgcctcccgacggccgcctcagccagcaagcaggcggctaggccagtcctagccaccacagaggccttggcttctccagggcccgatggtgattcgtcaccaaccaaggacrgcgagggcaccgaggaaggagagaaggatgagaaaagcgagagtgaggatggggagcgggagcacgaggaggatggagagaaggactccgaaaagaaggagaagagtggggtgacccacgctgccgaggagcggaatcagacggagcccagccccacaccctcgtctcctaacaggactgccgagggagggcatcrgactatacctgggcatgagcaggatcacactgccgtccccacagaccagacsggcggaaggagggatgccggcccaggcytggaccccgacatggtcacctccacccaagtgccccccaccgccacagaggagcagtatgcagggagtgatcccaagaggcccgaaatgccatctaaaaagcctatgtcccgcggggaccgattttctgaagacagcagatttatcactgttaatccaggtaagtggtgcaggtcttcttcgagggttcctgctcctgtgaatagtcgtaccctttttcaaaaaattgggagcagaaggtgaagcttcagaaggtacttaatattcttagaatcatatatgtctgtcatagaaaaggtgcacacatgtgaaatgtgtatgtgtgtgtccctgttttactccaaaagcctactctcttacgctggagtaagtctttctttgatatttgttttcttgcctcggaataactccagggacttcaaccaggcaatgatatacatgaataaaaaaagccatcgatcttaagaagtttatttattaagatttcattccatattcattatataatgtatctacaaatggctagtttggtgccagggactgggcagggtgctgtcccaggggatcctagtccctgcctaaaaagtttaaaggggaaggcagacagatgacaagacagtagctagctggagcgcatgcccagaagttaggtagcaggaacgttagaaagccagcaagctagatggtggttagtcggcaagctagatggttaactggcaagctggaaaactaactaactgaagttttcgattgtgaaatggtaatagaggaaataamcaggatgctgtccaagagaattatggagaggatagggacctaccttaattaagaaaggccactctggagaagtggcttgttcatggaaacctacagaatgaaaggcttcagcctggggagagctggtattggcccatggtccttgcccaagaaatacggccctctctcccagagctcccattgctgtgggaatgagccagtgtatagacagtgaggccagggcatgagatcctcatctcctggtggcaattttgttgctctatcatatgctcaaatcttaatgaaccatcctgatagtttctgcaagggagccataagcatgaggagttgttattgttgtgagggcttttcttaataagaaattcttcattttgccagactacaagatgtttagcaacaattttttttgcgtctaagctgttgtggagttataagagtgcaaaaaaaaagcaactggtaaatatttatttgcttttgcacttgtaaacattaaaattcatctaaagctgagatctcgtatgttaagatacaacttagaataaattttcatgttttgaattactttcctcttaaagctgctatgaactaattttttgaagtgggggtctcctgtgggtattgctcactttagctgtgactgggggaaaggtgcagagtagccttttgtggaactgagtgaaggaaatgtggggccacttgggaagctgtttctgtaagaacagtgacattccctctaggaattactttgaaaaagttgaatttcttgcatttgaagacgctgaagaaacatgtacggaatgcccactgtataagaggcaccaggctaggctttggcagtagaacataggtaacacagacttctcttctcttggggtttgcattctggtaggggagcttgagaatatgccagtaaacaaatacatacccttaagtagccttaattgctacagttggggagcggagggacagtgtagctctgagtggtcaaggatgacctctgagcagagagccaagtggtaagaaggagctagccatgcaaagatccagggaggggaattctgggctgcaggaacagcaggtccagagaccctacagtggggaattaatttggatcagttgaggagctatcaggccagtgtggttagaccagagggagtgagggggagaggaggggatggatttagagattgatggaggtgctctggaaaggtactcgttgaccacgctgaggatttccttctactagaaatgagaaaccagggtagatcttggctgcagtgttacttgattgattttttgaaagacctctcaggcctctgcgtggagatgatataggaaggcaggaatggatgaaagaagcccagttaggaggcagtggtaatggtggcttggaccagtgtgttttctatgaagacaggtggtggacttggaattgactttcaagcttgagtgttcagccttctggactatgggcttctggcaaagtagcattctcagcctgctcctcttaaacatnnnnnnnnnnnnnnnnnnnnnnnnnnnnnnnnnnnnnnnnnnnnnnnnnnnnnnnnnnnnnnnnnnnnnnnnnnnnnnnnnnnnnnnnnnnnnnnnnnnnnnnnnnnnnnnnnctgggaccgccccaggtaagtggaaatgagttcttgccattggagtcaggttccagattccagagacaggggagaagaaatggatggcaaactttgggggctccctactccaggtatgaggtgtgtaggtcctcggcttccaccctacagaaatctgagagcatctacaatcttggcagagtggctttgggagtcagatcaacccagttggctctgtcccttattcactcagggtcctcaggtaagtcttagtcccgtgtcctcgtttgcaaagtggagctaatgatcatgcttaatgccgaaggtggtgtggctgtggagaccccctcactgtcactgacaaataggagctgtcagcagcccaggtgccacacaatgatggtgactgtgaggaggccccccacagccctttcctttgctattgtctgtggacattaaagctactggtccccaagtaactgccattaaaaatgacctccagatggccgagtgcagtggctcactcctgtagtcccaggactttgggaggccaaggagggtggatcgcttaaatccagaagttcatgaccagcctgggcaacatggtgaaaccccgtctctagaaaaaatacaacaattagcagggcacagcggctcatgcctgtagtccagccactcgggaggctgaggtgggagatcacttgagcctggaaggcagaggctgcagtgagaagatcacaccactgacagagcaagactctgtctcaaaaaaaaaaaaaaaaaaaaaaaaaaagaaggacctcctcctgaaactcaacactggtaaatcagagctttcccttatcaccttcagcaaagtgagaaggtccacttctgaaagctaaaaaaaacttccttgaaaatttcaagcagttcaagtctgaaaatggtggtgatgattgtttaagccagatataagcaaactttttcagctaagggccagagagtaaatgtttttcagttttgcaggccacaggtctctgctgcagctacttaattctgccttgtagcacaaaagccaccatagacaatacacagctgagaggatgtgatagtatttcaattaaaactttgtttgcagaaacaggcgatgggtctgatatggtccacaatctgtcatttgccaacccctggtttacacagaaatctgcatgtgcctgttgattagtaaaggacgtgagtgacctgaaggtaaaacaagcaaatcccacatcagtcaatgatccttcaggtcttgcttcacttccattcaccctgtcctttgccctgtctgcctcctccagtatggtatttattttttaatgaaatcgccatcattttaatgttagtgatttattttaaggactttgtgtgtacatttgctttaaatctgttacacatttattttttcttcatattaaggaaaaacaattactttaatcaatacctggtctctgaaaagagtgataatgtgtaaagttacacactgttatatttttatgagtatctccaaacagcttgtttaaatccctttggtgtttcataacatatttttaagtcctgtgagtagtggctttaatatattatctcccagggaagaagaagaagggaatccttctatagaagaagtggcaaacccagacacctacagaaaccagttaatactaatgagaaacaaggaccaggtgttagacattagggagtggtaaggactgcagcaaattaaagagcacatgacttttctaaagagggccatctcactcagctccaacagattactgccagtgagaatgcctagtgagccagaaatccaggtttttgtgcagaaccccccaacttttaagtaagctcaaatttttaaaacaatttctgctttttaaaaatgtaggccaaactaaacccatccctgggccaggtaggaaccgcgggtggtcaacctctactgtagtgttgattgctagagttgcaacttcctgagaagcctttcagaaggcttgaaggcctaggtgtactccctccctttcaccaggcttttttctagcgtttctttagtgcaaagccctcagctggatgtctgctacatggaaatccagcatgtggtcccatcctgaggagccacagcgtgarcccagaagccaactgatgcaatgaaatgttcttgggggtactatgcagtacagcataccctacaaaaacatttcagagtgggcatcatctacaaattcatcatttggtgctgggattttccatttttgtttccttaaattagggaaactcttttttcaggttgaatcttgctcagaaactcagtatgtgaacactcattgctgaaggtttactgactgcatcttctggctcagccctgagtcaggtgctaaggggacattccacttcaggggtcggcataccacagcccgcaggccacttccatcccctggcctgcatttgcatggcccatgagctaagaatgaacacaattgggcagaggctctgggctgctattctgctttgagacagagtggagggtgcaaagctgcagccactctgctcctttgggcaaaccatgaggcgcctctttggaactcttaagcactaaggaactcaacgtgaacacctttaattacagaaataataacagcgtcaccagtgaacatttgtgctagccctgcctatgcagaaggccagctgcatatgtcactgatcctagagtactcccatgaatgtcgtactttgttgctgtcatgctggtgagggaagcgaggctcagatgaaggaacgtgcccagagccacacggcccatggcaagacagagcccaaatatgggctctgactctatagtccagggggatcttccccatgtgatgctggctttggcgccagttcccagaatgagcaatgccagatgatttcagatgcagtattaattaagtgaatattttaatgtgtgcttttaaaaagagactaactttccattggtgacagtggttctcaaccagagggaattctgtccttctccctaggaacatttgggagcatctggagacatttttagttgtcataactggcactggggtgctacttggtgtctcgtgggtagaggccaggcctgttgctaaacgtcatatggcgcacaggacagctccacaacaggaaccatctggtcaaaatgtcattaatgccaaggccgagaacccctgatttatagtattcatgtaaagtttccttattgaagaagtttacttgaggacaaatagagtagtaatttaaagacaaaaataagtaccagtacaggttcatgcagatcgggcagaaatcatgaatgcagtacccagctgtctagggattgggagcactgcagcatgctttatttaaaattagttacatcaggcacttgtaaggactatcagaagtacttttcagccagtgctagttttgctcgtcaggtttctttctagagaaatgttttctttataattctgcccacccccgtcctggtctgtcatcttcctggcatgtccgtgggaacaagctcagggtaggccgaaggggttattcagctgccagtatggtttagtttcttctcagaaagtatctgggtccttggagtttctattgcccactgaacgatctttgaattaagacacatggtaaatctcatggtatggaaaaccagaccccactaagaacaattagatttccggagaggttggagtcaagaattcaggttgcagcaggtggcatatttggtataagattggtgtacaacttctgtccgtgactgatttcagaaccacgtactattgcaaccaactgtcagtggtggccgtctgataggttagggcttgccgtcttttaggggcttggaattaaattaggatttatcaaatgcctccccactttcccaccacctaattgaaatagagatgacagaccatcattttgattgtttgagtctggtgaattaagctctgcatgaaatggtaagggagcacttattcacaggaactcttggcagtgatataaatggaaacgaatgatgctctaatcctgcccacacgagttaacacagagccagtgtcctgttgcaagagaacatatttatttgtaactgatgaacaatcatttctctgcagcagtggtttgggtaacgtcagggctccagaaaaataaaaggccagttttgtggccctgtaaaaacagcagccaccttatcatttcacacccgttagaatggcttctatcaaaaatatagaaaataaatgttggcagaaatgtggaaagaagggaaccctttgtgcactgctagtgggaatgtaaaatgtgcagcccctgtggaaaatagtatggtagttccttaaaaaagtgaaaccagaattaccatatgatttagcagttctacttctgggtatacacttgacccttgaaaaacagtcttgaactgcttatatccacttatacacgagttttcttctgtctctgctacccctgagagagcaagaccaaccccttttcattctcccctcatcaacctactgaaagatgatgagaatgaagacctttatgatgacccacttccacttaatgaatagtaaatataaatatgttttcttccttaggattttctttataacatttttttctagcttactttattgtaagaatatagcatataatacaaataatatacaaatatgtgttaactatttatgttattggtgaggcttccggtcatcagtaggctattagcaggaaagcttttggagactcaaaagttatacatgaatttctgactattcagggattagcacccctaatgcctatgttgttggtgggttaactgtatgcccaaaggattgaaagcaggatctcaaagaggtatttgtagacccatgttcatggcaacattattgacaatagccaagaggtggaagcaacccaagtgttcatcaatgagtgaatggataaacaaaatgtggcatatagtacatacaatgaaataactgtttagcctgtaaaaggaacgaaatcctctcacatgctacaacatggatgaaccctgaggacattatgctaagtgcaatgagccagtcacaaaaagacaagtaatacatgattccacctatatctagcatagtcaaactcaaagaaacaaagtagaatggtggttgccagaggctgatgaaaggggaaatggggagttgtttaatggatatagagtttctgttttgcaagatgaaaaagttctggagatcagttgcgcatcagttgcacaacaatgtgaataactaaacatcactgaatgggacacttagaaatggttaagatggtaaattttgtgttatgtgtttttccactatttttttttaaagcagccaccttaattcacagatgtgggaggtttttaatgagtggtatggctcagaacaaatatgttgaaattccccacgatggaaacaggctataaatttataagtatgcatatcgtccttctctttatcttccttgcaaattaaagaatcttgctcttccctactcctgatagaggcctcttggatccaagctagttttagtcttgacaccagagcggttcttgtcctgtagcagaagttgagcccttcctggagggtaggaggcatttcagatgggtccatctgatgtattgctgccggtagcatttatagtacattgtactccgtttttatttgcttctactgggatgagagccaagccagtaaaaggcaaacagcattaattcagtgatgacatatgccactgaaaactgtttttcttttcttttttttttttaatttttttttaaaaagcagaatggaggcactttactcagattctgctgggtgctgaaataaagacggagagaaagaaaggctgtacggagagaaagaacggctgtggggaggttgttaaccttaccttcctcctgcatacgctcagagagggttcgttagcattttgctccaagtttcatggggaagacatttcaggagcaggctcattctttgagtctgggctctaactggcctcacatcaccctctgagtagctgttcacctgcacattacatccactgggggagtactgggtatcagttgatactcctttcctcattgtcatcttttctacacacagatccaaatgtgctgaggagaatggactatgttatatgggcagagcaacagcatggttagtttctaattggcctaaaaataaaatctcttcaaaaataaacagaattggagaaagctgctttgtacagaaagagcctcttctcttgagccaggttattggtatcaggatcatggtgagtttattaaaccatgatttttactttcgtttttgaggccttttcaaaagacccgagttagtgttgttctgcagactcattgggtcagagtgccatcttgcaaactgaaaccaggctggccagagtgagcttgcagtgggagttgggagtgaggaaagctggtctggtgtgacattagggagtagtgacgactgtggcaaaccagtgagacgcaccctgtctgaagggagtgtgccgcttggttccaactgatgtgtgccacgtgggaattcaggcttttgttgccaaccttgaacatttctagtggaagctaccattgctgatttttatctgaattcctttgcttattaaatgttggtagctatgtcacaattaaaaaataactacttggaaggggtgtcaaaccagggttgccagttcataacccaagtcaggcaggaattgaagggctagtcctgctgggaaaactacatcatctggatgaaccagagatggaggtgaggaggagctctgttaacccagaggtcctgtccttatcttggtgtcacaatttgggcatcatggagggaagcaaacccccagtaactgggcagctcagttctgctggacccttcaggaggcagctaggttaccagcaaagctccgagtgaaagtgtgctgctcctgacagaggggagcatctagtgttactaaactgtcagaattgttgtttggctccattgaaggaaagaaaagaatgaacatttcttgggcacctcctctgtgtcaggcactgtgcttggtacctgactgatccagagcagcttcataagcaggcagcctgtgcactcacacaggccctgtgctcagaagggcctatgcttgctttcatactgtctcatactctactgtcaccttctcaaaactctttwataactttcgaatgggccccatgatttcattttgcatttggtcctataagttacatagccataacttacatagtctgttttcacacggacgatcttttttcatcctcaggactccccgagaggtgagtgttaccatttgtctccctttgatacaggagtgaacagacactcagagatgggcatttacccaaagccacacagctggaaaggcctaagtcaaaatttgtactcaggtctgcctgagtctggggtgcagaattgcccatcttgtggcacgctgcagctgttgtaccgaaaggcctacagcatgttctggtctctggaggcctaggcatggggaagtttagcctcatggattgtcggtgtctgagggcatataatgatatgggtgtatactcagkgccacattttgtgtgttgtagtagtcctagcagcttgctgttttattagggccacaaattgagtcagggagcaggacgggtatttcttctgaaggacacagcaagaagtacgggggccgtgcacagtggctmacacctataatcccagcactttgagtgggggctgaggcaggaggatcccttgagcccagaagttcgagaccagcctgggcaacatatcaagaaagtgtctctaccaaaaaaaagagggaaaaagcagtatgatacagtctagtctcagggcaaactgagattctagctctttaccagcaatctcatcataggcagccctttgtgctgatactcagcacatctgaagttctgtatgactgccacttacacactcagatgttacagagaggagtcagattcagcaaacacccggtgagtgctcaccatctcctgctgctgtgtgagggtgctgaggaagagagtggtggtgatgataagtaatgatgctgttgctaggatggtggcgggtgatggtgttgccgaagctggggtggtggtgatgacaataatcacaatagttaacattaaccaggtgccaggcaacattctaagtgttttgtatgcattaactcatttaatcttcatcccaccacaatgccgtatgcaatattattacttccatttacagaggaggagactgaggcacaacgaggttaggttagttgcccaaagttgcaaagctagtaggaggcagagctttgtaactgttcttccatacacagacggaaatcagccctgcctttggggacctagagtaacaaaagagcgattataattgagtatgatgtgtgcagtaagagcaacacaagatgatgatagtggtggtggtacttgtcatttgcttgatgccaggcacacttctaggtgcttacatgcaccttctcattgaattccccaacagtcctatgaagtaggctcttttcatcccatttgatagatgaagaactccaggcccaaactggtttaagttattggttaaaagtcacacagaaaatggccaagccaggatttgaacctataatctctgctctgcccttaagagatagtacaaactggcggcttcgggaagcctcacagagaaggcagcatttgaaccaggactgaaggatcaataagatgaattctggcatcaggaaaggaaaggcactccctgcagtaggaatgggaggggcaaaggcagagaggcgggaccatggctcagcatggtcactgattaggtgagtgtggctggaaccgtgacagggaacagcaggagatgatgctgggttggggatggaaggctctgctcctgaagagccttgctttccccactcaggggtatcctgagggctatgaggagctacttaggaaagtgacaggagcagatttgacttggtcacctggagatggaatccaattccaggttcctggcaccaggaagacaaagcagtattgtgaatttgaaaatgaaatcaactttatcatgccccacatgaaaattcagtcgctcttatttttgcttggcttttatgtaaaagacccaagccaatgaaactgcctgccattagtcaaggtcagagtgaaacttgtcagaaaaacttccttaggtctctcactgacactacaagttattgccaacctgagagctcctccacagaaattaccatttggagactgtccacagtgggatttcagataggctccaaccccctacgggaaccccccccccccgccaattattacacactttcaccaaatgttagagggagaaatgactccattgtggaaatcaagtttgagcccagctctgacctgggctgtgactcaagagccttgtcttcaggaccttcattctctctctatgctggtggttctcactttttctggggcctgaacctctctgagaatctaatgaaaactgaacactcaccctgtagaggaggagagggggacagacattatcaccaacacagagatgcccctgtggcttgagggacgatataatgtgccactgatccacacaaccagatggtcactccctaaccccttcccaaggccgagaaattctggagtggtcacttttcactggttttagaatggctgaaatatgctgggcgcggtggctcacgcctgtaatcccagcactttgggaggccgaggcgggaggatcacttgaggtcaggagtttgagggcagcctgagcaacatggtgaaacctcgtctctactaaaaatatgaaaattggccaggcgtggtggcacacacctgtaattccaggtacttggagggctaaggtgggaggatcgcttgagcgtgggaggcggaggttgcagtgagccgagatcatgcactccagcctgggtgacagagtgagaccctgtttcaaaaaagaaaaaaaaaaaaaatgatagaaataccacagaggtggtattgccagtgattgtttagggatataagtgtgagggactattttggccaagagttcctttctgtggttcgggatgaataggacatggagtttgcattctttgtagcagcacaggcaagaatcctgttctgtaaggagtgaggagaggaataagacactgagagtccctcctgtacccaagggcttcacagagtggatactgattttaactgaacatgtggcctatagcgtcaaccctcccaacattgttttccattaacaggacatccaggtctttgagattcccccccctcccccaccagccagataattgcctggctgggccacccccttctgggaccccacaaaattattcttatttgcaactctggttcctctggccagccaccagagctctgctataaaagcattatgttgatggagagaaggcatgcctgatctttgtctgctttggcttaaaaccctgcagtagtttctactgctcttacgactaaattcagtttctttatttcagcctaaaaggccctggcttcatctgccttccaattccccatctgggtcctcctccctctcattcttgaactcccactgatttgatggtctccgtgcagaacacccttcttccccaactctctgtttggctaactccccttcatccttcaacacttgccttcgttggggagctcatggagacctgggcttggagagctattcccctatggccccctgtgcttcccctggtgccacattcattgcattctaattaattgttgttgtgcctgcctctccccatttaaaagattcctccccatgggtacagcagtgctactatctgatgtactgatgtgtccccatcccctcgcaccaggcctgtgcacagtaggggcttggtaagaatctctcctatctaatgaaaaaatggagcagggagttaggaaaatgggcaggcacagctaggaaggcactttataaatggcaaagtgctctgtggaggtttttaatcagagtgtgctgcacctacttgactctgtcttcttacctgtgagcaggggatacatcaggtcctgtctgcgtcacaggcctgtgcctgaaacaaaggaggtggtcaacatcaaatgcattagaggaaatccagtgaaacgcatcgtaacacacttcttcctgactcgggagtcttgcctctttaaaaatctgctcccatagccaattctttcttccctactcagcctaccttctctcacctggaaactcaacctgattagctctgcatttagtccatcctgcagagggacactccgggctggctgaacgctggcctcgtttttgcagtgcaggaggaatccttgctgggctcaagtcagcctgcagccaatgttagatttttttaaggggcttctccctgtgatcacaggcaacctttgctttttcactgcttgcctctgtgcacctgtgctcttcccagccccagcaccccaaccagggcttcatttgggccacctggcatgttccgggcatcttcttcacagtggaagggaagataggatcttctgctgaggctcctggggacttctgaagacattcagggcctggagaggtggaggaaggagctgcctggttaacaggtattggccgaccagagagaatcctaaactatttggcaagctttccctgctaacctttagattgtggctgctggttacagacgtgctctgggaatagggtgtggtatggcttcctgtcttgggaaagaaaataggagcttttggaaggatctggggtaggtgataggatcaaaggacaaactggagaagcatattttaggaaaaacaggatctctggggatctgggtggtaggagcccacggacagaagcacctaggtgctcctgctgggatgtgctgttgctcagtcttagagtcggtggttgagattctagggcaagatgtcattgtcctggcttgagtgctaaatcgttgaccagagcagggagccccacactccgatgattgtcccaccatgactgtgtctgttagggaaaggtggtttcccaaagcagaattggggtgtagttgttactacaggaaagagtaagggatgctgagcagcaaagaatagatggccatcgtagtcacagccagttctcctagttatcctagtgaaacccatcatgccagccctcttgcccttgccctagagaacctgagaggctcttggacagccattccacccttgcttctttgagacttcagcacatgtcctcagcacattcaaaggctcttctgggtcggtcatgttcttggggtaaggctggaatgtctatgtcttctgtacagctgtctaaaaacaccttcaactgtatctgtaaatccatataactgccaattacagaatgcagcccatagaagaggccctgtgtgggttgggatggggcaggaaatggtgagggctgcggattgcccctcctgtcatggggcagctcagagcaaatggcccagttcgccagaaaccacacaaaactggaacagaactctgcatcaattctggctcccacctccactaacctctgtcctctaactgggatgatttctcttggcagcggaaaaaaacacctctggaatgataagccgccctgctccagggaggatggagtggatcatccctctgattgtggtatcagccttgaccttcgtgtgcctcatccttctcattgctgtgctcgtttactggaggtaagccaggcagcacctacagcgtagatttgggggccagatgctggccaggttttgctcacgggaggggaatcccacggcctctgcattcaggaaggtgaggtagcttaagtgtttctggtcttgccacccggaaggccatcttgtctctgttagatgatggcagggccagatccacttttgaggtcaaggcatttatggtaagcttctgggatttagtaccaaagaggtttttgtttgagaaccagggagatccaagttcagatccaagctctgctacttgctagatccaaatcccgtgtccactttgattgttagtttcagaaccagcaaaatgagttaacaagtcatagcatttgcagtttttctgagatgatgcttactttgttgtagtcacataataactcctctttaccttagaattttttttcatagtctttcactgaaaattaaattgggtgataggaaaacatttagcatattatgtggtatttaatatatgtaagattaaaatggcagattgtaagctatccggattctcactgcttctcatgggaagccaggttgcagcctctgtttagaagttgtgttttttcagccggaccgtctcagccagctcagctgagcaactccgtcaagcccactcgtttggcctgggtgccctcacctctcagactaacgtaggaggcttctgccctttatctgacaggcttcaccagtgagaaacaggtgtcatattttcatctctccctcccttctttccattcactcaattttgagcccacactttgtgccagtcttctagacacaaatgatttctgaagaagtgagtaaaacagataagaatccttactgtcatggagcttacagtttagtggaggaggcaggcaataaacaaagcaaataagtaaaacatgtaatttctaagatggtggtaactggataatggagaaagcttaaatctggaaaggggaggggcccatgggggcctagcaggagtgttcagagtggtcaaggagatgatacctgagcaaagacctaaaggaggagggaaccaaatgggctccacctggggcaagttccaagtagaggaaacagcacatgcaacggccctgaggcaagggcatgcctggtgtgcaccaggaacagccagaggtcagtggggctgagacgtgaagacaggggtaaggtggcagaaaagggtatcagaaagaaacaaggtagagcaggatcgggtcatgctgcacagccttgtgggccattgttaatgcactgcctttcactcgaagatgagtagggtttggtacagaagaatgttatgatttgacttgaagattacttggctgctgtgttgaatacagactgaagaggagcaggggcagaaacagagaccatcggggagactactggactagttcaagaaggacacgattgtgtctcagatgagggtagccgtgtaggtggtgagaattcattgtgtatagatctattttgaaggtgggagcaacagaatctgctggcagattgggtctgttcctaattggctggaacagaagaataaggaaggaggtcatctcaggtttcctcgggcgtctgacggtaaccataagccctttagtgctgcagmccagcaagtttatgaagtatgttgtattttggggtgagcataggaacactagactcaccttcatgtcaycccttctccaggaaaaagtattgtgcaaatatgtttgaagcccattggtaaactggaggccacctagtgtgagtttaactaatcaagtgaggttaacaaggtcagcatgcctatctcttggctctgctcagcactgtttggttttagtctcagactgtcaccacaggggagcagagaagtcccacagctgccacagcataaagaaacactttgtacccagcaattctggcaaaaccctccagattgtttctgactggcccaccttggatcctctacccacccctaaatggatcacagtgaccaagaaggaccatggggccaaacaggcatcaatacccagccagccaaaacatgagtatttactacaggtttcttatagggaagggctgtgtcatgtagtaaacagctttaaaatccttccattcaagatgtattttccctttagaaaatgacaactgtttatacttctgaaaatctcagtgagtccaaatggaaaatatgaattgaataatatcttaatatttcctgtctgaaatatttttatgatgtttattatacatgtatgcatatatttcatcaaaagcttcatttaaagtaaccagagctttaaacttcatccaacagagtctggacttgagcttttaccaaattcctactcccagtagcacaaaaaatgagtgtgaaaaagaaaattcttatagagcaaggaaagtaaaattaaattagtgttaggatgaatgagttggctaagcatacagcctagaggggacaaggaccttttttctgtccaacttttaaaaaattattattaatgcgaaagaagaaagcattggggagctcacatagaaaattggtaaatacagaggagamatgcgtttccctttggcaatgcagttttttagctagaacaacagtgcttttcttctgccttttgaggcacagtaagactggatgattggcaaacagacttgacataagtagagcattgaggcagatcaaaaccttctggatcatttcttcaggaggcaggcctggcaccggggggttcaaacctgctcactgtggcagcattttctaccacaaccaaggaatggccctttgcagttattctgatttttgagtgtgttttctccaagttgttgatactacaacttaataggttcatgaaatagtggaaaactacactcaaggtctctgaattctgtctcttccmagtctcccgctgtacagtggtgttagtgctaatgttcagtgagtccttttgagtgccaggcactgtgccaagcacttgggtggcaccaactcatgtgattctcacaacagatctgtacggtaggtactatcactgtcctttctatttgacccacattctttgaccaaggaagagaacgagaactcacatttgttgaaagcctgctatgggccaaatagttggcaatatcatcaccagaacccttttgttgttcagaacccttttctattgcagttgacaaaaatccatttcaaaatgccttaaagctcaaggggaaaaaaaaaagtttgattcatggaattgagaagttcaggagcattgggcctggctgaatttgtaagatggaacatcaggacttggctggtttggtctgtctgtgtttctcttgccgtcagtttctgggatttgctgtctgtgtggtcttctcgctcaagcaggccctctgcctgtttgtacagagcagcctctggccatgttagacttacatgtctccaccccagtgcaaagggaatctttcttctctaatagttccacttaagtcccaacatggcatctcttattactgacttctgtcatttgtccataccccggagtcgtctggtggccaaaaggatggaacattcttgtcaggcctaggtcttatatttaactctggagctcagaagtaggatcagtaccattgccatcaaaaccttggactgaagccgaacaagggatggctttccaaaggaccatcaagacctaaaaaagtgagtagaaggttcagctaagtattctgttacttaaaaaattataaagctgtttctattgcatgtgcactggagccattttcagcttcctattatttatgcaatgcttacagagttcctgccatgcatcctggtgggcctagagatttagagatcaggtcccttggccctcacagtccattggaagaggcagatgagtaaatagaattgagtatggggagtatttggagaaggataaatccaagttgctataacagcatataggaagggcttcagcccaacctggaataggggttggggtcagggaaagctccctggaggacctgggccttgaaccacaaccagctgtcagccaggtgaagagggtgtggaagaatgaggctggggagaaaaagcctggcctactgcaagcagataatgtggctcagtgttgttggagcagagtgtggggacagcaagggccggatcatgagggcctcatcgaagggagatgtgccatatcctgaggatgatgggaaggtattgaaggagccaaaactgcaggagggcaagatcagaaagaaacactactgtgtctagagactgtaacacgggcctatagtcacatagcctggatttggagccacactccaccacactgtttatctgtgcagctgtggagcatgtgttcctaccagcagtgctgtcatctctaaggtgtgaatttgttttggggagatttttataaacttattttgtgtataaagcacagatttacatatacataaatagcattgtgcattcgtggtattaaaattggcactgggcaattgggggggcggagtctaaaagggcccctcagaggaggtgccaatgaaaaacaggttgagaaacactgctttagacaaagacttctccaccaacttcggtttcctcatctgcaaaatatagttaagaaatgggccacaagttcacgtgaggattcggtgcaagctatggaaaatgcttgtcctggtgcctggcacatggtgaatgtgaggtagtgttataccagatctgactttagggaaaaatggaaaatgtaactctgggtcctggtatgcctcaaatgaagtttttttttaataaggaaaatcaaatgtacagagctaaatgaattttgtcctttaaatgtcatcacattgtatagctgtacagagtttccaatatgtccattgcatacaacatgcttgaaaataacttttggaatttctttctagagttcattcttttgaaggatctcagttgtgcaaagtatttatcctagaaatagataaaactcatctgtttagagctaaatatagcataaatgtaggttaaccaactgagcagaaccactttgggccannnnnnnnnnnnnnnnnnnngtgatgctcctaatagccttaaagtcaattccagaggaggacatccctaaataactgggttaaagacatgaccccactcccacccgcaaccccaggaaacaactctgaagcccagtggccagcctcattaattccaggttggctgtattagagtaagcttcattgatgttgcagcagacacaccctagaaccccagtggcttaataacacacaaaggtttatttcccacccacgtgaggtctgacagggttgagccgccctcctccaccagtggtttctctttctggaacacatatctcccaaactggtgtagcagggatagagaagttgaggaggcaccaagctctcaactgcttggcctagaagtggaacccttcactccttcattcaccactggccacagatggtcacacagccccaaggacacagatgaggtagggggaacacgtgggtatttgttaagcactgccacagtattcttaaatatttaaacccattggtatcattgaattatgtatatgtttcctgaaagggagaactttggagaccaatcattagtctgtacttaaaatttggctgaaactaaaaaccatgagcagaaacctcggatacctgtatgtctgagagacctcagacatcagtctcatcggggactatttgagcagtgtttttataggcagcaacatggatctgtggggagacatttattctaaaatgtttttagctgagctgtttcaggtaggacactatagttctcccttgaatgtccctcgcaaaggtctgccttgaagagctgtaggaaccagaatctgtaaaaacacagaagttgctataaaactaggaagaaatgtaagcaaagtgattttggacaaggggcagggttgtgaggcagataataaaaataaaatcaactaacagttacagctttaatggcaccctattgtgtgccttataaatattgcaatccatacaagcatgcagtggttcagagctattggaaataaggggaaaaaatcaattcaaaagttttcacagtgtgccattttggtctttttacttaagatggtagtaaaacataccttttgaattccaacagtcagatactgcattccaagagcttcgcatcccctgccttaccaagacaagctgtttttatggcaataatgtgctgacattcctgaaaagacttggagcagcacagctgctgccactcagagagaagaggaaaattttggaaggtttctttttgatttacataatttgaggttaatgctgggagaggagctatgggagaggagctatgtgcccggtgtccaatcagtgtgctagggggtgcaacttattagttgtgctgtagaatagcatagctattaagagccagacatttctgtctgcttagaattgtattacaaagatatttttagttttgttttttttttttctgtaatcctgagggatgttgcatagaaggtagttcttattgctctgatgagcaatatctcacccctgaaatggctttgtatatctgaaaaggctttgtatatctaaaggttcttaagcaaaaaacctttttttttttttttgagatggagtttcacttttgtcaccgaggctgtagtgcaatggtgtgatctcggctcactgcacctccacctcctgggttcaagcaattctcctgcctcagcctctcgcatagcagggattacaggcacccaccaccacgcccagctaatttttgtatttttggtagagacggattttgccatgttggccaggctagtctcaaactcctgacctcaggtgatccacccgcctctgtctcccaaagtgctgggattacaggtgtcagccaccacgcctggccaagcaaagaaccttttatgactatgtaccatactagacatgtgctcagcagattatacccccacctaattagtatacgaatcctgggaaataatcagtattgttatgttcattttgcagatcagaaaacagaggcttagtaagatcatgtgacatccccaagtcgcagcgttaatttttggtggattgtggatttgaacccagacaatttgacttcatagcccactgggttagccaatacgttatcttgtccagaggaggagtagcatgcctggtggcatatacttccctccatagcctacttttatagtgcatgtttatgtgtcaaaaagacactccaggaaaaggggatgtctctgctgctggacatggtgggagtaaactggtttggaaggccagatataaatcatcctttgttttggatttgccaaaatcatgtgraagaaaacttaagaaaccaattatattttcaggtgttctggaagctaactagtggtactcactcagttacatctccattatttgagaagattttkatgttgaataatataacctatttggtcttagtcccagctgatcagtgctagttttcttgatattaaatgtttaatatcttattgaccataattctagcctagaaaaagacttgcaaaagtatagagcagctttacttctcaaattcagataggactgagctaactgcagattctggaacagaaaactggaaactccctaagtgggaattgtaacatctgacccaggtttgttaaaatttggtatgagaaggatttcacactctgatctggtagattcacttcagcacatgaccaagccatctgtaaattctgtggtaaatcagtcaacaccaatttagccacatatgcaaataggaaaaggtctctcttttactctaagtcccatctttagattttcagaaattttgccatgtgttggtgcctcctcattaagaatgctgttcatgaaaacaagtgagttttgttgacattgcaattttttttcttccctggatgttcagtgggagacagagtgtaataaatatgaagggatgcaaaccgcaaatgtgtgggggatttgtgttggcataatggaggctcaggcaaacaaacagatgcatgcgagagtcgagagtggcatgtggtaacacccctctcttgcttgagggatgactgaccacatgtgcctcactggaacacagatccctcctgtactgccacagtagcaacaatgacaccagagctgctgtgagcccaggcacatgttcttcacccatctgctctagcggccgacacttccaggtctacttgacgatgactgggtttttggtataggtgtttgtccccttttcaccccagcaaagtcacaaaggagacaggtatcataagaatgacttctcacatacaggtaactgtgaagacgtaggaaaggggaaacacccctgttaaccagcaataatagctgaattaatacaaagaacaccttatgttatttaatcctccagcagccatgtgtggtaggcaaggaatcagggactgcatcattcttgtcccaagagaggaaacggtttccagaagggggaatgacttgtccaggatcatagagcttgtaagttttagaatttctcagacttagggttttgggttttttgttgacctaaggccctttatggctggcctagttactcctttgttagttcattcaacatttcttaagcatctagttagttccaggcactggagagccattgaggggacagagttcctgcatttaaggggctcatacctgagaggaagagaggagcaggtaaaccaaggtaatcccaaatagaggtcaaaaactggtggcctccagaccaattttatttagctaacatgtttttttaaaatcttgaattatttagaaaatagaaagatgtgatgaaaaaccccagttatctggcttcttctgataaaccggacaatttagcaatgtgttctcagattcccttgtgtccgttggtggctggatggtgctatggtggcccatttttgagaggctctcccttgccagtttgccagtctctgccctccccgctattccctgcctgtttggcccctgtgggtggttgattttgcattcccctgggttgcaatagtgatcaaggaaaatagtgtgttctgggaaggactctgaccacagccagggttaggtgagaaggagagggagccaagaaggatttctcggaggagagaatgtttggactgtattttttacaaaacaaagaaaaaggaggctgggcgcggtggctcatgcctgtcatctcagcactttgggaggtcaaggtaggtggatcacgaggtcaggagttcaagaacagcctggccaaaatggtgaaaccccgtctactaaaaatacaaaaacaattagccggatgtggtggtgggtgcctgtaatcccagctacttgggaggctgaggcagagaattgcttaaaatcagaggatgcagtaggtggagatcacgccattgcactccagcctgggcaacagagcaaaactccatctcaaaaaaaaaaaagaaagaaagaaaaaagaaaaagaaaaaggacaagtgctccaggcagaggtcgctgtgtaggagatgacccagaagcactggatcatggcacattcattatttcttagggcaaactctgccaaactgcccttcctttatgcaaagcaaagtccactgttaacgggtagaatcagattcttttctggaagattctacatgtacaaagtacaaaggcactgggtcagtcctggttgctcaatgtcctcttatgctgagggagagtgagaatcaaaaggtaggtttatataaaactttgtctagtttggaaaactctgagcttccaagtcattatttttggtgggtttgtgtgatcaccatcttttctaccaacagaccatttactggaccacaggtattctggcatcatttttttcttttaaaactggtgagtgtgccattcttttctttttggaacccatatctgtggccatatttcaagacttttttttaatcattaggaataatttttacagttcagcttttcaaagcctgacaatgtgtcaagccattggggagagctcaagcacattttgtggtgccaaaatatggcttgcctcagagggtttgagtttatgacgacaccctggtgttaaactatcttgctctgagatgctaaaagagatgggggtagggagtcttttgaggtccccaaactgttcctggaggtggtcacccctttttttctttctctatgtgcctgtgctgggagatctgggtcacatggcagctaatgctgtggatcccaggcaactttttgctcaataactgtttcccaaatggctactcaggggcctttcagaattcacgagagctgtcagttgttatagtaaccggccccctgctgtcgaattggccytgagatgccagtggaagctcttggaacaagctaacacatagtcattagacaaaagcggaaagagattcactgctaaaggttgccagttaaacatgctccatgatacttaaaaagctggactgattctgttagggaagcggtgggtgggtaaatttttaaaccaagcttacttttcaggaaagggaagctccttgtatgttcagtctattctaggtaacaaccatctttctttggatttctcagaattaactgtcttctccccccggggttaattatgtctgttctgctggtttgctcaggtagcctcaaatatctcaattattcaagatattagttattgattgtgtggcatttgcttctcagcaaaagtgttgtcagtttacgggtggtagttttaagcgcctgtgattgtgtgtgaggaaaaactgcggagatagccggctctgctccaaaattcctgaaagagtgaatctggcagaattcagagtagggctaagggttgagaaaaagtctaaatattttaggaagctgcaaatttcaagtttttatgagaatttgtaaaaacattccaacacactcatgatttcttcagattaatgttcatagccacactgagtatatccatgatgtttgtaggacagttgttgtagttccaggatgtactcaatagagggagacaagaagttctgtgttacagcaatccctccccccttttaatcgtatttccaagtttgacttctccaagttttggttcctgtgccaagcacttttacccaatatggagtctaataattaatacaatcattgaaagcttgtattaagggtgaagaaaacctaacactccagaattagaggatgttcattcctagaagtgaaaaaccaccagcggactcaatagttaacaaaatgttaactcctttggaattacatacctggcttcagaattctttgtgggactcaacagaacttccaaaaaaagagaacttccatatatctgagtttgtcattgctattttatcaacagagtttggaaagaataggaatcatttcagtgtgaaatcctatagcccagctggtttgggagactaaatataattaaataaatactttcaagtgttcttgtgtgacagaagtgcatctttcaaattctgtagccaagtctcagatgctacagttatttaagttttaaggagaaactaaatataggacttaatatatagtaataacttgccaactgctgttcccatctccctgaggtgcctctcctatttattctccaatctgtattgtgaattaagaaaatgtttgttctgagatgagaggaaagcatggggtaaaagacaaaacccgaaatgtgtctaatggcaccaaattcagagacatttgtggcagaagggaggaccaaatgatctccaagttcactttactccaatgatattttaagccattctgtttgccagggcagtgtgtcaaaggtggaagagtgggtatatgaatgacaagggtcatcactgtgtttgtgatatcctaaccttccattaacaccggggtaatagaggctgcgaatatgtaaagatgacttaaaagagtaaagttcccactgggtatttcttacctcagcataaaagctcctcataagctcctttgtgcataagcatcctcttttgaaaatgtcacagatgaggcctgatgacggggtctgtctgtgttagatgggaggggagggcatttgtatgcaactcttggtggccaattgaaaatactgtattctacacctgttctcttttgttttttgtccatttagagggtgtaacaaaataaagtccaagggctttcccagaygtttccgtgaagtgccttcttctggggagagaggagagaaggggagcaggtgaggggcggtcaagcttaagtggggggcgtcttgatggccgggactggcttgccaaatttttgttttgttgccatggggattgaagtcttgtagatggcacagtgctgaaactcacctgctttacctgaattcccaaaagtaagacttgcaaatatcaattcagcttgtgggtagctggtaccaattaaaagtatgtcctgtgtgtgcttgctttgctttattttgcagttttgggggtgttatttgtttccgggtttgtatgtactgggggtgctctatgtttgtgtgtctgtatgtgtgttgcatccattttctttccaaatttttagatatttgcatggttttgagcttttaaaaaaacatataatgcatgcatatagccttatgtgaaaaatacctcttagaaacctaaatttgtagataagttagggatgaagagtaggaaggggagagagaagtgagcaaacatggatgtactatgtgtttttccttaagaatggtgaagttgttttttttttttaaaaaaaggaaatgcatatgagttctggatagtttgaatacttggaaaaattattgtcctggaaagagttatagtaaatgtttggaactcatgattgtacagttttaatcaccacacttgagtctcttgataatatttctgtaaggcctgtcttaggcaaactgtatttaatattaatatcttttaatattaagttgctaattagactaattcactaatccatattatgtcaggagcagtccctttttactttcaatgaaccaatttataggatttatgttagaatttttacatggaatgattcatctccattggttgtgggtaaatcagaatactgagatgaaattttagatatccaactattataatcagataaacctatgaaatctgagaaggtatagtttaggagttgtgacagattaatgagaaagtatatgatctattttcttttacactgtactgtgcaattttggccttgtagggaaagcaataactgctaacactggtaactaaattattctgtgatccctttttgcttattaatgtctttaatttctaatacattttcaaaactaaggatagaaactgaaatagaaatttctctgtatagttttggagtcaaagactaatcttaagagaggaagacgttggacatcacttaaatgcttaactgtcatacccagtccattataaatatgttgtgtttttgactataacactttaaaaacccagcatcaccttatgaatatcacaaagataaatgcacatccaatttcaggtcctccccagaagtgatgatgtagcctgccagactatttcttttatgtacttcgacccccacgtcagtgggcccattatagatatattttagatcctaacagagatgccccagtctctctggtatcttctctgctgctcagtgaaggaagcacaatcagtttcatctaggtctaggagttgggaaccatcttgtgaaactacaggtatttatagaatccctctgattgtgaatcatatcatttacttttttaaatagtgtagcagcttaaaagacagactttggctcagggagatatgtgttctaactgcagctctgccacttcctggccctgcgactaggaagggcccatagggccttagtttccttatctagaaaatgagtctaatgatagcaacttttcatgaggttgttgtgaagattaaatgggggtagtatatgtaaaatgcttagtgtgtgaaatatattaacccattgagaagatgaggaaattcaggctctgagaagttgtcacttggctaagccaccctgcctaagtggttgccttgggactccactgcagcggcgtgaatcctgagcagtaccccctctcacagctacatgtgctatgctaagtactccatgaaaacgatatgggccagatacagatcctgtcctcaaggggcgccatgtctgtgcttcttacgctagccgccctgctgtaatgtacaattcctcattctggcccactgtcccctctccttccccatgctctctccccaggcacttttgctgcctcctttcctgacccatgtccatcctgctgctgttctataaaagggctttgaaagacagggtgccccctacctctgtcaggcttctgcaggaggctggaatgcaagcccttcaaccaggctctctctcacctttgcctttttcattccgctctcattttctttcctggcttgtatctccacctaaaatgtggccaggaatcaaaagaagagcccccagtgatagctaaattgcaaccctccaaacagctacaagagctgttacagaatccctacacattaacttcatgtggcattactcttctgcccctgtcatctccctgtcccacagcaggaaggaaggagactgtgccgctaagacgcgttgcacagagaattgctaaaagcaggacaacagctgtgagaggtgattatcctcccagaaaggagaggaaaaaaacattgaagatcagacccaagtatttaattttttaataaagctgatttaagttttgagtaagtaatacttgacatgattcaaaataaaaaagtttaaaattatatgcaccactaaattaccatcccatcactcacccaccctgctccctacctcctcacaaataggtagcccctattgctagtttgttgtctattcttccagggattgttacacatatataatatataagcaaataatgaatatccttttatctccttgtacacaatggaatacagcatatgcaatcatgtgccttgctgttctcacttaacacacgatttccctatgcctatataatttcctcatccttttacacagaagcatggtattcctttgtatagaagtgtcatgatttaattaacctatcctctgtggctgtcattttgattgttctccgtcttttgttattataaacaatcgtgtgatgaataagtttatgtgtcactttgcaagtggataagcatgtctgtaggaaaattttcagaggaaaatttattggctgtatcacaaggtacatgctattgtgcatgtatggtgccaagttgccctccataatgggataccaaggtgggcttctctctgcagtctatgagcatgctatttccctacagccaacccagcacactgcattgtcaaactttggcctttttactaacctcataggtgaaaaagaaacggtgtctcggtgtgattttaatgtattatctcttactataagtgggattgaaccatttgtttttctgtaaactgtttatatcttttgcttgttttttctttgagttattggtctttttctaatgaagagagataatcccttggtagcaatgtgagttgcaaatattttttcccaattcatagtttacttcttaactgtatttatggttcttctttgatgtttatataatcagatttatctatattttctgctttgttttctagattttgagttttcttttaaaagtctctccattctgaggttactcttttttaaaatcacttttatggtttcaaattttaatagtaaattcatttggaatttaacctggttgatcgtgtgatgtctgaatctacttcccccccccgagatggtctcaagtattttaaaaaaaatactgtaatctggggcttagtgaagaggcatataataccttcttagatccttaaaatatcactcacagcaaaatacagtcaatcagtatattaacaaaataaggagttgccaagaggcttttacccagacattttagattataaatactgaaaaatatgtgcagtaaatataatgtgaatttcatttcttacctcctccccaaaatgagttggactatcacatcactgttaaccttccaaaatcagtgggatattgtgtcagtgccttaaaactgtggcaaatgaggtggagagcccctcaagcctcagtccagatgttcagaatattccagtctagggtctgaagggtgagacagacaccttaaagcccctgacttcaagccttcttttctaagtaatagctggaagtcttgggaagtcctgtccagggctcactttctcaaagccagctaaaataaaagaactgtcacggtctcatcaaaatgtggtttctgaagagaccttttctctcctatctcctggaaagtattaccagtacttcagtcagacctaggtatctgcaaggatttcttggcaaacttaatgcctagctaagagaatatagttttgagaccacttttgtgcctataatttatcattttctcccaccttcctaaagatgttaattgcaggcaatttgaatcatccaataaaattctcactatgggaatcagatttttgtcacttctgactgtaccaaaagtcgactaggccatctctcctattcatgtgaaatccaaaatatttttgaaacattctctcctcgttttagtatctgtttcctctttcacaccccatccatcactgcatgattttgttctcttttctcttcccttttccctttctctctcctcatatctgttaagccctgcttatctaaggtatgacagccatatgccctgggacttccacagccctcatgtgaaacttgccatttgattatcccccaaagcacattgacatttgtcaaatctcacgcccccttttatgatttggaaaatatggccactagaaacatattttggtttgagtttttcttttgagaagatcccttccggaagagatactacaagtgtaaactgagttttataaactgaatcacttaacatgccataaaagaaacttaacagcaagtgagttgttgtatatgaaaaatctcaacttagaacttacattgggctcctttccaagtggaatcccggagttatttcagacactcctctttgaggaaaagcccaacaacgcctacagcctttttcttttattgttgtatttgtcacttcaatttcttgaaacattttgccctaataaatcaatccatgcctttttaatacagctctcaatcatcttccttgaaagcatgtgaacgttttcaactttctatttgtaagtggctcttattcatgcagggtttactacaacagatccatttacaaaagtagatattaatgcgatttcttttcttgacagcatgaaaataaatgggattattagcgggtatgctactgtaaatttaaatgagggcagtgtgtaaatcagttaagattgtataattaatattcagcagcagctcagctaactgccctctctagtctgcaattagaattttgagctacacactgctaataaactctttgccaccctgatgtgattatagaaccattgagtttaatttgaagacagtcacttggtttctaattcctatataccaacaatcagttagttcatgattctgggttttcatatgagtctggaggccacactgtggtcctgcaccctgcccatgtccagtagtcatgatgttgttcagggcagtgttgtagtaagcagaggaccctggatgagaacaatgtgacatcccaagcttctcagagtgggtgtacgtgttgacccagatgtctgtaaacctcaggaacccctttttcctgtaagcaggtttggagacctgccttttaaggaggtttgtttgtttgtttgtttgtttgttaatacagcagtgttgtgtggaattccagacatttctaatgttcagtctttctgcactcaagttcagcactttgcttctgaaaaatattggtcactaaattatttccaggttcttgtcagaagggcagaaaaagatataagaaaattgttagctcatatcagaggttatctaaacaggttcccggaaaaacagaagccacagaagaaaaggcctttatgcagaaatttggtcattctgggtattcttccttaagaattcctgggtggaaatggggggtcagaagtctagaggtttttttgtttgtttgttttggttattttgctacattttgtttgggtagtaagtctctataactggaattttattaatacttataaaggactgtcagagcagctgggcgtgtgtgtgtttcattagtcaagaaggccaattaaacatactggaacctgtcatgtgctggcagtgtatatttttcagcagggagctcagggacttgacgttgacagctgatactggccgatgtgtttcacatcctgactaaaagatgtactctgcacgttgtgtgtgctctgttttcccaagagtagactttatttttaaagaggtctttatccttaaaatatctcccttatttgaaagcatggaaggttatttttagaaatttcagtccaagagaaaatattcctaatcacaagcttcatgtgtcccatgtgggcttttaagaagccatgcatacttgcacattgctaccatcagggcttcagacactgtacagatctggaccacaggtgtgggttgtgggcttgagacccagaaaactgctaaccagatgccatacagatttgatcagctactatcacacattaccctctggacttccaatcaaacctttcttagaaatcttttgaagatatatgagcccgtgtttggttttctaaaaagggatgaacgaatggagagtaacataggaagcttgcttccactctgctacttggaactttctatagaaatgtgcatatatctaatatgttagtcatctttggtcaagcaccagaagcacttcggtagcatttagggctatgctgtaagaaaagtgcattcttttgaacagagacgctcattcggtgaggcaaaatgcttactctgtgagagggatatgagaaatgggaccaacttagggaccaacagattcacatttcccgtttcactttcattctgtctcacatacccactgagttcgaactgaggagataacttgtgcaaactgagctctttcttgtacccatctgggagcattcagtgaatgtttcatgtaagtccctctatcttgggtatcttgttgatgggggtgggctttagaaagccatctaaaacagtggttttccagttggtttaagtggcaggaaacttggaattcaggatgtcggaacatcattattattaataatattgaaataaatattgacaacttcaatgccttcatagaaactgaaattaattttcctaccagacaagtatagcagtccacaagggtggactctcaggagccattttccctttctcacagtggttcataattggacacagtacataccagaatccctagagggagtcttcacaatacacagagctatatataccccaccctgcacctgctctgttagaatcatcatgaatggggcttaccctgcctgggtattctaaaagctccctaagccaaagagctatgcactgcttgttaataaccaccatttgactgatactttactgataagagagagagagagactgagagacagactgactgactgttcagggccctccaaaattaaggcatacctaaatcagagtacttaaagtgtcagaargatatatgctgcaaattgtacaatagggggaagtagaagataactaatttgggtcattactaggcctgtcagagtcagtgaaaataatgttacctggcctcagtttcttaaagggcacagacagcacccaggcgttggggaagggatgagaagtaaaagggcagaggtggaaacatgaaatatatggtggggaatcattggattatactttgtagttaaatttgtaaacatactttttcattacaaacatctatttcattgatttccctttttagggtacttacatatacaaatgttcactgaagagaaatgataattttggaaaatggctctttgtgatcctagaaatctgattcattcagggagggtctgtaagggtaagttagttgaaagagaattagacctagatagaaaattgaaattgcacgctcagtgacacacgtaagcacttcgagaaattcttttttttctttctttctttcttttttctttctttttttttttttttttttgagaccaagtcttgctctgttgcccaggctagagtgcagtggtgtgatctcggctcactgcaacctctgcctcccaggttcccaggttccaacgtttcttctgcctcagcctcccgagtagctggaactacaggcacgtgccaccacacctgcctaatttttgtatttttagtatagacggggtttcaccatcttggccaggctggtctcaaacttgggatccacccacctsggcctcccaaagtgctgggattacaggcgtgagtcactgtgtctgggcagcgctttgagaaattctatctccattcccctgcgctcaaaattagagacaatactgcctccttaagtagatcacagttcagaggtttagaggcattaaaacttgtgtttttcttttccttttctccaaaatccctgcttttgctttttttattcctggatacctctgaaggtcaagaagcataatttctcgtggaaattccctgaaatgagcaagttaaaatacaatgtcatgtgatatgcagctgcttttcttaggtattaaacacagtgtagaatttgtacatgcaaagggaccatcttcatattgttaaggatcatgaaaagctgacaatagactgaccaccttcatcagtccctggcccagagtagaccccccaatagatagttattaaaggaataaattaaataccagcattgtaatgcctccatgaaatggaagattaagcaaacattaataaagaggatgccagtctatatttgttatcaaggagagatgcatatagaatgatctcatttcgttttttaaaaataaaacccccatgtagtcccagctacttaggaggctgaggcacgagaggcgtgagaatcgcccgaacctgggaggcggaggttgcagtgagctgagatcgtgccactgcactccagcctggatgacagagcgagactccatctcaaaataaaataaaatacatactcccccaatacccagaaaaaaaaatggaaaacagcccatctgtctatatttgggtgagactataataatagcccacagattgatctccttgttccatttctgctgccctctaatccattcatcatgtagcagccaaaatgagctttctgaaagaagcaaatcagatggtgcctctccatggattaaagcctttcattgactgtcccctgctcctagacaccagtgaaggttctttggtcgctagatcctgcatgatctggctctggcccacctctccaaccttgctttccacagcctttcccttgcctctggcttccttccagtttcctaaaatgcaccaagctccctctgctctaaggctcttcaactagctgcttgacctgcctaaaatggtcttcctccagagttttacagggttagacctccttaatcaggcctcagctcaaatgccacctcctcagtgaagtcccttccttcagccgacttcatttaccaccacatcattcttattttcttcattgctcttgactatttgaagcaatttatttgcttgttgtggatttttccccatgaagacataaatactaggagagtaggtgccttgtgtgtcttgtttatcattgtgctcccagctcctcactgcagatagatcaaggaatagtgaataaatgaggraaagtatacagggatagacctcaaaatattaatagtgatcatcactaggaggaagattttgggtgtttttaattgatttttttctttttgttcatttgtcttgcctaatttttctgcaaagatgatctgttgcttatataatactttatcaattactccagtgcttagccaggcttaaggaagtagttttaaggattgcagacagcggcgggaatgtgttgtctgcatacttgatgctgtgcagtgggtgctgaataaacatttgccaaatccattgaaatctttattctacgggaagacattccccacaaagttctgtagttagttgcccacccatatatttgtgtgggaggcaagtgcatgatgtgcagcaaggtacagatgcggagctttgtcccccaggtttctgatccttatccccagtcgtgtgcttttcgctggcaatcatggagttattttgctccagggaaaatccattataaacagcagcacatggggcactagagtgtgatttgcttcagtacacactgcttttttcaaagataatgtggggcctgtagttccacatataactgagactggctgaactgtctgcctgtcttgtagggaaaaaaaaatctacaatatagtatatatatatatcctttccaagtcactttaacagtaacttggccaataacaattgtatttactaatagctttacattttagaagtctaatagccataataattatggtcttaaaatcaaagttatttcttgcatgcatttgtttttttcaagttaaaggctaacccagtaaattgcatcccattcatcttagtgacttagagcacttatttgggctattaagtagttgaatagctgtcctctaactcaacaaaagcaggttttccttagctatgatactggatggttaaggctttcattcatttgtgaagtccataacctgtgttttaactttaatgttacattctggaaatctgtgcaaattggagaaggtgggggaggagaggaaggaatccaagagtagaaaacttaataactaatttagagagagaaggaagttatctcaaacatcaaaataatttgtttcacatagatttccattgctttacattcagaagatttggttagcaccagagccctataatattatgtgcatttcatatccatgtagcttaagtctgactaacttatgttcttcacaaatttaggtaaaggcagctacgcaaagagtgatgaaaacttgttttattatttatattataaatgctgagcaattcataggaaacaaaaaaaacacgctcatttttcttcagtgctctattagagtagtcctgggaggcatgtgtcaagagttgtagtaactgacgttcaaaatctcctaatggtatggagcagcagtctagattgattctagagcactatccaaatggaaactgcttagagctactttccatctgaaaataggcactgcttaaagaacagcgcttcatactatgacatgtgatcatttctgattgcgtgtggttataatagcctgtataaaacctgagatggaaacatctttgtaactctgtggtctcttcactcccaaggagatcttgttttttatagtttcttgatttttctctaaccttcccaaccctagccccttctttggcctcatagaaacagggtatgcccaatggaatcatcccaggatatttttgattagattgagcaaagacaactgtgaagaaaagttgacttatctggtagttggaatacgggccccagaaaaagcaaagctgtaatgtgtgtaaatgttgtttggtgtgcgacgccagaggaggacagatcccagtgacactgtgcaccagaaggatgccgcctgcttggctaaaagacccagcagtagggccagctattgtaaagcccctccgccaaatgaacagggacccttctctggtcacaatagccattcacgctgagcagcttcattaaatattcagcctgtgcttccggcagctcattagggccgcaatgagcagtgacgtggatgcaggaaagctgagggccagccagcatcggaggcagaggctgagtgagctgctgatggcttttctcttcattgcctgtcctatgatgaccagtgtgtgctctctgctttgcttgaaatacaggtaaaaaaaacaaacaagcagatgacacgtaagggcttcaagaccttgtctcagatgttgtctggcaagggcctctgattctgagtgcttgccttcctgaagccctctgacccctttaaagagctgtctgaggcttagggggcctttgcatgaacaatgtggtgctattgtgtacttgggctgtttgatgacgatgttggaaggggatataaggtgtggttttgawcttggtgctggggatttagaatagcaaattattcctctgtaacgtaccaaatttagaaatattgtgagataaccctagcactctgtgtggtaggtttactctctaccatgttttcacgtatttgagtagttaaatactaagcctttccctttgaactatcagtttggatgcggtgatgataaaaaaaatggatatgctgtagcaattttgggcccctccaacaggctgaatgttgtccttgtatcttgttacttttacatgagtttaccctcagtgctgtgtgatgtttaaagctgggaagatctataaaataagaattaaaagaagatgaactcaaataaagtatattctattattgacatgtttttctcttttctacacagaaaatgttttcagactgctcatttctatgtsgaagacagcagttcacctcgagtggtccctaatgaaagtatycctattattcctattccgggtaagtaagacactgctcttatttccaatgggctaattgtttttctcttttattctcagttttatgtgataaaacaacaaaatattttatagccttttaaagcttgcccagtataagaaattctctttagaagaacaaataactgagttaatgtagtatacagtcataggcaggaaagggaagtacagtagaaaaaagggaaaaaccgtacaaaaacattcttagtatctacttggactaaatttcatttgcataggcaatttgtgcttatatttttaaatcacaatttgtgacacatttttttaaaggtgatatttttctaagattctttcctctaaaataatgtatcttaatgttcaaagttttggttcttacgatggttgtgtggaaatagaggaatacattactggtctggtggatatttcacttttcttctagtaagaagataaagcacttggttagtgttggggtagggaataatggagtgcacactgtagtgaatcctagcaaatgccatagacatttagaagttcagcagtgggttaggtgtaataggatgtgggatttgaagatctcacccaccatttttatttggcatcccttcttctttgccagattttaactttctacgtcctggtttcattatgtgcttccaaatacgtatcttcagatattttagatacatctatcctcttgacattactcttttgcaaacagaagcatcactttgattataatgccacccctcctccacacctgaagctcccccatcctgctgatctgccctattctccataatgctttccaccagctaatgtgctatttattttacttttttctttgctctcttcccactacaatgagagctttataagggcaagtggctatatcctcagtgctaaaataattcttggcacatagtaggtattctttaagtacttacatgaatgaacgttagaaaaatttccttaaagttctaaaaaggtcttggctgtgaaactcagaggtagagtcattctttgggtaccatggagaaatgcttctattgtttgcagattgtcactacgtgtggttatggttgtggactgaattgccctgttatgtgtctgtatattgctaagtcattagatattactgggattgtccatgttttgtacattctagtcagcttttctcactaaaacttgccacacagaaacaagaagattaacagaaagtctctgattaacttcctgttggagcattttgtggctgctaaactaattctcataaagataggataagttttgtgttactgtgtgttctccactaaccctgcccctttttccttgctgaaggagactacttttcctttgagagtagagaaggtagacaggaatcatcagtcttcatcagcatgaaataagtagtttcattgaatctactggatttgcacaatagcgtgcatatactttttcctcttgctttacctacaatatgtgttgaccactggaaaattcctggcagcctttctcccctctgacctgatttgtctgacacagactcagttgtttggtagctgtgtaactgaaatccatttttgaagagttaaatggtgaaatacttactgggctgtttttccatttctattttcttttaccactggattaggaatcagaaaacctaggtccaccctgaaatctttgttcagtgccttcacctctctgaaccttagtttccagaatctgtaaattaattaggatgcctrttctccttgccttttgaggtaactgtcaagacaacagtagatgatatttgtaaaagcactttggaaaccatacattaagcgaaacgtgtaagctgttgcaactttccttcccaaatcatggtactggtaatcccagcagtcatggagagagagcatttgcatgactctcatgttaaaattgtgtccctgacaccgaactacatccactaggtgtgccctaccttgaatcactcttctttgatataggctttagaactttcaattcactaggatcctctgaatatgccttgcaacacctttgagtaggtatattagaccagaaattgcttttgaatgttttctgtttcattcccagttacctatttaattaagaagttaaatactcaaaacccaggggcatttctttaaatgtgtctttttcccttttaaatatgtttctcctaattcatactcactactagtaatataactatatcaaaagaagactgcttcacattctccactgaatgagaagcccatgtattcaattgtacctcagttggcaaggtgaggcattcttgacaagctgtaacacgtttgtaaagatgaattattttaaatgtaaggcagtgtgatgttaaagggcttacctagtgaaatgacgagtgaggctcatctgttctctcaggtcttcatagctaacatagccttattaggagtatgcctaaacaaatgaacttacttcacccttaactgagagttaccctaaatgacctttccttaaagagctttcagcttgatcacaatctctcagcttggtaaataaaaccccacagtcctatttaatagttacatttggaaaatattttaattcacaaagcactttttaaacaattcactgttctattctttaggatttcttcttctttagttatagcagtacaacggtgtctcataaaagaaaaacacaattcaatttttaacaaacttgtgagttattttcactctactaaagcttttaccacaacttttctttaatggagacctccatggaatcattttaaatgatttatcttagaaattatccaattgtttttatttctaaaaataatacgagatttatagagctcctatgaagtatttattctacccattcaatctcagttatattttatccctgctcaaaacctaaataacaataataccagaccccagatttgtcaaattattttaccacttgggctcttcactctctataattgatttttttaaagatatttgcagacaacagacataactagtaaactgaatcattatactggctaaaaatatgtgcagcagggtgaagttgaaaattctggtaccaagctgttgtaaaaatagagctccagggtcatcactgtggaatatgcaatacactgtgttcccagagcttattttacagttagcctcttaaaaaattgttatctaataattattgagctttaccaacaaagtatgtttattttcactatagtcctatagagacaggtacagttgacacccccattttctggatgaagaaactgaggttcagagacttttttttaatttgcccaaggttacagagctaagcagtggagctaacactggaattatctctgtgacttcaaagcacagatgcttataaatggctctgccacctcttggcatacgactgtaacagttttcatatctcaagacttcagactcctcatttggatattgattcattaaatcaaggcattttcaaatacatgtgaatattctctttagttttttctgagttattgatcattaacttctctcactagcactgaccatttggtttttcattaaattctctttcatcctcctggagggaatttcataattcttgggttgacattttccccatattaaaaaaatctcccctctcatctctgttctctacttatttttattcttttccttcctgagagaaagactcaactcagcaagacatccattccctgcacaaaaacaggtctgtgtgatttaaatgacttaggaaacaagtcacagccacgttgaatgttgaacaaatttagacactaactcagcaactttggatgattctgctgtggctaaaattcataaataaatagcttgtatctttaaatcccaaagcatacgtggaatcagtaagttatactgacttttggaaactattataaaataggtaaatgattaaggaaagctttgctaaccctttgatactcctccctttgagatagcagtttataggagtttttgaagaattttgaatgaccagttttactaattctaacaggaatttaggatattcagtgtgttcttctgatttagtatagcaaagacagtgttttaagaacgaagacttttttttttcccctggtctcacctaacacttatgcaaaatatggaaatgctagacagagactgtgaatatatrtggtggttgaggttaattagccatgttagaaaaaactcaaaatgcaagagtatttatccagcttgaaagaagtgcttttgaggttggcttccaatcactataaaggtagtatcaattattttatcagatagattttgaatggttagtgcctgttccatgcatgacatatgggaaaagtaggagcaggagagatacgttaaactgtgacttctgcaggagagtgaaaggggttttgactcaatatatttcactaagggtttttcaaaagaaaatgttccctggttactggtttcccattgtttcggtgtgaggataaagcataattgaatgcagtaacacagctgtcagtcccctcatatgctttccatcttctaaaatactgaagtggtcacaaaattctgtctttaagatccataatattcttaacactgacaggtacttataaaaatctagtgactcaggaatattcttttgaaaaaacaaacttgaatattacaattattaatgaagcattcactacattatattattcttttaggctttcattatatataaacttttagaaatcagaacttagctcatgaaattaacctgttatagagcatattgaaagagctttcctaaatatgcatactgtcagacacaaatgtcctaacgaatgcttttctctggaaattagaaaatctaactttctaataagagcattacaaaacaaaatgttgctgctaaccagtagcttagaaattcagaaatgattcatgcctttccagcagttaaaatacatcttaataatttgaaggtcactggcttcagcagggtgccagaatataaaggggttttaaacatgcagtttaaaacccttgggattaaaccaaccttgttggcatattttatttatacagagattatctccaaaagagattcattggtcttttgactataatgaagccctttctttattgacttcattgtgtcataaatgaaaagagatttctttttatggcaggaaataaaatgttccaacctccacaacactccatgcatcctaagagtgggatttagacaaaaatctatttgttgtgtcctaactcaggaaatcttgataatgtccttttgtttcatatttgctttatcttcctaagttgacacaaaggtattaccaaacaccttgagaggcctgaatttggcctctgagagactgagagggcagacaggaggggcagggggctgaattcctgaaaatgaggtctatccactagaggtgtggttaacagtacctgctaacaggccagttgttggagcagggtggagggaagggggtgggtaaggtctgagctgcactgatttgacccaagtactatgctagggctctgtttttctctgcccatggagatttggtcggaatttgggatagggttgagagatctgccaagggttaaatgaactttacagggattgctcatagagtgggtgacttaaggacctctggaatcttaatggtatttatataaatactcacacacttccagagtaagcaagaagggatattttattaaatagaccttaagtcaatcaactgcagcagctaagcatcttgtcaggaaggtaaatgccattaacaatttatctacctggcatcatcaaggtgaccagtctaccagtgtgaattttccaagtaactgaagcctaccctcaaagccaaagaatatcatttcaatcctttttgctgaaaagtttcttttaaatgtaagctctagggaggtaatataataaggaagaacccaggctttggagtctgcctggccctattacttgataatgacagtagccttggcaagcttcttggtccctgttaggcagtttcctcatctagaaaattagattaatcacagcacctagaacatagggttgtgcatgtaaagcaagtagcacctaacaataaatcatagatatgaaatgtttactaaatgccaggcactcttataagtacttgtgttatcttgtttacttttcataacactctatgaattatgaaatgtttactaaatgccaggcactcttataagtacttgtgttatcctgattgcttttcataacactctatgaattaagtactgttagttattcccattttacagatgaggaaagggaatcagagaagtggagtcacgcagtctggctctggcttttccacttataccgctgcctctggcttcctgatacacagcaagcatctcatcactggtggctgataagaatcacagatactcagttttactgagttacatgctaatggccttaccaggagctgtgtactaaggctgggccctctgtgcagctcctccctgtggtgtatgttcagggacagctttggctgcttatttttcctttctaatatcaaataaaaaactatgggcaagaaagctgtttctctttttatttatctgttattccttaagattaagagaaaggaaatttagcgtgtatgagtaggttagaggcatcaagtgttggtgatttccctctaacagttctgaagatgcaagtacggccgatacataactgtagattttggaaacagctttatgttcgaatgccattgttctttattgcctacagtgttgcatttgaggtcagcgttatctcagctttggtgttttcttctcagtagaagttgctgtcatcagttcaccctcttctgaggctctgcttttggtacctacaaacctaatttcaagcttcatcaaaagtacataagaaggttttgttgtggattgaacaaaataaaaggcccgttatgtacataatctaattctaaccacaaaaagctaaaatctgggaacttacttaagggtaaataataatatttaataacaataagcccacctcttcaggtactgattctctacattagtcattttataatcgggtgatttagtgataatggtagtggtcccacttttgcctagtttaaacctttggtatctgaaaattttgtaagtacaaatagtggctgagtaaagtggctcatgcctataataatctcagtgctttgggaggcagaggcaggaggatcactcgagcccaagagtttgagactagcctggacaacatagtgagaccccatctctacaaaaaatataagccaggtgtggtgacgtgggcctgtagtcccagctacgcaggaggctgaggtggaaggattgcttgaggctaggagttcaagaccagcctgggcaacatagcaagactccatctctacaaaaaatgtaagccaggtgtggtggcatgggcctgtagtttcagctactcaggaggctgaggtggaaggattgcttgaggctaggagttcaagaccagcctgggcaacatagcaagactccatctctttaaattagccaggcatggtggcacggaactatacctagctacttaggagactggggtgggaggatcacttgagctcaggagtttgaggtggcagtgagatacaattgagcagctgcactccaaccagcctgggtgacacagtgagaccatgtctcaaaaaaaaaaattagcacaaaattatcaagtgatatttatcagattaaccaggatattaagaattaaaaagtttaatttgttattccttgaaattatagtactttgagaatgaagacaaacagtgtatcctagtacacaggaatacagtctttgggttcaatggacctgggttcaaatctcagctctgccacttaactgagtctttttggacaagttgcctcggtttccttatgtgcactttgagaataaccatgttcccttcatctggttcttacagagataaatgtgtgaaaaacatttagcacagtccctggtaaccagtaagggcttaataaatggtggttttcctctcattctaccagctttatcattatcctgcttttgttataccataataatctctcatttaatctgttgtcagtgaaaacatcttcactttgattccagccccttttttcctttatgcttctcccaccaccaccactgcatcagtgacatttactcccactgtcatcaaatccatccttttaatggcacttgtagtctttatcacataattacactgttcttgctctcccttgtgttcatctcttcaccaacacaaatgtccttgagcagagaccatctccctaatatctggctgaatactaggtgctcagaaacggcttcatccaggggtttcccattctctctgagtcggagcactttttatctagggtctgcagccaacttcttctgccattctaaacttttttcagctgcaagatgcatatgaaaacagtatgcatttcttggagtacatgttaatacatataaagtacacagaaagtgcctggcctagttaatgctgctaatattcccttcaatctttaatgaaactcagacatttaggtggagatagcatgttttggatgaatgtcttcttaaaacacacagggcctttccagataaaaattgagctgattaggcctctgatgctgtcctaattgcttggccttctgctagttacattgattttataatcatctggctcatgttgagagaatgtaatagaaaaattatgagaatgattagaataattagtcatagccttatattcatctcagtataaagaaaagagatttatgactcctcagctatttatcttgattgcagggcaaatgctgtattatctgggtagctgacagtggtcagtacagcatgcatctgtatgtatgtccgcctgtctggtacttttgtgacattattggtggtgcctggaaacccagagggtgtggttaggcgtccttggataaagatgcaaattggagagactagtgagtcatatatttccatgattatcacactgaactctgctggatttttgctgcttctagccatagtggcagcaggcatactgatttctgggcatgtgtgtgtgacattagcttggatattacagttgagcactttgcagaaaaaaacaataagcagttaacctgaaagcatttcttttaatgatctgaggtgggctatggcctttaaaatgctgtggtttttaccttacagagtaaaacagttctaaagctgacatgttttttcttattttgaactagagtccatgttcctaatcacggcactgtaagttctcgggaatctaaaattctaaactatcattgtcgtataaatgttgccttcaacttattactctgctaaatatgtcactctgcccttgaaaatagtgttgtatctgtcatttctaagtatatgaaagtcctatagtctacatactagagtgattctgtggttaggttgtgtcccatctcacccattttgcctcttgtttgaaaatgagtttattcttgggctaatcatttagagactctccagctttgtacatagtaacccttttctcaacttgagatcattttcattgccactgatcattattgtagaatttgcttctaaacattttaagtgaagtgatcagataattttggaaattttcttgaactgtgcattctgctaaatattctggagaaacattttggctccgcttactctgttaatgctggttacatcatgagagctatagatttcttgggcatgcaaaatgattgcatattcatgaacatcttcaattctgaaatatttgtaaataacttggcaatttttttcataaggttgcctattaacatgattaggactttaattgttcacacaggaagaatttgtacttacagagcaccacctatttgataagtaacatttctatgctaagcaacttggattatgaacacayaagtcaccttcctaaaacaaagtataagagatgctattttccacttaagcatgattcaagtttgaaaatgtcaatagatgcaaaaagccaccctagagctttgctctctcgaaagaaagaaggaatgacatagtcaatgttaactgtcaccagatgaagagaaatcagattgtcaggcctggatctataaaattcttgccaaagtaggacctcatttacacatacagatcttcataccctttgctaagaaaagcatctgtggcagtttagatgtttgtgcgtttgccaaagatctttcactctgaataaagtaaatgtcatgtctgttgtttatctcaaattcagcagagtatttttaaaaggaaatatttgtgggggagggtcgagggagaagggaagaaggaggttggggagctccagttagttgggtgtggctattttatagcagtactcaagtatcatgataaataagcttaaaacatactttgggcttatgaactgaaagtctccttttgaagtgacaacacgaaataaatgggaatgtggagtcttcccgaatctatacctagtctgtcaacaccaaaaaaatccagttaattcagtcaaactgattatttggcatcatgtagacacagctgtcttgagctaaaattttgaacacttaaagatagatggcattgtacccagagccagctggtacaatggcatctatctataaytgtgtataaaggattgcttaaaacttataagattggaaatagaacttaattgcttaaagttcaagctggactccattgaacagcaattaaaaaaaaacaacaacaacaacaacaaagaaaacccctggtgtgataaaatttcttggcaaatgggtacccttgataaattcacacttttagttaagagtatgctatggtaatttaactatgtaaattgcgttgaatataaaaataaggggaattctctatgtacctttttttaaaaaccatatttaacctggcttgtaggcattaaagtcataatgagatcctaatgtaaaataaattctgagacttttcttcaggacatctattttgtgtgatacaattattttgctctttgcaaaaatcaagtatttgtcttaaggatgctttgctttatcagtgtaatttgttttatggaagtattctatgtaactttgaatattattttattccccccagatgacatggaagccattcctgtcaaacagtttgtcaaacacatcggtgagctctattctaataaccagcatgggttctctgaggattttgaggtatgtttcaaggctggaagttaacttccagaaacctaagtcttactttatgcagatttttgtaaacttgaactgaattcattccaagcataacaaaacagtaactacggaaagtggagtttttcttttcatctattattttaataggcattcttttccaaataaaatttaggtgaaaggggagttgattgtacctgtcctgaatatgtatttctacaaaagaaccgacttagtgatagaaaagaagcaaactggtagggattgcttttcaggttcttgctacatctaattctaactgggaacagcagtcataacacaaggctccctaattccatgtcttttctgcaatgcacatggtatagtgaagatagcaggtttggtgtctgagaaactgggtgctggcttcatcagtagtgagcttcataatcctcagaccaatcacctcatctcggatccccagttttcccatttttgaaaaatggcaccaatgtcacctacattgtaacgtcgttggaaaaataaatgattaacatctttaaaagtgccaagttcattgttaagaaccatgcaaaggttgactgttgttgttttcatgattattaatccttggagagaagacttgggttaacacagccttctgattttaagaactggtgtgtaggaaacaaggtagagagaggcatgtaccaccctgccaactctgggttctgtgccagttcagcagtgacagggtgtcaatgaggagctattaaacagactgcccttttcttcactgaggcgcttaactaaggcacatctctggcagcaagagttgtgtcgaggaggccaagttttcatggcagctcagctgtcttctagctctgtgggtaagttggttcctttctctgtctcatttctactttaaaatggaaatgatgatgatgatgatgctaacctacccatctctttcaacaaaattggttacagggcaaaatgaagtaatggaaggtaagcactttaagatcatctaggagtcatacagctggaaggtgcagttaccttgaatgaacaatgagaaataaaaacaggatgaaaagcccctgtctatgcaaatttagaatcccaaaaggctatcataaaggcagttatattgctgacttgttttaaattaagtctttctcttagtttttttgttagtttttgttgttttgagcagaatgaaaacaaaggtggtagaaagaacctctgatttattctacgaagtcatatgttttatggaaccaacaaaagcatgtcaagtatttaatgctattagatgcttactaaaaaaggtgcctattcaactacaaagaacatggtttaagtcaaacattttgtattcatgaggacagcaaatgtgtgtggtgttaaagtgatttagttcaattgactgttggctggatgactgagcaagaatattgaggcatttaacaacgttgatggtattcaggacaaacatttatcctctagagagccgaatttgatcaggatgatcaaatgcaactccagtttctcaattatttatgatttgagaccccagtgctattcatcacagctggttttgacaccatttaattattcaaaataatcagctacacctctgtaaacttgatctgacttaaaatgggctttgctgcatcaaaatcatgcttcttaacaaatcctgggcatctgtaccctatttctgtcctaaaaaaatatactgcagctaaaagctttaatcgcctacattgaactttagagcttaaatagtattagctgatacttatgggagtggaatggggagggcaggcaggaaggtgaaagggctgttgtgatttcactgtcttttcaggtttgaaaggtttaaaatcagagctgttcacaataggaagaatatgctttcttctaaaaagaacagcaaagcagcaacgtaaaggggagaataagaaaatagaaaagctcaccaatactactgtcaccttataattaggtgaaaatttgaagtacttttaaaagagtagtattccttttgggtaactgctaaaagggaaaactggtaataggctacataagaagctattacggctatttyataaacagagatagtaacaggctttataagaaaggacagaaaaagattttgtgtaattaaaaacaaaattgtattatggtaagagagttaaggtaatcttagtctcagatttccagacccatttacctggaataatgatggccagcatttactagttagcactgtgcatggatcattctatttcctgaggtaggtgtatcttattgtccccattttactgatgacgaaactacccatgagaaaactgaggctgtgggtggctacattttgaaatggcaggagtagggtttaagaccagggtatctgacttgaacccacatggttcaccttgacaccatccagactctcattaaagtagtgtcctgggccaggcacagtggctcacacctgtaatcccaacactttgggagaacaaggtgggaggatcgcttgagatcaggagttcccaaccagcctggacaacacagcaagactctgtctctacaaaaaaaattttttttaattagccaggtgtggtgacgcacaactgtggtcctagctattcagaggctgaggctgaggcaggaggatcacttgagcccaggatattgaggctgcagtgacctatgaccgtaccactgcactccagcctgagcgacagagcaagaccctgtctcaggaaaaaacaccaaaaagccagagtaatgtcctgtaatgagccaaggtcagaaggagaaataaggaagcttgcaagtgactagaaatgatcatgcctcggtgccttaacaatacaaaagtggggagagcagccaaattaggaaccccccccactaggagtattagctgcccattacatgatctttatggtctcgagccttctaagatagctgagaatacgacttataaaaatcttatccaacatgtaggcctaaaattagtcttaaaattatgagaaatacaactgaaaagttaacaactggacattaagaggagctaaaacaacccatctaacagttactgatgatctaccattctctggacataatataagatacaaatatgaattagagtccttgccctcaaagagttcaatctggtactgggggaggccagagtgtacacaaccaaaacagaaacaggacaaagcaaaataagtgctattgtacaggcataaagttctgaagaagtgcaaaggagaaaggcatctatgtattttcattggagatttcagcaaaaattctcatccatcatgtttaaacatctcggaagtaaaaaaatgttggtgaataactatcgtagtttcagaactttactgcttggagaatgagaaaaacaattcactggtacctttgactctttgtctagaagtgttgctgtaagccagctttttgttcttgtcarataaattctagagaccgtgaaaagcaacatcatacagtatttgcagtcactagaaataacatcagtccttttcttgtgatarcgttggatgacaccattaccttggctacctgagctaacttcaacctcattgtccttcccagggagtagtttcccagagtagtattaaaagattgacagcctcttccttggcccccacaaacataaygcagaaggcttccaaaagaccagtgctagcatactctttcaaaaggaaggcactccaaagctccatgagtcagaagaattaacaggcagggactggtagaatcagaagtctaaaagagtgcaggatgaggccagaagtccacagcccctggacaagatcctttgggggactgcctctattacagttaaccagctgtgctaaatttgggctggttgttcatcttaaatcaaaagaacaaagcttagtccacctgagcccatgctctgagggaccagtggccacaatcactttaggaaatgaagggagatgtccagggctgctgatgatgtataatagggaagtctctggtcagaggtgtaatgctgcaccgactgctgcctgcaagagggcagaaaatgagcctgtaggcagggctgtccaatcttttggcttccctaggccacattggaagaagaaatgtcttgggccacacataaaatacactaatgagagctgatgagctaaaaaattgcagggaaaaaaaaaaccctcaatgttttaagaaagtttacgaatttgtgttgggctgctttcaaagccatcctgggccgcctgtggcctgtgggccatggattggataagcttgctgtagagttagtttcctcagcgtttttgacaaaaatgccagtttgggtcttaaatatcttaagaaaaacgtttttaaacggttatgaggtaaatcacagttttttgagattttggtgaagagggagataaaagggagatagccagatttcatgaaaaataattcttatgctagagaccagctgcaggataataatgctgtgttatactctccaaagataggttagttttctagggggcaaatgcagtcattttgataaagatacatggatttggatacaggaagagaacaggcattcttaccaaggtaaatggcaataaagcaataagcaggaaatcaaatggtcttttcaaagggtatggagttaatattgtctgggattgggaagggtsgggaagataagatgggaccttgaaagcctggctaagggaatgtggaatctctccacacgtttctgaggaagggaataacaaagtcagcacaacgtttgaggaaaatcagtctggcagcaatttataccctgagcaggagagagtaggggctggaagatgcagtgtaaccagcacctgtcaaaggccagttctgtgtccgacactgtacatgcactgggtcactaccatgacctaaacccatcagtcatctgtagaacagtctctttaccacaattgtaggctgcctgaactcaggcactaagaatgttacccctacttggtgtaatacttggtaaccagatccaaataatttattctcagctacctttttggaactgagcaatctgaaagatttctagaagttttgttgcattatttttttgaattgagccacagtatagtaggacagtaggtctttaagtgctctttaaatagcctcttgcatcaatgactgtaggtaggaagtgatttagcctacatcacctccctaaaattctcgttacatcaatttttagggtttgttcagtcttcgattttttgctttattttacacctgttttatgttggccttctcctatgcttatgtgcctgttaagattcaaactgttctttttgagaattctagctttgttacatagggagtaaaatataaacaagcttaaactatttatcaagttctgaataggtaaatttacaatgcatactccattggccagtgtctctttaaagggtttttaacacactaaaatcctgttaactttgaaatggcagttctgatagagaaaagccactcccrgatcagatgatattatcagcatctaaatgagccaggcagtactgcaaggaattacagatgacattattatctacatgacaaaatcagaaggcctcaggcaaaccccatgggttctaataaaatcagatttgacaatatttattacgattttttgtttctgtcattcatctaattggaaaagtgaaacagaggcaacagatcagacaaggggttttagataacaaagagtttggccatattgaatgacagctttaaacaatactgacagctgctcccaagcagtcttggtcaattgcattatattagaaaagaggctccaacttcagtccatagctagggtggtcagatctatacaacaggaaaaaaaaatcaataaacaaagtaaatctcagactaaggtactaaaagccaaaatctctcagcataagatacctgaacaactcaaccctaaagaagtacatgccaaaggtgtgaccttcaaaacccgaaaacaaaagactaacttgtttcaaatccattttcaaaagttgtctgcccttgaaactcttcaaaagagcatggctcagagcttataaggcagtttcaaaaggcaggtcccaacgtgctaagtttggctagcattgctcatgttcttacgtagactgatttgtgatcacactttattatctcattttagagaagagccaaagggcagccttaaagctccttaaaccagtgttttccaaaccataggttataaactatgttagaacagaatatattggagtttagtaagagtaaggaaagggtaagaactgtcattaaacacactttcccagaaaggtggattgaattaatgcctgtggggcttttttttttttttttaaatggacagctgggaaggactataattatggaaacttcaatttacagtgtccaacaattggagagtcattgaatactgtttctttgaacacacagaaattctttgcttttataccttaaattctttgagtacagtaacttcctccttctagagaagaagtgtacttctccctgggaagtactttgtgaatataaaagacaaccagttcattgttttcattatgtttaatgtaaatactatggaaaacatgcataattactaggcaactcctttgtggaaaaaaaaagtctgcatgcttctaaactctgctacatctgttctgtgtaaaacatttctcctgataattttgtgttactttgttcaggctctttgtagcagctgtgtactgctaatgacttcccttattagtcagctccagtactttcttgggtttgaagcatatagtgtagaaaaatttggcttttcagcaacgttgtattaggctaatggatgacgtttaaatccacggccaaggtaggataagagtgttatttctgctactgctatttttccaaagaaggataacttttaaaatactagagttcacaaataatttgtcaagactgtatatatgagatatgaccattagttgggctgttattagggttatttcagcactgagtctttagagtcaatgcaccctcacaattataaaatgaggctataaggcctgtaagcatattgcaaatcatggtagagattatacttcttagaaattccctttcttcctttaagacttaggtaaattttttcacctgtctaaagccttcctctgttctgtgctcccatcagagctttctcaggcctcttttgtattcatcatgtttgactatctttttgaatatttttctcacccatagactatgatgtattcaaaaagagatattgttttacatctcagggactaggtcaaaaactagaaaaaagtagatgattgatgaaatagtaaataatgaaatctttatacctttttcacattcttcataaactcgttataaatatatcaataattatatccgaagttgggattgagaaggtaacggtggctgtggccagggagtgagtaaatactttatgcctttaaatgtatatggtgttcctttgtttctaaactgtgtctataatcttgctgttttcttcactaggaagtccagcgctgtactgctgatatgaacatcactgcagagcattccaatcatccagaaaacaagcacaaaaacagatacatcaacattttagcatgtgagtaataagctttaaactaccttcaactgcgaggaaattaaattttcatgctgggtataagctgaaagccaagcagtcagaagcaggatgccaagaaagaatgattcttgcaagctaacctctcattagcccatcttcaacagtgtagaagttgggacattttcttcccccttagcctttcattaggctgtcagggctcagcgagcttaataaggtgactgaaagaaaatgtttggagcttcgctattttcacatgaagtgatgtcatatcacatgttgggagccaaaatttgaatgtcacttggttacactgacattgtttttaacctgtaagggccaaatcttttaatacaaatgaaaatattgggaattgaatcaagcaagctgaatttcaaagcattctttcaaagactacataattggcttgtaccttaaatgatgagcctccaggccttttggtccatgtgcttactcctatctatcacatttccatggtcaggaatattctgtaggttagggactcaaacaaatggacattcttcatacagagcctcaaggaataccctaggagcacaagctacttctatggctagaagaccacatttcacagacatgtggggcttggctcactggcatataatatatgctttgatactaagggtaggggcatagatatttatagttaacatataccatggtaaggacattacatagaattgtatacaatagtgcatttaaattggaccacttaaaatttgaacagtactgtataatgttttcttaaagttttagtgaaatataattcatataccatatgaaatttacccatttaaggccaggcacagtggcttacgcctgtaatcccagcactttcggaggccgaggcaggtggatcacttgaggccatgagtgcaagaccagcctggccaacatggtgaaactctgtctctacaaaaaatactaaacttggctgggcacagtgactcacgcctgtaatcccagcactttgggaggctgaggcgggcggatcacgaggtcaggagatcgagaccatcctggctaatgcggtgaaaccctgtctctactaaaaatacaaaaattagccgggcgtggtggcaggcgcctgtagtcccagctactcgggaggctaaggcaggagaatggcatgaacccaggaggcggagcttgcagtgagccgagatcacgccactgtactccatcctgggtgacagagtgagactccatctgaaaaaaaaaaaaaaaattctgaagttaatgggatgtggtggcatgcgcctgtagtcccagctaatggagaggcacacgaatcacttgaacccaggagggggaggttgttgtgaaccaagattgtgccactgcactcaagcctggggaacagagcaagaccttgtctccaaaaaaaaaaaaatttcctagggtatacaactctggggttttagtatattcacggagttgtacgatcatcaccacaatctaattttagaacagtttttgcacctcagcaagaaacctgttagcaggcactcccaattcctccttctctccagcacttagaaaccctgtatctaccttctgtctctgtggttttgcatattctggacatttcatataaacagattcatactatatgtgaccttttgtgtctggcttctttaatttagcgcaatgatttcaacactcatccatgttgtaccatatatcaatacttcattcctttttatggctgaataatactctaatgtgtggatatacagcattttgtctattcattcatcatttgatggacattstttcttttccgcttctcagctagtatgaataccgctatgagcattcatgtacaagtctttatgtagacagatattttcacttctctttggtgtatacgtaggagtagaatttgctagattatatggtaattctatgtttaaaattttgaggaactatcaaactcttttccaaagtggctattcattttacgttcccaccaacaatatataaagggtccagtgtttccacatcctcaccaactcttactatttaaaaaaaaaaaaaaacagccttcctaaccggtatgaagtggtatcctattgtagtttcgatttgcatgtccccaattattagtgatgttgagcatcttttcgtgcttattggccatttgtataacttgtttggagaaatgtctaatcagatcctttaccattttttaactggcttacttttgtcttttgttgagttgtaagagttctttatatattctggatacagatcatttattgmatatacagtttgcaaatattttctcattctgtgcattgtcttttcactttcttaatgtgagttctctaaatttgttcctttttcaagattgttttggctattctttcaacaattgtttctgaattgtactactgtactgcttttgttaaatttattcctaagtattttattccatttgatcctaatgtaaatgaaattgtttacttagttttatttttggattgctcattgctagtttatataaatacatttgtaggttgtatcctacaaccttgctgaatccgtcttttctagtagttttttcttgattccttgaatttctgtatacatgatgtcctctataaacaaaggtagttttatttctaaataaaatgttacaaaaactccaagttacttttgaataggattgtttgttctacttttctgagaaaatgaactggttaaaaaagccagggggagaacaaggaagaaagtcaaacctctccctagtctttggattgactttggcagtatttgttggccagctcaatcaaggctcaccactgctgtgactatgaggatttctctatccagatacacctcctttctaaccagagaaatcaggcaaggatatgtatacatctgtgccttatatatacatacatacatacacacacacacacacacacacacacgtatacatctgtgccttatatacacacacacacacacacacacacacacaccattctctccaccagagcatcctttacttctctaatgtcaaacatcacttactgccttgctaaaagtattgtggcaaaaaaaggaggagaaaatcaaagcaactaatgtgtgatgtgcccaaaggtcatggtgttttgctagaaaaccatcatctctggttaaatgtgaattgcactttcacaacttcatttgtgattttactttcacaatttcaaattagatgtaattttatttttaaacattcagggagttaggttttggtgttctcttggccactcagattctgggcacattgcctgccttcatctaccctctatattaatgccttttcatagcaaagaatagcatagaaacaagtaaaatcagaccgtgaatgagccagaaacatgatgtatgaaaaaccttctctcagattcatcacaactttcaaggtatatgtggatgttaccaaatcacctcccaaattgatctattaatgtcttatttgtcagtctaagaaataacaatatgcaattaatgactactaaggcataacggtttggatccagatgccttaggagaaatttttcctttggggcctatttatatcaagcaacacctgtttcatgtcaactgtaaactgaaagtttgtcagaacaacaaaaacagttcacagttccaaaaacatagagggctctcaaaaattgcttggtatattctgaggtcagtaatgcctatgctgatccactcattggacttctttttcaactagccttttatgataatgactataaacagaaacataaattgggttttgcccattctgtttctacctagggaaaataaaattataacctcagcttccttttacttattttgctatcctaaaaaaaacaggcacaatctgctgggcaactagatacacatgtcatgcatcacctacccccaacttttgttcattaactgaggttaagtggatcctaaaatctgaacattaacttcagattcctgtaatgagattactcttaacaaaagctctggtttcctcaattccttaggttctgttagggtagcagggaatccaagtgaattagcaatggaattgcctgaaaatattaatagatgttttggacttgacagatcagtcacccttttatatttgtattaatggggagggaacaggggcatagggcataatcaaagccctttgaacttggctttaaaatacagaacaagcaaatacctttgaacttggctttaaaatacagaggactacaatttgtaatagttttacatgagtttgcatcctgagagcaggagatgtaggagtggctctgtattttgggatgggtttgaatgctctatttagttgttctgccaaaagttttctcagactaccttgggagatgtcatgttacctgattgccttgtgttgtgctttagaatggtgctagtttctgaattatccattttatttcygtttttttttcttatcttctatagatgatcacagtagggtgaagttaagacctttaccaggaaaagactctaagcacagcgactacattaaygcaaactatgttgatgtaagtcagaactgttattataaacctgtttctagaaattgaagactgcagcagaaactgtttaatatattttaatactgtacagagctttcactaaaaacaaagcccattcaatatggaaggcatttgaattattgactggtcttctgtgataactgctttcatctcactttgtgctgtgtcattttgaagggttacaacaaagcaaaagcctacattgccacccaaggacctttgaagtctacatttgaagatttctggaggatgatttgggaacaaaacactggaatcattgtgatgattacgaaccttgtggaaaaaggaagagtaagagccttttgactcactatcttaataatgcaccttcattcaaaagatacttgtggagtacctgctttagggtaggaacttgacaaggtataaagagttacggaaatgaaaagtgttctctctgctttatcttgcttatgattcagaaggaaagagagctaaggcattatgagagtaaatgtgatgacagagatgaacagggtatcagtggaatgctgcaaaatgaatcaatgtatcctctgtacattcctctgtacagagattttttaaaggagcaaatacttgagacttgaacaatgattacgaggaattacacaggctaaaaagagaaggaaagggtgttctaagtacaggggacagacaacagtaaacagggaaattgaaagaagcgtggtgtagacaaggaactactaatagttaagattgggggaagcaaaaattgcctaaacagtttaaccatcattaagaggaccttttaaaaaaatgattagtgctgtagaatttattggattatgagtttacattagatgatgctaatttaggctggaataaaagctacacttcaaggaatcaccacactgggttgataggtgcatcaaaccactatggcacatgattccctatgtaacaaacctgcaaatcttgcacatgtaccccaaaactaaaactaaaaattaaaaacaaacaaaaataaaaataaataaaagaacctacgcttcaggttccctgctcaaaatcaccactgcttcatgttgtggagtcactgttttacttttgatgatccaagttacaataagaagagtctcacagttagaagagaaccttccatgaatccaacccggccttccaaatgatacttaagctccctttataacaaaccttacccacatttcttacaggtcagacatagaggtttctttcttagtcccttttaaaaatgcattataatgcaaaaataaaaatgcattatatattgaaaggtgaccataaatactaggcccatttctcacatggtctcacacaaacttatcccaagccatcagccttgtcagaggtcacacctgcctttaagcagttaaactcacgtattcctttttcagtcaactaaatggcaatctcacctgtgttttaacattgtcgtttgaaattacattatcaacagaattgtggcatagattgcagttatactttacaacttttttctttctgcagcgaaaatgtgatcagtattggccaacagagaacagtgaggaatatggaaacattattgtcacgctgaagagcacaaaaatacatgcctgctacactgttcgtcgtttttcaatcagaaatacaaaagtgaaaaaggtatggaaggaattgggtaggctgccagggcatcccctttttatacttgtatgaaaattactgtacaaccaaggccaaatctcataaccaacttggtttttaaaaagtatttttaaaacattttttcataactcttttgattgacatcagtgtatggtgtgaaaggtattggcaaagcatctaatagaatttaactggcctgattgagcctttaatctctacatgaacaggcttcattttttaaaaaatcatcctcttaggttttggtaatactcagcaaatatggcagcatctgtttgatttagcttttttattccaattttctgacagatataaagcattgtttcccaaagtatgttccaaggaatacttgtcctgtaagattcttgtaaacatcagattctgctgttcaagaatgggaaatgaatgctacataatatatatccccccagcattttagaaatttacagtgaacataagtgaccagagcactggtgttaacaataatacccttctctatagaactactaataccctaggaatcacatttttgtggaaatactgttttcaggttatctcagtttctttttcaaaatccactgtcacaacaaatatcctakatcaatcatcacagcagtacacagtctccccttaattgtggaaggtatgtttcaagacccccggtggatgcttgaaacctcaggtagtactgaagcctatttataacaatgtcttttcctatacatacatatctatgataaaatttaatttatcaattaggcacagcaagagagtaacaatactgaaatagaacaataatattctataataaaagttatatgaatatatactgtttctcttaaaatactgtaatatttttggactgtggttgacctcgggaatgtgaaactgcagataaggaggaaatactgtattaagaactgtaaatagacgctcattaaaaaatgtagttattccacagaacttaggtatggcagttgtttgcagcaatgggataattttttttttttcttggtgtcttggacattttggaaaatgtgataaaactgtagcctccttgccccatttatattcacacttactcacatttttatgtaaaatttcagtggctccaaagcccatctgtgatcccaggttaactatcctttctatgtatgtttatttcccaaaatggcagaaataacatgaatatcagtagcatagcaatacatctgtgttctctactatgaaatagagctgctggctggctcaagatgatcaataaccagcaaaaaacttacaaagcccaactgatgagaatatttcaggtatttaaacagggcccacttactcttgttttagaaacagcttaagtcagaggaagaagtcaaataggaactttaggtgttttacatactaataggaaaaagtagaaaaatgagagttaacagaagaattaaattaaagccatcatgggcctttgtacaatagcacaggaccagacacacttcaagcttcagtgttaatgaccctgagtcatccaaaaaaaatttagaaattaggtattgataataagaaatcgtatcatagcaaataatctatttggggaatatttcatctaaagtagttaaaatgtaaaaagttcagacacttaaaggaaaactactctgaaaaagtcatttatgaaagtgacaggtaaatgagacattgcctctgactctaaagacagaagtatttgacatttaaaatcttcccatcacttcctggatagtttacagcagcaacaagcactctggctcctaaaggtccagcctggacagtggagaaggaatgggaatcacagcccacagagacatgaaagcaaagtactaagatctggacttggggcagaaagtcaggaaatggaggccttgcaggaaaagtacaagtgctttggatagttccaaatccaaaaaaaactgatactaaatgttcattcttagtacaatcttaaacagtcttctcttctaagtgatagtgacacttcatatccagcttggtaatgtctccaatttaatggcatgaaagttggctacaagggggaataacctagcctgggaacagtgattagggtgaatgtgatcagtggtcatgtgtcctgacacccttacattatttttttccagaatgtccaccccccsgcttaaagacatcttttttcacttttctcacagggtcagaagggaaatcccaagggtcgtcagaatgaaagggtagtgatccagtatcactatacacagtggcctgacatgggagttcccgagtatgcccttccagtactgactttcgtgaggagatcctcagcagctcggatgccagaaacgggccctgtgttggtgcactgcaggtagggtctaggattcaacatgtgaaatagatggggcaggggacttaggcctcagtgaccttggaccacaatgattgctactgctttcacttagaagctgaatcttccactggaaactgggatggataagacctatgatagtcttaaagaggctctattcctgtaacattaagaaatcatctgctgcttctgtgatttttaaaaaactagatcaatccctagtttttataaaatcttcttattaataatatcagccaggcatggaggccaactcctgtaatcccagcactttgggaggctgaggtgggtggatcacttgagcccaggagtttgagaccagcctgggcaacaaagtgacaccccatttctacaaaaattaaaaataaaaaaattagccagcatggtggcacatgcctgtggtcccagctacatgggaggctgagacagaaggatcccttgaacccagtaggtcaaggctgcagtgggctgtgttcacataactgcactccagcctgggtgatgatagagcaagatcatgactcaaaaaaaaaaagaaaaaattacaaaatccccattgtttataggaaaattgtagcctgatcctaataaataaaaatatgacgttaaacacaagaactttccacactagaatagagattgtgtttttgtaaatggcttttctgaaaggttcttctaaatamcaatatttatagtatatatgaaaatatttcatttttaaatttttagtttaaatgttccatataaaataccttttcaaaagcactgggaaatccttgtataaagcttgttttttgtcagccacagtaaatgactttagttggttgtttaaaaatgcttttattctgtttcatttgaaaatgcattcttgcctcttttttgtttgttttaaactttggtactcaaatacatgtcgcttgttctgtgatttatgttgcaatgctaagtgaataacgtacgtcatctaaggttatctaagtggggtttaggctgggagtggtggctcacacatgtaattccagcagtttgggaggccaaagtgggcagatcacctgaggtcaggagttcgataccagtctggccaacacggtgaaacctctactaaagataaaaaattagtcgggtgtagtggtacacatctgtaatcccagctactcggtaggctgaggctcgagaattgcttgaactgggaggcggaggttgcagtgaaccgagattgcgccactgcactccagcctgggcaacagagtgaaactccatctcatctcagaaaaataataaaataaatggggtttagattggaatttttcgaatccaaagttaacagtatgataaaacaaaagtgccagttgagtgtcttcatttcttacagtgctggtgtgggcagaacaggcacctatattgtaatagacagcatgctgcaacagataaaagacaaaagcacagttaacgtcctgggattcctgaagcatatcaggacacagcgtaactacctcgtccagactgaggtaaggagtagctgccagcgtcctcacgacattctggcaaatgctgtaactgaaatttgttaaatgataatgaagagacagattcattcttttagggcttgcagtaatttacagrtttgtattagaagatattctgacaatgatcctattctacggatcacagttttccatttctgtatggatcttaacatttggattcctaaataactacacaagtacttacgaaagagatacagttgtttcaagagctgtgttagatggtagggggagttaaacatgttgtctggcctgagaaatacataggagaggatggttctaaaacccttcattgaacacgattttttgtttgcttattgagttgaagcaataagcacagtatagaataccgtgatccaggcacagtatagaatacagagctaaacttaacacagtctctaccgtaaaataagttaagactgataaagtgagtattggagcaaatcacctagctgtaagtgcttgaaggaaatcactgggaggtccctgttagcagcagaattaaactaaggtacacttcatgaatgagtggctaacccttaacactccctcagtgactaccatgtattgtacctcttaggagcagtacattttcatccatgatgccttgttggaagccattcttggaaaggagactgaagtatcttcaaatcagctgcacagctatgttaacagcatccttataccaggagtaggaggaaagacacgactggaaaagcaattcaaggtagtgctttgaaaaagtttctttggcataaagcaagaaaatgttttaaatgccttgagtttgggggttatgtcttctttgcattaatgtatacaccgaaatggattactatttgtactccttgtactccttaaatgtgatgaaaaagaaaatacggttttgacctatgtatgaattgttggtattcaagtagatatacagtgttgtattttcttctgagcaatttatgactttatctgaatataaacatcagcccctggccataatgacatagtactttaaagtaactcgtttagtccaaaaaatgtcctattttttctgaactaatctatcttaccttaattattaagaatgatgacttgtagacatattgtcctaaaaatatgcctatttcaaaaactatttcagaagataatttaggaatttaaaaagaattactaaacaatactagagaaaagttaacttttcctaaatggttgttctttttctttgatagggacatgaagaagcttaaaagcggttaaggtttatatggaattgactgaagtgaaggtgaaaaagagagattataaggactattaaaataattagggctcagtcatctgataataaatcaaaattgcttctaactttcaaacatcgcctgtctctccagttaccaagtgctttcctatttatctttgtcttttaaattctattttgcacattgttctgtatgtaaatagtttctccctttgtatcaagattcaaagaatgagatgaatctacagttttagttttcatggtaaaactttccatagactgaaactttcatttgaatctcagctgaagaaatgagactgccaagcaaattataccaagtgatatgaaatgaaaaatagtttaatttcactgagttcagtcataaaattaaaaatttttagctccccattaacattctactataaaaccatgagataattaataatgaggacacagtgtatcattttaaatgtttaacatgagttcttacaaaatattaagtaccaacatttcttaaattctgcctttttcgtttcttcaatttttttttatacatactttaaaacttcatttaagaaatgcgaccaggtagttggttcttttacaggcactaaccattttagagctcaagatgaagaaaaaaacaagaatcaaacttgaaaatgaaaattatatccagggaccatgagttttactaaagcatctggagaagaacactgatctcatatactccattaggatggatgccagcccccaaaaaataggattgacaaaatggttcaaccaagctacataaacaggaataataatcaaactactgggctggttacttataaaagccttagaacaatgttagttcagttcaacagaaatgtactgagaactagttaagtactcctttatcttcaagaaacttgattagctcgtaatcaatagcattaagcaatcttttttaatgtagactcacgtaggtcttttatgccagtgaggaatcacagaaaaaaattcacagcagcagtgacatcacataacagaagaatccacatagttctagaaatatctattgcacacagtacctatttctacctgatagtagaaataagaaagatacaatcaaggtcactgagagaagtaccactaggaaagcacaagagtgttctctggggctgggcatggtagattacacctgtaatcccagagcagcctgggaaacacaggaagaccccaattctataaacaattttaaaaattagctggttgtgctgatgcacctgtggtcctaactactcaggaggctgaggtgggaggatcacagttaactgagctacaatcatgccactgcactccagcctgggcaagagagcaagaccctgtgtcttaaaaggttctttgtggcacagaaatggtcttgtttatcagtaatctgattgggatttttgccaaagcatcaagcaaatgctatcaattatatctttgaatgaagactaaaatgttttttctttttcagctggtcacacagtgtaatgcaaaatatgtggaatgtttcagtgctcagaaagagtgtaacaaagaaaagaacagaaactcttcagttgtgccatgtaagactttaaaacagtttgttagygatcttttatactggattgtatgttaggtacagrggcagccactactctgatgctattgatagcacccttcaattgtactgtacgtggccgtatggtagaaggttttgaaaatgtccttttagtaacctcattaatgtatgactttataccagcctcttacctggtactaccaaaagggaaaatgttatgcttattcaactaaggtagtttaatgaaactgggagaggtggttgtcagtgtcagcaagtgctccatctatctgacgtagaatacagcttcatttcaccttggaatgcaagaattgggttacttctaccatattataacataaaaaataataataaagctgttattgctgtggcattaacattcctctaaaacttagaatcctggattaatctgtacaactagaactaccttattcagttactgtggctattgagatcaaggcactgttgattggtggtgacctttgtataaatagctaaggacattgcagaggatgctgtctgtgtgctgtaggcatagacatgggtgatcatttgggagatttatctctaatgaaaaaggccactcttttctaagaccatcatgagcagaaagacatggagaaaggggttggtaaaaggacaaagtatatgttggtataattgtaggaataacaaactagagtcaaaagttatctaaaatcctctgttgtgtccatataaagtattctgttattgatctgctgtaaaaatctctcccacagtaaaactgtattcctacaatgcctgtgtccttctgggtatgtgcagcaaaatttcattttacattctgcctcagctgataacactttagcttgtttaaaaatatagataagtcttagaaagggaagccaggaggatatgttattcatcaagcaaatctcagaaagagctgttggttctgtgtgtataataaggcaaatgtggtgtttttgttttttccatatgatagctgagcgtgctcgagtgggtcttgcaccattgcctggaatgaaaggaacagattacattaatgcttcttatatcatggtgagagtcaacagttaattataaataaagtcaactaaactgaaaggtgttaaagagcagataccacctgtgtgactgatgtcatttttgaaataatttctcaatgtgtaatatgaaaagtatagagatttctgtatcttgaaacttttaacaaaagatacctaatcagtgctggtacaaaaatgcttaaattaagcagaatgcttcttaaggaattaattttattgttaatttcacacatctartctttgaataaatgttgaaatttcccttaagtgaaaacagcagggttaactagaagtgaactgcacatggagagaaaaytgtctgcacagtgctagcagaagtacatctaaaaattagccaaatgtaccgaatgcctttctcaattaytttagtgtagtcaaaacagtgctatcttatttcatgaatatattttactaccacaaagttagaataaaacactcatattcactgattttttttgtcttcccaactgaagggctattataggagcaatgaatttattataactcagcatcctctgccacatactacgaaagatttctggcgaatgatttgggatcataacgcacagatcattgtcatgctgccagacaaccagagcttggtaagtaaagcacatctgctatatattaatgagcccatgaggctacaagcataaattactttgatactttgccatagggctatagtatccatatatgctagggagggaatttaaaatttttaaattctcatcttgaagtctgtggagattcctttcatagtctcacaatactgtccctatcagttccattacttgagtctctgatgctattgatatcacccttcaattgtactgtctgtggcggtgtggtaraaggttttgaaaatgtttttagtaacctcattaatatatgactacaccaacctcttccctgctgtatgtcacttttgaaaagtaaataattgtagcttacaggtactgagtatgtaactgtgtttacatgcattaacttgtttaattctcaacaattttaagacatacatactattattatctcatgtaatagctgagaaaactgagaacaaacttgctcaagagagcacacacaagtaactggagccaggattttaacctgagtcatctgtctccagagaccatgcttatataatcattttactgtatgtcttaccccaaaatattgtatcaaaagtactaatagtgaatttttttttcccactccataggcaagtcaggtctactgcagggataggctattttgttcccacttaaaggtctttaggactgagctgctactacttttccctcccttagtccttctctatttcagtctctaaactatacagaagggtgagcaagtttataaaacagacttaaatgtttctgcttagatcttgtggatacttaagtttcggaattagctgggtctataaaagttactgtgtggacatgtgaacccatgaggtaaaaacaaaaaacagtgaggatctgcctttatgatagtcagattaatgagttttttaatcaaggaagaacagcatgtgactgaacccccagtcttggtgacatgcatttgactgtgtgcccagtcagtaggaacttcttcactttgtcgcattttgctccagcttcaggataccaagactgcttctgtatgatggaatggcaacaaagttgagaatcttaaactaaaagctggagtgtaaattttcaaattagctggcaatagggtctattctgtttggcatgtggaaattggaggcacttagggttgttaaaacgttcatttgttggatgaatcagtattttgttattgtcacttaacagagggcaatcaccataaagcatctacccagcagctcatttgtatggggaggctggagggagactggaccaaataagtggatacatgttctgcagacactgaggatataggaacatggcatctcagtgtctctctgaggcctcggaaggctagattagaatcatatacaactgacctctcagttctgagatggagagtttcatcattgcacagtttttcctaaagattgatatctctgagttctttttgtttgttgtattattactgctatacctttaccaggtcataattctgtaaggagcccaaaagtcactgcttcctaactcacaaagtacggatatagatgcccagatatctttgacctataaatatacttgtaagcaaaacagtcatgagaccagtgtgcctgctgaattaagaagcagcatttatttttcttagactttcaagatgaaccatttttctacctttcttctaccataactcaaatccctttggtagcctttaagctagttaatttactattcatgttatcatcatagtatttctttaaagtaagtagtttttattcccacttttcagatctggaaattaaggttcagattaatttacccaggatcacatccactcataaatcctatgcttaatctgtgcatatttgttacatttagatgccctgttcattaccttatgtctttaatatctgtgtccttggacaaaacctattaaaacccacgacagttacagacttcttttgtatagactaaacccagttgctaatctgtttccccttatgctgagctttaaaaataaaaatgtacttggcaataagctatattgaaacttgaaagggtgataagtctcattggacgttggctcatttctaatgcaacaatgtaagattaaacaaagccttctttgttttgaacattattcagaattatttctgacttcaatgatagtagctaggcatcctcaggaaaatgcccgtagaaacctatatactacaggaaaactacagtttgccattggagctgattgattaggatacgtggtgtacatcataatcatatttctcacagtctccaacctatgcaacaattaactttctcttaggcatccatagtttttagggatagaattcaaggaccaagcctgcatatctatttttaatcttaaaatggatgaacatttaaagcttgcctgattcaaggctgaaagactttctatgttatcccctcttgaaatataacattgacagatttcttttaaaactgccttgtacatacagccaacctacttactcacacacaatcttccaaaaaagttctatcccttaccatttattagcagagtgattttagataatttatgggccccctccccaaggccttgtgtcctcatctgtaaagacaggtgatamaaaatctcctcagggttaatatacaaaatttgtacagaactcatacaactcagtagtagaatcatgaaatacctgatttaaatatgggcaaaagacctgaatagacatttctccaaggaagacataaagatggccaagaggtatatgaaaagatgctcaatctcattaattttcagggaaatgtaagtcaagataccccacacccattaggatagctattaaaaacaatcaaaagataccaaatgttggtgaggataacaaagaaaactctcacacactgttggtgggaatgtagattgctagagccatgatggaaaactgtctggaggtttctaaataaattaaaaatagaactaccataagacccagcagtccttcttgtgggcatatacccaaaggaagtgaaatcaacacctcgtaaagatatttgcactcccgttcattgcagcattattagcaatcgccaagatacggaaacaacctaagtttccatcaacagataaatggataaagaaatttgtggggtagggaggaaatgggaagatgtaaaataaatcaagaggatacaaaacaacagatgaggaagaacaagtttagagatctcatatccaacatgaggactacaggtaataaaattgcactgtatttgggaatcatgccaatattgagtacattttagctgttcctgccacaaaaatgaaagtgagatgatgggtatgttaatttgctcctaattatagtaacctttttactatctgtatgtatccaacatcatactgaaaatatacaagaaaacttayagtgtttatgaaagtcctttgcaaaatgcagttcaactacagaattattaacataatccacaggaaataattagcatgtcttgattgcttaagcaattgtgaaataacaaaattaactgacctagatcctgctttcttttttactatgtcaataktacagaatacttctcaactgtaataagtcccctatagtgggagtgtttcaggttgctacactaacaggtgagagatgctagaaaatgattatcaaaatatattttacaatagaatacaataaccattcaacttggtgtagttcgatgggaacatataactcttatgaattcagtttaaacgatggcttgagagggatgggaaatgacaaaatccgtatgcaagaaatagaaaacaaatccttgacagaactgcagaggcttttttttttttttttttttttttttttggattccaaaggcagaagatgagtttgtgtactggccaagtcgagaagaatccatgaactgtgaggcctttaccgtcacccttatcagcaaagacagactgtgcctctctaatgaagaacaaattatcatccatgactttatccttgaagctacacaggtaacctaaacctcagttcctcactaatagccatacctgggccctggatcatcattctaagtaataatgaaataatttaccaccctcaagccaggctcaggcatttgagtaagacttaattttaaatatgtacattttccgtttttcttccttcaaatatttgctttttccagctggctagatgaaatgtaacagttcctctgattcagcatgcatacaaataggtctgttgacctaattataaaaacaatatactagaactcaatattttctttgccatcagaaatgtaagctttgcaatgtgttgcacagatgataatamtaagtttttttaagtaaatattttgctgccttcttgtgggatgagtaagcatgggggggctcttatattagtaatttaaaggatgagccccttccttgttttcctttaattttataaataagaaaatagagtaggatataaggtctttaataatttattgtcacttgaaatttttgactaagccaaatgaattgtttcactagcatgacctacttggttgtttgttttgagacaaggtctcactcacagtggcatcatcaaagctcagtgtaaccccaaactcctgggctcaagcgatcctttcacatcagcctcccgaatagcaaagactataggcatgtaccatatgactrgttaatttttttttttttttaatttttttagagacagatctccctgtgttgcccaggtgggtcttgaactcctggcctcaagcaatcctcccaccttggcctcccaaagtactgaattacaggcatgaaccactatgcctagccatgctttttttaaaaaacaaaaaaacaaamaaaaaaaaccttcctggtatttttcttctttccagctgtggtttggttaacacaacattgttgagagttacctataacacatggctttctcaggagcaagttctagtcattagattgtagatatgtgaaataaaggaagggatttgacccatgttgtattggttacaggatgactatgtcttagaagttcggcactttcagtgtcccaaatggcctaacccagatgcccccataagtagtacctttgaacttatcaacgtcatcaaggaagaggccttaacaagggatggtcccaccattgttcatgatgagtatgtatctgtttcttaattttaaaatgtagaccgtttttttgtttaatttcttgttgaaagcagtagaaaaggaagccagaattttaaaacctatcaacaacctcagcttgtgacaactccatgttatttctactgtggacatgtacaaagtgttgttgctctgtttacattttaatatgtcaaactcttccaagactccaggttcttctagagtatatgttctagaaaggggaaagtattatatcttagcctacagaggtagatctgcatgcatttagaggtgttatgtgttagtaacaaatgagtaaattaataactgtttaccttaattaaatactttttaaaaatccttacactgaatttcaaacacttgttagggaaataacctttaaaaatatgacttagttgatgagtagagataaaactactagtattaatgataatatttaaagttcatgatgtgttttaaagtcttcagtactgtcttttgggatttaaagaatatgaatctcaaagagaaaaataacttgcacctggtctcaaagcttctaagtgtcacaatggtatcccagcccagcacctttccactttaataagaaggaaagggtcatagatatatcttattgtatatagatatttggagccaaacttcatggcctgtaagtcagttgtataattgaatcgtttcaaatcacaaacctttagccaatatggaatcaattatacattcccatttttatttcagttccaaggtagctcttggtcagcagcattcattatgttcattaaattaccaactagctacccaagtagcataaagtattaataaatttgaaagtgaagcttattgtgaaggctttttttcctggcactaatgctgtatcatgatgtacacaagagctcagcaccttcacctcaaatcatagtactctcctacttgaagtaatgtgtactagctgcttccaaaaaattttacagtctttcaaaatgttggcctgactcttgattagtaaggtgaaaaattaagatttgaaaagcattacagttgaaacattaattaaatagcataagatcaatggaaatgtgacaaccatcaacagtgtttaaatagcacagacagcctcaaaataactggggagttgctactgaactaaaactttgtggtatacagttacagcataaagttagggcattttctagaattcctgggttttaccagctcttatcatctcttgtcatcaaattctaacgttactgcccagttatatgactgattttgctgttacggtagtactccgaggtgttttgtcctgaagtcagtaatgcacctaatcttatattttagggtaaggaaagaggaaaagaaaaataaccaccagttaaatactaaacagaagtgtttgattcacttatcttcattcaacttttcagtatatttgtcttatttagtgatttttatgtcacatgctgaaaatatatcccctccagaattaatcagatgtatacaggcctcattcttaggcctgtatacaaaaagagcaaattaatcctaaaccagtagatctgcaaatatcatataggtgagatgccttaaaagccaccagtagaaatgtattaattcatttatctactatctgtaggggataagttaattccattgaaattattgaagagaaactttaaaatttttgaacagttgctagctctagtgagatactctgaacaccagttccttttcagtttccatcttacctactttctgtacctctaaacatcacttcctgatgggctacaaacacgtcacattcagcatagctaaaaccaaactcatcttcactgcctgcccctaatcaacttaactgtacagaccagaaacatatcagagttatttttgagtctccctcacctccaagtctgattggccaccaagtcttcttggtgccatcgattctttcagtagacttttgaaaatcttttacaatctagtgtaaagtttacatttccagttrtcatcccaatctgccactgaagtacttcctgcatgccaccttgcccctgcaaatcctctttcctctgagcaccctttcattcaatacacagttcaaaagtcactctctgagactctaattcatcccagaggtgctaagcaaaatcattaacatgacaaccataccagataaatgtcattcctgcttatcatgtcacaccataattatttgtatacatgactgtcactctcacattgctgaggccagcaatggtaatttattcatcccagtctccaccgggggaaacccaatgcctgggacagcgtgggtactagacaagtatttgcacgaacgggtatgtgttttaaattgtggtaacttacaaactattaagtatatgtacccctataacaaattgtccccagaaagccttgctttttgtctcatttattgttcaaagtcattttggctgcttaaattcttcttttcaaagtgtttttaagctctgtcaaaagcaggagtcaacaggcttggagagaaggcctgcacgcatttgatctgtgaggcagagagttgaacttttagtgtgcaaatgttgtgacatctatttggtcttcatagagatctttttaacacctacttttgggggtggcaggtggttgttggggggggggggtctcaggtgtgtcccaggtggatgacatttctagataagtgagctaagaataaaattcctaaccaaaaagtaaactgcttctatttgaggacaggcacagcttaaagacaaactgcttcattctcagcattctattgtcaactgttcaagattattctgctcagaggctgatctacatcattattgtcaaattttaaaaacagcygggttcccatagatatttagaacataggcatggttctcatatagtcttataagacagctgtagatcagacctcacccaaattactctactcactcacagactgaagaagagttccctttgcaaatacttaattactcactctggagatacatgtatcaccctactggatagcataataatataaaaatactatctgccttattcatacccattctgtcatgagtggacaattaaaaagagttttccagaagtacatgacatgtgataacatcacttttagggctaatcgtattttaacattttctcagttttaatttctaatacagtaaatattgacatatacagcccaaatcccctggaggtcctcaataattttttattttaatttggccctgagatcaaagagtctaaagactgctgagatattctttaagtgacacaaggcatatggactgttttcaatagcaaaggctgcaaagacacccacaaatcataactaattccagtattttcgcttttattgagagccttatggaaggctttcatgttgtcttcttccctaagattgatacttattccagcttcaatttttttgttttcctttctgccctactgatttcaaaaggaagctgcatttcttcacagtgtcagggttataactcyggatagcaatcttggttatgattttaaaaacaacgtattaaaagctacaataataagtaaatatatgaaatagtgaaaatggttaaatgctcacaggtattatcctgactatacaaggaatcacaatgtgttttaaaatgaatatagacagagcacttaaaaaaaaaacattactgtacttcaggagcttaaagtactttcatttcttttgtaaaatctttgaagtaaataaaggcagggaaagatgaaaaaaatagggtttttttcttaacatcactagttaaataagcattacttttaatggagcccttagaggaagtggcaaacaaaatatcaaagccagtgaatttatatactactgtcattttacctaggttacagattacttataccacttttgcaccaagtccctgtagttttaaatgcaaatccatgaaactcgatgagcattctttaatcccacttagttcctaaacttttgaaagagaatggccctttttgtctttgctctgtcattatgtttggtatgcagaagatatttaaaagtayctgtgcatttgattgatttgacttgcgagtttcttgtcatgtttaagccatattgtataaatacttttaattttactgcttatttaaccgtggctaaatacaggaaaggcaacccatggaaaggtgagaataatctcacatggagtgcatgcatactccgtaaaaacatacatgttacctgacttttctatatggctggccacagatagctttgaaagagctaagaaaaaaggggagattcttaagtttaaccatttcactagaacagattaaacaaatgttaaattcttcccctcctaaacaaaatcagtacaaatgacttttttttaataccatgctaaaatgaggtcaactcagtacaatttagaatctgagggaagacaacatgctgaacaagaaccaaaaaccacaataaatcagagttaatagagctatcataatagggtattaaaatatatcctcagagatctaaaggaagattttatgaaatgaagaacatttattatgaaataggaacaaattcggcctaagaatgagaaaatacattaattcatgaaactaaaaacttaaaagataggatactagtggagtgtagaactgaaatgaaactagaatgtggaagtcacatacagaagttctaacatatgtctaaaaagttatccatggggcaataaaatacaggttaaagaggaagaaataacagctgaggttttctaaaaacagaataaagtattcagttcttaaactgagcgaccaggatacatttgatcagtagcattcagagagatttgaataccacagttaacaagcgtgatctaatagtgatatagagaagttcgcacccaagagagwctgcacagagagacctagagtctcttcaaacacaaatggtttatttatatacataggccataaatggaatttcaatacattcccccaaaacagataccatacaaggctacattcattgattacaacccacttacattagaaaccaccagtgaaataacatcccaaatccttataactagaaacaactagaaactgaaatccttacatctaggattgcttataaataattcatgcatcaaagatgtaaccaaaataagtatttcacagtgtctaaaactaaatgatgatgaaggcactgcatttcaaaacctggtgaaatggagccaaactgtacttaaaaaaaaaaaaaaaaacagcctgtgtaaactctacatattagaaaggttaaaaataaacaaaccaagcattcagctcaagccagaaaaagcaccagagaaatcaacaaaaagtacaaggaattaaaagcaaatagaaggcgatagtaaaatttaagcaataaatagtttagtaagagatacagttttggaaatatgatgaaggaaaaaacctaccgtatatctgtagctacattaaaaacattcaagaattggccgggcacggtgactcacacctataatcccagcactttgggaggccaaggcgggcagatcaccaggtcaggagttcaagaccagcctggccaacatggcgaaaccccgtctctactaaaaatacaaaaattagctggacatggtggcaggcgccagtaatcccagctactcgggaggctgaggcaggagaatcgtttgaacctgggaggcagaggttgcagtgaaccaagattgcaccattgcactccagcctgggcgacagggtgatactccgtcacaaaaaaaaaaaaaaaaattcgaaagttgttaatttgcttaggtgtgatagtgtgttttctttaaatgcttatcttttagagtttgatactaaattatgactaaaacacctgagatttgcttcaatatatattggggacgaaacagaaatgaaatgagaatggccatgagctgttgatcattataactgaatgatgactacatgaatgctactgtactattgggctttggtgtctgtttaacattttctataataaaaagctaaaaataatacatattttaaaagaaagaaaataagcatttaagactttataactctatactaataaatgtttaagcctataaataagcatagtaaaataacatttagtgaacacatggtatgtggtgtgtgccaatctctgttctgagccatttacaagtatcagctcaattttaaactctagtctcactatgcgatcttggccagttacttcacctgaatgtgccttatttattcaacctcagaatgtgccttatttattcaacctgaaatggagataatactggtacccataccatagggttactgtgaggactaagtcagtacatgtaaatacctataagagaacatggcacatgaagtacaacacacgttagtgatcactaagaactgaataaaagaatgagttttccacctgttagggcccacaagtcctggccaaggctacatatgaacagtaacacacagaagatttaatgcaatgttgatttaaacaaacaaggcttagcaccagaatggaaatgtataggccaagtcttgcttatttgaacactgatgcaaaaatgacaataaaaagctgtctaataaaacccagtatattaaaagaattacacatcatgaaaaacttatcctagtaatgtagagctggtgttaagcttttgatatattatcaaaagtttatcagtgaattcaggacattttaagagacatttcaaaaaaaaatcgatattgaaaagcgtacaataaaacaacacccattcatgatcccccccccccaaaaaaaacacttagagtaaaaatagaaagcatcctctttacctttataattgttatttaccagatgtwtattagcaaacatttaaatttaatattaaaaacttagaagcttgaacatttaagatacatgatacttgctttcagttctagcacgtaagcctatctaggtgctagccaacacagtaaaagcagaagatagaagaagcgtaaaagataaaaagagggaaarttcgcattattggcagataaagatgtggtcaactacctagagaagccacaaactattaaaacttaagcagggttcttctgtttgaccggatacaatttcaccatgtgaaaatcagtaaccttcccatgcatgaagtgaaaccaaacagaaaatgttatcacaaaaggaggccattaataggggtaataaactctaaagtacctaaaaatttaccaaaaatggaattggcaaagactataaagaaaacaataaaacctagttaaaagctataaaaggcctgaataaatggagaaaagacattgtgttcatgaagagaaaaactcaagattgaaaagatggtaatttcctcagatccatctatatattcagtgcaacctaatcaaaatcccaacaaaaatgtttgtttgtgttccttaacaatctggtttcaaaattactatgaaacacgatggagtcgggtggaaggtcagagttatttggacatcagtgtaccagtaaaaaatgaaaattatatgtttgaatcactaaaaacaatacgaagtaaatgtagagacagccaagactattacagaaacttgctttatcagatatcaagacttattaaggaattgggatacacgtggggaggtacaaaaaatagacaaacagaataaaaggtcaaaacagagttcagaaataggcttgcatatataagaatgtagtacatgataaaaaggaagctgatgtcagtgagaaaagatcacactgtaaaataagaagtgctgggacaactggttatccaatggaaaaataaaataactgtaatcagaccccttccttacatcaaagcaagaataagactcagatgaattagacaattaaacgtaaaaaagtaaaattagaacatgtaggagagtatctttaaaatacaaggttagagaaagcattctcaaacaagattccaataaaagccaaaaataaaagatgtatcaacttgattacatctaaactgtacttccgtataacaaaatgaccacaaacaatgttaagagaaacagatcggggggcaaaaaaactcacaagtactacagacactataaaaataactcctatataaatcattttggaagaggcaaacttagtagaaaagtgttaattaggcgatttcagaagaggaaatatagatggtcagtattcataaaaagacattcagcctccctggtaatcaaggaaatgtaaattaaaaccctagtaagatacagtcttccactcatcagattggcaaaagtgtttcaagtttaaaatgatgaggagaagcaagtgttctcgtgctgggaatagtatgaacaggtaacagccacttgggaaagaaatatggcagtgtctttaaaactaaaaacaggcatacctgtgaccctagcccttctactcagtacctatgctaaagtgcacaaattcaaacaagctaaatgtccatctagaaggtaaacctggtatgcatgtagcagatgaaataatgagttgaactgaaatgtagtgatacacctaaatctggaaggctgtatctacacgtgtaataatttttacctctggagaggttacctctaaagttggggggtggctaagggggactctggtcttatttgtattaaagatataaaacatgtaatattttaattttatgtaacaattcagaaatgacatttaagtttttcaaaaaacaatgggcacagggcatctgaactccagtctcatttctgccaccagccagcaacatcatcttgaacaattcatttaatccatctgttttctcatcactaatgtggaaactgtgtgccatcacagattcttgtgaaaagtggagttgccaacctggcctgatggaaatttactacctttctaagacttttttgtgaggcaaagagaaccacatttatctttccaaggatttcatagaaagtgctctcattaggaaagttccacttcagtgccaaaataattatttcatatgaaattaattttggaaattgtctgttttgagccatataattccatttttaaatttttcatattctgtaagttcaatttaactgtttggaattgttaaaaaaaaattcagagcccttcatcactggctgcttgtccaataacgtctagttaagaggttctctttattgttttttctattgtaccacccaactcatcaccaacaccaaatcatctttagctctcctaagtctacttctgaacctctcatttcctattagatatcaagctaaacgtctcatgaaccaatttgggatactccactttcataaacaaatctcacctttatgctagcttccaaatccctcccccaccagcatttcattcagtcgtgtctttagagtaaatgtcaaaacagtctacttagtttctatgaaaatacatgacagtaatttcatttcaatatatttggtccctttgtacatctgaaatcgtatcttttttttttctcccccaggtatggagcagtttcagcaggaatgttatgtgcccttaccaccctgtcccagcaactggagaatgaaaatgctgtggatgttttccaggttgcaaaaatgatcaatcttatgaggcctggagtattcacagacattgtaagtagtttgcttatgtgtaaaacctgtactrcatcagttgaaactcagactcacagtttagagcagtagttctcaattgggggtgattttgccccccaggggacatttggccatgtctggagacttttttgcttgtcacaactgcagatggatrgcatctagaggatacaagccagagatgctgctaagcaaactacacagcacaagacagccctcaacaccatagaattatgtggcccaaaatrtcagtagtgctcaggttgagaagccctgctttagaggatagtattctctggttatcttcattaaccagatattaaccagatattggttatcttcattaaccaataatgattgttcattaacaatcagcactgagaattggttccaagctaacagagatcaaaaggacatgaagaaggtataggtcttgactataataaattcaaatgattttttttttagtttttttagataacatttatgctattgctgtttctctagtgtgtttttcacaattaccattttaattggtatttccaccttatgtgaaatcactaaactgttctttggctcaaactgtcttcctcttgtttttcaggaacaataccagttcatctataaagcaatgcttagcttggtcagcactaaagaaaatggaaatggtcccatgacagtagacaaaaatggtgctgttcttattgcagatgaatcagaccctgctgagagcatggagtccctagtgtgactggaatcctgaaagggcacttaatttgtaaacttctgaagactgagaacttttttgaggccttttttgccagactctaggttatacaataacccagttacttttttacactgataaaagttttgatatttattttttgccattttatgtcttaatggtatcctactgagcatttgcacctctgttcatttcacacagtgaaacgcaattttacctagtttgcactatatgatcagtgttactgcctataatcttatacaacagcaaaccctgatgtgacattccatgacgacatacatgctacttttttttagttcaatacagtgaaggtctttgttatgacagtgaatattgcttttattattattattgctgaagtggttgcattctactagcaggcaatgctgtacttttcttcagtcctcctctcctttttattttaggcactgttcaatactgtatgccttctgtattttaatggagtggatagcattgttttcttttacagactagcaggctactgggacctaaaaaggtctgttaatgtcatggccttgaaacagttccatttatgctggttaagagatcccttaagaagttagaaggcttaagaactgcttcatgtgaacatcccttattagttacaaagttatattcacagttttttaaaaatgtgtcaaaataaaggataactctgtattacagctttcacagtagctatgtggacaatgtgttatttccattttgactctctaaaatagctacatcctaaaatcagggctatctttaacaatagcaagatagcaatattatatacaactcagttatgagaccctttagttattctccattaatgcttcttagtttgtaataccatacctcacagtaggtagaagaatgaaaacttctgcaggtgtgtaattttgaaactagtcctctaaaaattccctattactcctatagcaatctaataaaaactacctacatagttactgttttctttccttctttgccaaatgttttataataaatctcttaattacatacatttttctacttaagattaaattggaaatactgtmttagcaaaagtcttgggactatctaaactcccacacatagataaatctgatttggagagagaaatttaaaatatttaattaaaggtgatacccacattttcaagtttttaaaagagggagatggctttgtatgcttttgtgtagtttagaacagatacacattagtaaaagataccaataatcattagagctcaaggaagttattaggtgcagcctctggagccatactcacgctgcagtgcataatgggaaaattaggagcattaataagaaatttcagtagtgtttgtaaggaaaataagctacttactgagatctgtttcttctattgcatgtttgcttttgagggacagcttctgtcaaaagtgaaatcatcaccagaactgggcctgttaggaagaatagggttttatttactttttatgtcaattaacttcaacaaaaaggccacgctggctgctgtcatgccatctgggtatgcattaaacattaatgatgatcagcactgaggttctatttatcttgatttggctttcataaagtttgtcagaatggtgctggaggaccagaagtgctaaggagaaagaagctatgggccaagttaaagaatttgaatgcaaaggccaggtcaatggagttttcataaactacataatttaccagggtttatctcatcttctcaatacatagatttaacaacatggaatactctgcttttcaagagctgcgtaagctagtcctgagataagatgttcaagagagcatgctaagttgcatgtgctagatgagagacacctttacagcccctccgctccaaccagaggtgacacaggaagctctgtaaagttcaagtaaagcttgaacacaggaacactacaactgccagatgctgaggagaatcaggaaagcaatgagctagactctttttttagtcaattaagtgggttgttttagatgtatagagtattgatatgagttaacactttttagtagatggcaaagtgggcttgatgttcaaaagtaatgttcgagttagggttcatggtccctttctcagtaattttttcttaataaaagtaaacactggttcaaagacaaatagcaagtattccctcctgtgctatttatagagggctcaattcgtagaaaggcataccctccaatgcaattctgtggctgtcccttacagtggtttcagaatcacgaaaaaacagctagtaaataggatagaaacaataaaagaaagagtttagaagttccctgtgagcaatctgtgtgtcttcagcgagcttgaaccaaagtcttcatatcctgacccactgaattataagcaattgctacttgcccatcttgccaaagtagtccaaacacacttcaatgaggacagttatatttagcaggtcctcacccctgcaagagacagcatatcctcactattattattcatgtgttattggcaaaaacatagcttgcatctttccagaggcagagtttcaaagacagggttttctttgagacataagcacattgcttaagtacataacaaggttattaacacttgcactcaggggaaaggaaatagctattgcaaattaatgtgtgcaacttaataaaataagctgtttgtgtatatgaatttagctctaggtaagcaaaatgcacacatcatataaaaataaattgcaatgatcagaccaagtggctgtgctggacatcaaagaaaagacatgctgttgccatcaggagaactctttcttatatgcgatagccaagatatcttctttaatatgaaaaaagttaatttctgaatttcaaaaagagtaagattagctaattggtcttcctaatttttatgcctttagagtttttagtctattcaagtagaagagtccagcgaggccaaagaagggttacggtgttcaagttctggttgttggagtttttagcccagagtgacatactgaaatcagtaaataattattttataatgacacagcacaactgccttgttatgaatttttcttaaatgcatatatactgtatttaaaattaaaatatagataccaatttaccaaagatacatattactaattytaagcaaaactaaaaaaaaaacccaactcatcataatttaagaatcaaaatgtagtttgtcttaagaatttagtggttatactggaaatgcattttcaactcctatgttctaaagtttatgttcaaatggtgccagtgaatttttatatgaagggaaaatgcctgctttttttttttttttaacagatgtaatttcacttaaccctttgcgctttcccttagttgtcatttaacatacaatactggctttacttatctctagaaagaagaaggcatgctacaaataggaaggaattgtaataatgatatttggcctctactttgtcttagctgttaaactgtttttagtatttttgttaaatatttgcaaagggaagcattttctacagaggataattaatttcaagaaaaatatcttgagttttaagaaataaacatctccagaaaaggagaaagtcgattttataaaatgtcgcaactctccaacatttggggtagtgactccttttttgttaggacatttgaaactagcaagcagccattgtttctaaagaattctggcttcacattgactcatgtttctttcactccattttgaaatagctaaaaatcattaaaactgtaaatattttgttgcttgggtaagcatcttctgggaactttgtatctatggtatataatcatagaattttatattttcatataaagctaatttttttctagtttcaactccgtcatagttttttttcctttttgtggtggatatgtgaattcaactttctgtgtattgaagtagcaaaaaccatctttacattccaaaagaatccaacatgtgttatttctttgaggcagtgattgtgaaagttgggttttctttttaattccattgaccatttgtgcaataggaattagacataattagtcactgaaaacattcgtcacattgacccatttggaaaaagtgtgcttwttttttttttttaaatttgttcagggggaggggttttgtaacctgaaatttttccctttttcttctgtttaaactatatcaaatcattctattatagtgttatttaatatgtaaattgtattgctatacataaaataaagtatggtttttgatgtattcagtagtgttgagcatttctatgaaaatgtctatatccaataaaataggttactagtctcccttaacagatcacattaatacccaccaaccctctggtctaagttttcatggtagtaaaatgaacattggtagtcgtctttacacaggcagcaaaccaaaaagaatggtctttgctgggttgatttatcaacgttctttctcctttaaagagtaaacaatgacagttttacctgctcatctaaggaatcaaactttattcagtttatgactctgctgctaagttgtgaacagaattactattttctctagtgtatcaactaggtttgtaacaactctcttaatatttacgaggtaggatgaaggatatatcctggcaagagttctggagaatctatatgtgtaagatcagtacaattgcttctacttaacaagaacttttgacatttccaaacaggtatacaagtcccaaacttggcagctttggcctaccattctgtcttaacttttagtggctccatatcaggtgctcaactcttcctacccaaggccccagtttttcttcccatatagataagagctgaaacttcactctcgctgtcatgaggaatttaagaaacaatgtgtgaagagtatgtggaagaacaactctagcacaaaagaatgaaatctcttaggatataatcctagtcttcctcaaattatatccatggggaaactactgccctatatcataggatacaccagaggtccacgaattgatggcccgtagattgcattcagtccacagatatattgtatttggctcataattttaaagtttgtattagttaccaatatttaaaacatgaaaacttttgcaataagattcaggtttcaaactcctttaaaaaatttgggtgttggtgtaacaggctcacactctcccatgacagtaacaagatggaaatgaacagcagtttttgcatttaggggaaacatatgctctccagttcaccaaagtctacattgctccctatcacattatgtctagccatcatcagtcatttaattaacctgcctggatcctgtgagcagttgcctctgagacatccaatatgaattctgacaccatcttccatctcaggctagtaaaccaacaaccaagagtggcagtagaagtatctctaagtctttcatcatgaaaatcctagacaaccagcacacagcccagtgggttcccacattactaactacctctaagtccacccaagatgattccattaagcagcagttatgactattcaaaatcattaaaaaaaatcaattttctactccatgacttttacttgcccaggacataaccttagacgaggaagcttcatttatgctactacaagtggcagaaataaactagagtaaaaaagctactggtccaaaactctatttttaaacagctaattgtggaactttgagatttagaaacaaatcactactgaccatgcctggattcagagacaggattgaagacaatggctttaaattcctgcctatgttagtaaaatcgcataaaggcactagaagatgggaaccagaagttggttactagcaagttaaaattggcttttgtgattacgaagttaagtttggcagaaaaggataattacaccagcagtttatctgaacataacaattatgttcctcaaaagttgaaaagaagaaattaactttatctaatttgtggtaatttcaaatcatttgacttgtagttactggcctataaactattttccctttcccacaccctacacttgcagggtataaaggcaggctttgtagcaatatccagtgggccttgcagagcttagcagaacattctaaaccagagacatctttagcactatgttaggatccattccataagcatttcctgcatgtctactacagaccacatgttagttatactctatatagaatgtagagttgttggcagaggcatttcaagtcagatgagacaaagatggtaatttagtcttaaaaaaattaggtcttcaatttattccaaaatatttagttggcactatagtagagatggtttttagggaaagaataaaaaagactattgtgcagcaatgtgagcaaacaagtaaaacctgtaatcacagacactctgtattacatagtatgctgacaaaattctgtttattctatattagttactagaactcagaaaacatttttccatacagtaaaaaatgttcaaagataaggactacaacagggtcaaaaagccaagggtgccagtcaattctgccacttacagtgttatgaggcaagttacttcagcttcctaagtgccattttcttcatctgtaaaatacagaaactaatgtttacctcatagactgctctgaggagtaaatgagatgatgcatgcaaagatcttgggatagtagacagtaagtactcaattaatactagccattttaagtatcatataaccctgctttatttaattgcttgacagaccttttgtcaataacgagtcaacctacctaagcttgcccaattaaatagaaatactgagaaatttctgtcactaatgagggagctcacaaagtcaaataaaggctgggcgtggtgactcatgcctgtaatctcagcactttgggaggacgagatgggcagatcacttgaggtcaggagtttgagaccagcgtggccaacatggtgaaactctgtctctactaaaaatgcaaaaattagctggatgtggtggcacacacctataatcccagctactcaggaggctgaggcaagagacacttgaacctgggaggaggagtttgcagtgagccaagatcatgccactgcactccagcctgggtgacagagtgagactccgtctcaaaaaaacaaaacaaaacaaaaacaaagtcaagtaagatccaagagaggtgaatggggatgaaggtaggtagtgaaagcaacacatataccctactgtccagaaacaagagtggcagaagcagggaatggataaatacacatgatgccccaaagcttgaatatttctcttcta

SEQ ID NO: 95171 - DNA, 54748 bp, Homo sapiens
aatatgtaacatttctcctttttataaaacttccaaccttctctttgttctttgaacgtaccgaagatcaccctgtctctgtggacgacctggaattgcaattcttgcttcccccaaaaaatgttaaatttgtctctatattttatttgacttaaacagtagataaaggctagtttgtacagtttggtatgtagatttctctggtgccatgtccaggccaataaggatctagaattgtctctggggattagcctttgtccttcctgaaagaggaagaagaggagcaagactatcttcttttttatttttttaaagccgaggtctcactctgttgctcaggctggagtgcagtggcgtaatcatagctcactgcaacctcaaactcctgcactcaagcaatcctaccacctcagcctcccaagtagctgggactacagagtcttgctctgttgtccaggctggagtgcagtagagtctcgctctgttgcccaggctggagggcagtggcatgatctccactcaccacagactctgcctcctgggtttaagcaagtcttgtgcctcagcctcctgagtagctgggattataggcgtgtaccaccaggcctggctaatttttttttttttttgaatttttagtagagaccgggttttgccatgttggccaggatgttctcaaactcctgagctcaagaaatccacctgccttggcctcccaaatcactggtattataggcatgagccactgcatactgtttgctgcttttttttttctttttttgagacagagtctcgctcttgttgcccaggctggagtgcaatggcatgatctctgctcactgcaacctccacctcctgggttcaagcgattctcctgcctcagcctcccaagtagctgggattacaggttcccgccaccatgcccggctaatttttgtatatttagtagagacggggccttaccatattggccaggctagttttgaactcctgatgtcaggtgatccacccacctcggcctcccaaagtgctgggattacaggcgtgagccgccatgcccagcctgtttgctgctttttaattgcctttagctcaaaataatttttttttttttaagagacagagtctcgctctgttgcccaggctggagtgcagtggcgcgatctcggttcactgcaagctctgcctcccgggttcacgccattcttctgcctcagcctcccgagtagctgggactacaggcgcccaccaccacacccggctaattttttttatttttggtagagacagggttccaccatcttagccaggatggtctctatctccagacctcgtgatccgcccacctctgcctcccaaagtgctgggattacaggcatgagccactgcaccccgcctagctcaaaataattcttatttcaaagaggtgtattttggggtgacatattttggttttcttcactgcaatatgacaacctggaggacattatcttaaatgaaataagccaatcacagtgcttactggaataattccatttatgtgaggtatctaaaatagtcaaactcatagaagcaagaagtagagagtggttgtcaaaggctaaggggctggggaaataggaagttgccattcaactggtgtaaagtttcatttatacaaggtgaataacttctagagatctgtacgtcgtgcctattgtacacttaaaaatctgttaagaggccaggcgtggtggtttatcttataatcacagcactttaggaggcggaggtgggggtgaaacaggagagttccctggctccccttgcaggacactcaacaggggtgttgatctctgttcagctgccacaagctcaaaccccttataggagcgggaggatacagacaggcaggtgcaggaaccagagtgagcgcttttgggctctggccccagggcagcttctaggggtggtgctttgactcctgaagccccagtaggcatgctacagtgctcttttaactctgccatccacagatggcttaagtgttaaccagctcagtgtccccttggtacccgggcccttgtccagcacccagaaagaatcaggttacacacagacttgaagagtggtgaatatgggggttttattgagtggtggaggtggctctcagcaggatggatggggagctggaacggggacggagtggaaagatgatcttcccttggagttcagcagtcctgtggcagaactcctctccaactgtccccagctggactcctctagatattcagatgctccttctctgccatgccgttcttcagttctttggctcttctgctcatctcctcatggacccagggattcggggtttatatgggtacaggatgtggggtgtggcgggccaagatgcaacatttgggcacgaaaacaggaatgcctgttcccatttggggcctcgggtttccaggcttgagggtggggcttttggcaggtaaataaatcaaacaaaataaataactttccagtatttccccgtctcctgttcatatcaggaagattgcctgggtctatgagtttgagaccagcttgggcaacatagtgagacctctgtctctacaaaaataaaaatattagctgggagtggtgatgtgtgcctgtagtcccaagtacttaagaggcagaggtgggaggatcacttgagcctgggaggtcgaggctgcaatgaactgtggtcatgccattgcattctaccctgggtgacagagtgggatcctgtctcaaaaaaagaagaaaatctgttaaaagggtagatttcatgttgtgttcttaccaaaataaaataaattttaaaaacaagaggcaataaaattttttaattaaaaagttaaaatttatttttttattttgagacagcatctcactcagttgcccaggccagagtgcagtggtgtgatctcagctcactgcaatagctgggactacagacacacaccaccatcccctgctaattttttgtattttttgtagagacaggcttttgccgtgttggcctggctggtcttgaattcctgacctcaagtgatccacccacctcggcctttcacgtgctgagattacaagcatgagccaccacgcctggcctaaaataaataaataaataaataaaattgaaaattttatttaaaaaattttggctgggcgcagcagctcacacctgtaatcccagcactttgggaggccgagacaggtggattgcatgagctcaagaccagcctagacaacatagcaaaaccccatctctacaaaaaatacaaaaattaggtgggtatggtggcacatgcctgtggtcccagctacttgggaggctgaggcaagaggattgcctgagtccgggaaggtcaaggcagcagtgagctgtgattgtgccactgcaaataccagcctgggcaagtaagacccgttctcaaaaaatatatatatatttttaaataaaaatggcttggcctacagagctttcatggcagatggagagagctggttttcaaaatattctgtttttaaaaagtacacaagtgactgggcatcaccatgctcacgcctgtaataccagcactttgggaggctgaggctggcgggtcacctgaggtcaggagttcaagaccagcctgaccaacatggagaaaccctgtgtccactaaaaataaaaaattagccaggtatggtggcacatgcctgtaatcccagctactcaggaagctgaggcaggagaatcgcttgaacccaggaagcagaggttgcagtaagccgagattgcgccattgcactccagcctgggcaacaagagcgaaactctgtctcaaaaaaaaaataataataataataagaacacaagtaacagatttctaatataaaaataaatcaaacagtacataatgtgatcctctgcctctcttccccacttgtggatggcactctccccatgagtacccctagtgataactgccatctgtactcattaagacatttaaaaatgcataaacgttttaaaatgtagattctatttttattcaggtatgataaggccaacagatcaggggacaattgccatttaaaagatagcttattactcctcgttcccaagaggagaggtcacacctgcacagccacgggagagaacactgaggttggtcacaggcagaggacaggagaactgtggttttcgagggaaggaatgggtgaggcagggtaaggcggctaagcaggtggaggactagctagttggaatagtgtcagctgactcctgactgtagactgcactgagttgtctgatatatgatgtcagggtgattagggtagagagataacggccttgagtatgaaagtccaaaaaaggagggatttggtggtagggctctagattggttagtttgcatctcagggatcagctaatcccaggaggtgtagtctctccctggtcaacaaggccccaaaatgtcaaagcatcaatatggaaactagaaaatatgggtaataccacataaaaaaatatcttaggttattttccaacttttcctaatcacaaattatacagtaataaaaatccttatatagatttttgcatgggtgtataattctgtaagatacttagaagtataatttctagattaaaggatttacatattttaagtatgtaatttaataaattacaattaaaatttaatttaattcccccaaaatgaaacattttaacgatcccagcaatagtatatggagagggtcctttttctcatactctcagtaatacaggattttatcagtcttttagtcaacttggagaaagaatgttagcagtcagccactaacaaaaactaagctaatgtgaaaatgttaatatcagacaaaagagaatcaaatgcaaaaagaattttaaaaggcagagtgatatttaatttttatgtcaccctctaccaagacagttaaatgacaatacggcttcatgtgtaattacacagttgccgatggcaattttacatggtttaaatttaatatctaattatatagcttcaaaacgtgtaatgcaaagactcaaatacaaggagaatttgctaaatctgtacttgtcatagaaatcttcaaaatacctctttcaaagatggtcagatcaggaagaataaacaaagataaagaggatctgaattaatataattaacaaatttaggccgggtgtggaggctcacacctgtaatcccagcactttgggaggctgaggtgggcagatcacttgaggccaggagttggagaccagcctggccaacatggagaaaccctgtctctactaaaaatagaaagattagctggccatggcagcgggggtgcctgtaatcccagctactcgggatgctgaggcatgagaattgcctgaacccaggaggcagaggttacagtgagctgagattgtgccactgcactccagtctgggcgacagagcaagactgtctcaaaataataataataataataataataataatgaacaaacttgacctactagatatagacaaacagaatatcactttctttgagaatttccatggtgcatttagtacctaccagaacacacacacgagcatcttagattaactgaaaaagtaagttgtccaagaatagtgattaaccacagattaggttatatcctaaggaaagtgtccatagaaagggcaggatatttcaagcaggctttgcaaacagaaaagccagccccaacaaagaatgcctcctatgtgtcttctgctgaggactccccttggactccagagcccctaggcccctgtgtcttgtcagcactctgctatttcagggctaaggagctcaggcttctcagatgtggcctgggaaacacagtcttctaatccaggagagtaagaagatttaggactgacgtgggtgctgttagagaaacccatctccttgggtatatgggagataccccgactatgcagtcgcccccttcaaatcttccttgggggcctgatctgactgacgtcagggggtgcctactccttcgaggcaagaagcctgaactttccttcctgtcactgtgaatacttggccagggctgtgaatgtcaccattgcttttcaggaagaagacatggcagactagggctgcaccttctttatgggctctgtaggtctgaaagaaatcagatcagcctgggatccctcagccaactctgaagacaggatggggatcacgcctgcatgttaaagagatttctgccttgttgtgtctcatggtaaataaaaaacccagcaaagaaggtaagaactttctgtctagcctaaagtagaaatgggtgagaacaggagggcgacacttatgtttttacctaggaaataaatacagagttgttttgagacaaaggtcaaagacagctcctctgttatctatcaactcatccagatggggtctttgctayctgtgtgatgagatcttcaagtgctgggtgaccattctgccctggatttcttgggctcacttagtggacagataaacactttttttttccrcctaagagacagagtctcactatgttgcccagactggagtgcagtggctgttcataagtgcaatcatagcacactacagcctcgaactcctgggctcaagcagtcttctcacttcagcctcctgagtagctggaaccacaggcatgctgcactaccacccctagctaatttttgtttttcatgataatgtgaggcattgatgatgctaagtcaaattctagaaggagaaggggtctcacccacgttgggtggatgtactcatcacctggagagatggctcagcttgggaaatcatcagggggagaagacagctggtgattaccaaaggtgctgattcaacaatctcgggctccctcaagctcgttttctgtggctgaccttatgamgttttcacatttttagtttttcccttgagaattattctacttcccctttctgttcatttcctttttttttttttgaggtggagtctcgctctgtcacccaggctggagtgtagtggcgaaatcttggctcactacaacttccacctcccaggttcaagcgattctcctgcctcagcctcccaaatagtgtagctggtattataggcatgtgccaccatgcccagctaatttttgtatttttagtagagataggatttcaccatcttggctaggctggtctcgaactcctgagctcaggggatccaaccgcctcagcctcccaaagtgctgggattacaggcatgagccacggcacccagccatttttcttattgatttctagaatgttctctgcttgtccgtagatgactccatcttcttctcttaagcagccatatgggatacctatttagtcagagccactttctaatttttcttatgtgtaaaaattttagaaaaatatcatttattgatttttaattacaaaagctgtaatagaagtatataagttaaaaatggaaatctctcacccaacctctttctccagaggtaattactgttaatagcttggtgtatagtctttcatttttatatacttactgactttttttatatagatgatatcacactaggcgtgctcttctggaatttgcttttcttcatgtaacaatatatcttggggccgttttcatatgattacatatcgacttgccttgttctttgtcatggtggaatacattccattgtttttaaagcatcatgatgtattttgttgattctttactgataattatttaaggtgctttttatctgaggaggagaagaactttaagagatttttgaggatgtcatttaagaaaattccttatctatgtttttcatgacgatgacaaacatttgcaaagtactcctcatatataacctcacttcacactcctaacaaccctgtaatgacgttaccattatccataaataacagagaaacagatgagaccagggagccccaaggcagggatcacatgtgcctttgctgttataatggtagctaggtaccccttttccccttccacatgacataggaaaacatatcctttttgtccttggtgacaaaaggtcaccaagagttagttacaactacctaatgggagacttcatttctttcatctcttgtggttgttctaaatagtttattggcccatgatagatatcaacttccttactctaggcaatgctatatttctatctccaataaattctttgtaggtcatcttattctgccaccatttttgaatttataaattcatgagaaaaaaagttgcctaagggcaaaagaggatttatttaataaaaatctttgacccagcaataatcagtatccatcctgctgattcatgcagcattgaaatagtatgccttttactgcctccaagaacatatttttggttgttgatattttaaaataaatatgacatcagattcagtccatcaacatatattgaggttttattgtatagaaagcactttaaatatatcatttatgatccttgaagatacatagatgagaaaactgagtctctgagagcttaagtgcccaaaattgagtgagaaggtgaacaaaaattctcacccacatcaaacactcttaaatacacaacttggctatgcaggcaagttaccaatgtatcaaagcaacttgtgagtcattgacaagcagaatcattgctgaagtcccttctagttctaaaactgtgcaaatatttaggagcagttttgtyrgtttggacatgatggcttctcactttaccccaaactcagattctggtatcatgacatctcatagaactaggaaccattttgcacacaaaaagagatcacagtcttttttcctctggttgtttattcaaaataaactagccaacataagcaaggtaagactttaattttgattttcagagaaaaagacaacaactctttgataatccccagtatcacaaccttcaaaaatagcggaggagagtggggtagaaatgaggtagagaaaagagtaaaagaagtgggattcgctcttgatgttaagtcagtacatctcacattacctcctgaagaagaactagagaaagtgtcatctttgttgtataaaaagaaatatggcataatgatccagcaatcccactacactttgggtgtatatccaaaggaagcaaaatcagtattttgaagagacaattgcatactcatgtttattgtaacattattcacaatagccaagacatagaatcaacctgtatgcccatcagtggatgaatggatgaagaaaatgtagtatatatgtacagtggaatactattcagccataaaaaggatgaaatcctgttctgtgtgacaatatgggtgaacctggaggacattatgttaagtgaaataagccaggcacagaaagacaaatactgcgtgatctcactcatatgtgggagctaaaaaagttgagatcatggaagttgagcatagagtaatgattactagagactggggaaaatagaaggaagcaggagatgaggaaagttgattaacaggtacaatgttacagttagatagaaggaataagttctggcactccattgtacagtaccatgactatatctaacaataatgcattgtatatttcaaatagctagaagagagaattttgaatgtcctcataacaaagaaataataaatgtttaaggtgatggatatgccaattactatgctttgatcacacaatgtatacatgtatcagaatatcacattgtatcccataaatatgtataattattatgtgtcagcaaaaaataaataaggcataaagtttattcagttaatatttatggaatccctactacatgtcaggcactgtgctaaatcctggggataaaatgatgaatttgcttacagtctttctctgaaggaactcacagtctaatagtagagagatmcaagattaaagactgtaatatggtattgcagtgatggaaatgtgaacaggatattcaggagctcagaggaggagcaggtcaagctggcttctttaaggaaggtgatacttaaagtgagcctttagcaatgaataaagttagccagcttaagagaagtgggatagaaagaacattccaggtaagagcagaaacacagaggtcatggtagttaaagcacagagtttgaagaaaggaragaagagagacgartgttgggaacaagccccccaaaatctggccrtaaactggccccaaaactggccataaacaaaatctctgcagcactgtgacatgttcatcatggccataacgcccatgctggaaggtggtgggctttccagaatgagggcagggaacatctggcccgcccagggcagaaaaccgcttaaaggcattcttaggccacaaacaatagcatgagtgatctgtgccttaaggacatgctcctgctgcagttaactagcccaacttattcctttaattcggcccatcccttcgtttcccataagggatacttttagttaatcgaatatatacagaaacaatgctaatgactggcttgctgktaataaatacgtgggtaaatctctgttcagggctctcagctctgaaggctgtgagacacctgatttcccacttcgcacctctatatttctgtgtgygtgtctttaattcctctagcaccgctgggttagggtctccctgactgagctggtctcggcagacgaggcttttggggaagatttgttgttgttgttgttgttttaggcagagtcttgctctgtcgcccaggctggagtgcagtggttacacatcttggctcactgcaacctctgcctcccaggttcaagccattctcctgcctcagcctcccaagtagctgggattacaagtgtgcaccaccacacccagctaattcttttgtatttttaggagagatgaggtttcaccatgttggccaggctggtctcaagtgatcagcccaccttggcctcccaaagtgctgggattacagacatgagccactgcacatggcctggaagatgggttctgtttggagtctgagacaccccaatcaaagtgtttagcagggagctgaatatgtggggctgaagtttagggatcatctgggatggagacagagatctaagaggtaggaagtgatagctgaaaatgtgagagttaattaaaccagccagggagcatataccacgtgagatcaacagatatttgagactagaatgcaaataaaaatcaacatataagggacagacagaggaaaatgagctcaagaagcagagacagtaagtagtcaggaagatgggagcaaacataagagtttagtatcacagaagctcaaggtgtagaattgaaataaaggtgtggcctggccaggcgcagtggctcacgcctgtaatcccagcactttgggaggccgaggcaagcggatcacaaggtcaggagatagagaccatcctggctaacacagcgaaaccccgtctctactaaaaatgcaaaaacaaaattaaccgggaggctgagggggtgagaatggcgtgaacccaggaggcggagctcgcagggagccaagattgtgccactgcactactccagcctgggtgacagagaaagactctgtctcaaraaagaaagaaagaaagaaagaaaggtwggcctatggagacagatggccttgctgttctggcaaggtaaggactgaaaagatgaagacattagaggcatcaggaaaggctttgatcaatagtgaggatgaaaaaggtgattttgagaggaagtaaagagaaaactgtagtctacccttgagataaayctggatgagaagacaagagaggttgggtgacagttagaggaatataggaggtcaagggaggaggaggtggcggatgaattgctttgagaatgcaaaataagakatttcagtatgtttctagactgaaaggaaaaggcagtggaaaggttgaaaacgggagacctagggaatgacaaatggagggaactctcaggggaggaacatcttgtgcacttagactggagaggtggagaggatactctcacatgattcatagacaatttggcccacccgatttaatactctgcctgcatctcctattacagattctctcttcattttgtcagcaaacagctcactgtcctctggatctgctgcgtcctgcaggagcattgcgcttaaactatgggaagcggcacctccacccaacatcattttgctttccagaatgcagagagaggtacgtgtttcycactttccaaaccagctgtgggtaccacaaagcccatattgcatggagagggttgggggttctgagggtagaagcagaaaaacccttaaatttctcctcaggccagctcttagaggtcagcttctcctccttgtgacatgcccaccaaaatgtccagttgaagtatatttgacagaattaacattcgctcaggaagttagtgttgtccattggggttgatcccaaactacccaggtacaaatgaatgaaataaggttgggcaaagaggggatgaaacacattccaggcagagggtagagcacgtccaaaggtcatgaggtgggaagaaggaagcatgagctccctctagtggccaatctaacaattttttttttaaaacaataggccaggagttgtgggtcacacctgtaatcccagcactttagaaggctgagatgagagaatctcacctgggcccaggagtttgaaaccagcctggacgacagatcaaggatcctatctctacaaaaaaaaaattttttttttttgagacggagtcttgctctgtcgcccaggctggagtgcagtggcacgatctctactcactgcaaactcctcttcctgggttcaagcgattctcctgcctcagcctcccgagtagctgggatttcaggcgcccgcgaccacgcctggctaatttttgtgttttttgtagacactgggtttcaccatgttgaccaggcttgtcttgaactctcacttcaggtgatccgcctgcctcggcttcccaaagtgctgggattacaggcgtgagccaccgtgcccaacctaaaaaatttttttttgtttttgagaccgagtttccctctgtggcccaggctggattgcaatggcacaatctcggctcactgcaacctccgcctcctgggttcaagcgattctcctgcctcagcctcccaagtagctgggattacaggcgggtgccaccatgcccggctaattttttgaatttttagtagagacggggcttcaccatgttgaccaggctggtctcgaactcctgacctcaggtgatctgcccgcctcggcctcccaaagtgctgggattacagaagtgagccaccatgcccagcaaaaaaaaaaaaaaaaaaattaattagctgggtgtggtggcgagcacctctgtagtcctagacactcaggagcctgaggtgggaggattgcttgagcacaggagttcaagcctacagtgagctatgatcatgccactgccctccagcctgggtgacygagtgaaatcatttctaatatggtagggatatcaactgtgatataaattgcaaatattttttcccagtttgtcacttgtttggaccaattttggaattagcttcagctcagggtttccttatcttgtgaataacacgaattcaacccacacacgccacaggctgagactttctatctcactgagttctaggtcagctcagctcctgctaccacaggggccggtaggcagagatttattagatcacgcaaggtacagaaacttccccagctcctgccttttcacagacagtccagttaccactccctgccatgcacagaacccaggaactcactctcatccccatacaggtgttaaaccccagctcctgagacatgtgtctggttgagattcccctggggcctgcctgacttcagtgcctctaactgcctttggctatgggttccgtcttcatttctggcacccggagatctcccttcaatgcttttgatttcaactattggttaaaaagaaatttagcttattttatgcagcttttcttaatgtgttggagtgtgagggagtcctacatctgcttaagcatgccatttcttattggaagtcgatattaggctctctattttccttaaagggatgtcataattcattaagtttttattgcaccttttggcaagcttatacttccattacagaaaggtacttcttcctagaggcatcatttttttcctttaaatcagtgttgtatatagagacataaatattcttgacaaagataataaaaataagagggtaaccatcaaaaaaattctctgttctatctttcttaaataatttacctattctcccataccctactgtgcattgccttggttcacaattttctcacagtgttgttatatgtagagtttttacagcccaggtgtatttgtaacttgtaccctaataatttagtttacacatggcccaagtaagaggggcctatacatttttgcattgtgctattaaaaatacatgatgggataaaggatattaaaagatcctgcacttcccagagcccatctcaattgaaagcaagccagctccccaccacaccctaccagatagtcaaccgggaggaagaaaaaaagagggagaatgaaaggtgttgcccacttctgctgcctgagtagccaaagcaagactgaggatgtaatacgtatgtctcatcattggcagcactggccatagaatgctcagggcaaggtgttagcagacaacattgatgtccatgatcttcttcagtggtccttaaactttagcacaagtatraattatgtatggagcttgttaaaccttcagattccttcctggattccagcggtagagattctgatgttacaggtccagggtgaggtgtagcaacctgcatgtttaccaggaatctctaaagaatctgtagcaccagccctggacctttcattcactattctcttttgtgtgtgagtgtgtgtgtgtgtgtgtgtgtgtgtgtcagagtctctagcccaggctaaagtgcagtggtacgatctcggctcactgcaacctctgcctcccaggttcaaatgattctcctacctcaggctcccaagtagctgggattacagatgcctgccaccatgcccagctaatttttgtatttttagtagagatgaggtttcaccayattggccaggctggtctygaactcctcacctcaggtgatccaccagcctcagcctcccaaagtgttaggattataggtgtgagccaccacgcccagcctcattcactattctgaacatggttttacagaagtcagtcagtggggttcaacctcatcgcttactatttagtgagtgcctttgagaaatactagtagtatgaatttttttcataggaaatcaaatttatctttgtttaagttcctcccagcttctcttttcccatgtcaccatcatctttcctcttagggaaatcagcaagaattctattatctgtctaatgcaaacgaaacatattaaatcaatctgtctactctttatgaggttgacctgagtcagcctgcaggatttctaatccagcctgcaggatttctaatccagctttatccacaaatagtccattcatcaccagcagtgtatctaagccttggagcttaaaaagaatctagttatgtggacagctgttcccttctctggcaacaatacttgaccacacaggtcctaaaccttatataaagaatgaaactccacaccctaacctgccctacctggtcacctagcacaggtcctggcaaaaatgagaggcccagtggccatgtgggggactgcatggtcagtgctgtctatcttatgacgggggtgcttaaagcctgtagggatatcatggaactggggatggcaagcatgggagctgggacacagttgmtaccccctgacatcgtatgatgcattcatttgagtattcgtttattgtttgyttttcctagtcttcatctggccccgccccttttccagatgaggacattgaggccccagatgacttgtctgaaaccacagagcttgtcagggcagttctaggtctagatcccaggtgtcctgacatccagtctattgtcacaatatcaaaatgtccaccccacccccgcattataacctgtcagggatgctgcatccttgcaatctcatgagtttacatctccttctcggaatcctggcagtccaaccttttcatccctatacagaaatgttttcatcaatacatgggaattctaatcaacctacagtgatatgagtataaccatcaggcaggaatgaaggggaggggcaggaaatggggaaaagcactattgccagcagaaagggaaatacttcctatgggcgtcaatgggtagtgcttctgctccatcttgtcctcacatatacagtgggagagggctgagcagcttcctctccctacccccaaacccctggcccagggagtccgagctcacaggcttgcttctccatcggtgtcatagccttcaaggcagcagccctgatccagagatggtaccggcgctacgtggcccgcctggagatgaggcggcgttgcacctggagcatcttccagtctatagaatatgctgggcagcaagaccaagtcaaggtacaatgagatgtgggacggagccgcctcctgctctcccttgggcagcagggctcgggtgctcctaaagtgaggccaactggactacttgtgggttctcttttcgctcacctctaaagccacgtctccttgggttcttctgcagctccatgacttcttcagctatctcatggatcacttcatccccagcagccacaacgacagtgagtatgaactgccacatgtcatgtcctcctgtcgcaaggccatagattacacggtgaggtgggggatgcacagggagtgaaaccgtgaatctggtgacagccagggaataagcaaggggctgagcagtaaatggcagactggggttttatgccaggttctcctgaacacacacctggagacaagagtttggacgcaaggaattcatttattaagttcaagaaaccctgggggtgggagggagtggggaagggattcaggaaaggaatcgcagccagtccagcaactcagtgtgcctaggaaacagtgcaaaacgcaagcctcagaattataccccctgcaggcaaagggaactggagtttttctgtgtcaactccaggagtcattggttgaaagcggctggggaggtgggagagaagtataggaaggaggctttttcttttcttttcttttcttttttttttttgagacagagtctcgttctgtgacccaggctggagtgcagtggcatgatcttggctcactgcaacctctacctcccgggttcaagtgattgaacctcagayacccaagtagctgggattacaggtgtgcaccaacacacctggctgattttttatatgtttagtagagatgggctttcaccatgttaaccaggctggtcttgaactcctggcctcaagcgatccacctgcctcggcctcccaaagtgctggcattacaagcgtgaaccactgagccaagccaggaggttgttaattccatagcrtttctggcctgccatccggatccaggaaataagtcctcagtctggagatgccaatgctggcagctggaagctgctggaaggcactgccaggtctgatgcacctgttgcgctcactaaatgcaacataaatacctgtgatttttccacactggctttcccctttccttctgcttgcaaatccaggtccctaaatttctgtactctctaagtctgacaaatcttgatcttttagaataaaagtagaaagcatgactttttcctcctgcccatcctagactgttgtcactttctccttcctttttcctcttctgtgctggagctgaagctgaagccagattaaccatgtcctgcttcaatagtccagggaaggactttttttttttttttttgagacagggtctcrctctrtcgttcaggctggagtgcagtagtatcatctctgctcattgaaacctctgcatcccaggcttatgtgatcctcccatctcagcctcttgagtagctggaactacaggtgtgtgacaccatggctggctaaatttttaaattttttttgtagaggcaaggtttccctatgttgcctaggctgttctcaaactcctgggctcaagcaatcctccctccttggccccgcaaatttctgggattagagagccaccgtgcccagccaaggactattctatagtgcccacagactgcatgatcagatgatcataagctgatscaccttttctatctggactaggggacttcctgacccgcatattcactgaggacagatkcgcccaggactccgagatgaagaaatgcagtgactatgaatccatagaggtacccgacagttacacggggccahgcctctccttcccactcctgcctgaccatgcaactgccctggtagaagcattcagactgaaacaagtaagctcacctggggaacctgggtcactaccaactccatgaaatgtgtgaagggagacgaaacccagcacagaaagaatggccccagatttagggtgttcatgtcatgtgtccactagagagattctacccctgctgtgcttagccaggaccttgcagtcaatcagccrgttctgatgattgacagcttttcttcctaatcacataatctctcattgttcattcatcccacacataactactgagcactgctktgtgccccacattgctctgggcactgaggatacagcagtgaacaaaacagataaaatctctgcccttatggggcyggcattccatcggggaggcagacaatgaacaataaataacaataaataagacaattatgcagtatattagaaggcgatgagagctatggaaaagaataaactaagttatggatggaagaaatagcaattttatagagttgtctgggaaggtgatttctgagcaaagatctaaggtggtgaggaatgcgccggagaaagagcgttccaggtagagggaggaacacatggaaaagccctgaagcagaaacttgcctggactgttcacgaacctcgggaggccactgtggctggagaagagggagccaggggaagagtaatggaggtgagggggtggacttttattcttccaaaagagacagggagacagcagacataggaatgacataatctgacttgtttttttgttttgtttttttgagacagagtctcgctctgtcatccaggctggagtacagtggcgcgatctcggctcactgcaacatccgcttcctgggttcaagcgactctcctgcctcagcctcctgagtaactgccactgcaggcacccgccaccacacccggctaatttttttatatttttagtagagatggagtttcaccatgttagccaggatggtctcgatctcctgacctcatgatctgcctacctcggcctcccaaagtgctgggattacaggcgtgagccatcatacccagccctgacttgttttttaaaataatcattctggttgctgtgttaagacagtgtaggcggcaagggccaaagtagggtgaccagtcaagagactactgcaatcgtccaagcgaaagatgacagtggcttggaactctgatggtagggtagaggtagcgagatagtcagcttctggctctatatcagaattcaatccttcccctcttccacatgaatgtaactcattgcaggaggagctgagctgatatattccagtaatgacaggatcactaagtaccatcaacacacctgcacttagtcatactttactgaaacaatcacatggtcttcccatgctaaaggcaaggaagcatttaatagagtagaaaggaaagagaaaagtagctcaatatttgcagggggggcaagtgggaatgatgagaagcagaaacaagggcagaagttgagtgataaagaaagaatccgtgcatagtcccaggagcagtttactggggttacttttggggtcttaggtgatrggggttgttaagcagtaaaggtaaggaccattttccctcacgaatatcagtgttgttttcttccttccctcctcttcctcccagtagcagctccatgctcgctacgtcttgaaccttttgtatgaaaccaagaaacatctggtacagctgccaaacatcaaccgggtctcaacctgttacagyraggagatcacagtgtgtggtaagagctggtcagaaacggctttccatgctgcacacaaagaagaaygctctacctgtgtggggatgcaagaggagtggcgggctgcagggagatgtgatgataagccaaatttaaccccttcaggtccacaatttgcatattcactccacatttacctaaaaaagaggtggtggtgcagcgaaggggatcatggacctcagggcccagcctctgctttattttcccaagcaattcctactgactcaaactcatgttcttcattcaaaacaaaatctctgcaaataaccagrccctccttgttagaagatggtttatttaatggtacttgagaaagccccgatgactagcaaattattcctcccatccacacacattcctctcctggaaagaagtcctgttaatgactgttttccccatcttatgtttccagtgatttttaacatccactgtagacagacatcccacaccttaacctagtggaggctccagtgcaggagggattgtaactggccctgctagggtcacctgcagcctgcagatggtcttgcctgccttgcaatgttcataaagttttttttttttttttttgagacacagtcccgctctgtcgcccaggctggagggcagtggtgcaatctcggctcactgcaagctccgcctcccgggttcacacgattctcctgcctcagcctcccgagtagctgggactacaggcgcccgccaccacgcccggctaattttttgtatttttagtagagatggggtttcaccgtgttaggcgggatggtctttatctcctgacctcgtgatccgcccgtctcagcctcccaaagtgctgggattacaggcgtgagccacccgcccggcccataaacttttaaaaatggtatttcaacattggaaatttggaggattttatattatgatctagattttgctttaaaagtctcctgaaaaatcttttaacactggctyataagtgagtagctgctttctagtttaacgtgggcaaaatctctccagttctcatctaggtttgcaaccttgcactrttctatcgcatctttgcttcaataaaaatgtagctcatttactatttataataatccggcagaaaaaatattatgccttctgctttcaatactatctctgcaataaggagaaattaatatttatccttatcttacatatggaaaactttgtagggttttttctgtcagattcttctgggtattttctttcttataataaaaatcagaagcactggtaaggaacaatcagaaytgatattctttttctatctttgttaggagacttacatggccaattggatgacttaatctttatattttataaggtatgaatgttcaaattaagttgctttcttgctctgaagcttaatttagaagctcaaattcagtatcaattgaacaaatgcttaaatattacttgaagttttaaaatattattatttatttttatttttttgagatgggggtctcaatctgccacctaggctggagtgcagtggtgcgatctaggctcactgcaacctctgcctcccaggttcaagcaatcctcccacctcagcctcccgagtagctgggaccactagtgcatgccaacatgccctaatttctttatttttttcactttttctttttcaaacccttgtgtcgagggctgactttcagtagatcacagcgagggagctgctctgctcagtgcgaaatcctgacccagaagcaggtcatctacgaacagtttaatgtcaggttccccacgaacgtgccgttgcatgacgggtgaggggcggccgcctttccggccgcacccggtttcccaggaggagggactctccgcaccggcctcgggtacctgcgcgcttgctgagccgaactgcgggccggcggggatggcaggagactggctatcccaggccattgggagactggctatccgaggccaactgaggccctgcagcgctgccctgtggttcagcctgggcgggattctgacttagaggcattcagtcaaaatcccacagagggtagctttgtcccattggctccttagccaagcacatacaccgaatgtctgaacctgcgggttggtactgagcaggattaccatggcaacaacagatcatcagtagggtaaaactaacctgtctcataatggcctaatttttttttttyttaagacagagtttcgctcttctcgccgaggctggaatgcaatggcacgatctcggctcactgcaacctccgcgtcccaggttcaagtgattctcctgcctcggcctcccaagtagctgggactacaggcgtgcaccaccacgcccggctaatttttgtatttttagtagagacagggtttcaccatcttggccgggctggtctcgaacccctgacctcatgatccacctgcctcagcctcccaaagtgctgggattaccggtgtgagccactgcgcctggcctacgatggactaattttttatattttttatagagacggggtttggccatgttggccaggctggtcttgaacccctgagctcaagtgatccactcacctcagctcccaaagtgttggtattacaggcgtgagccactgtgcccagcctaagatattatttttaataatatttgctactctgttgcagcaaataaataatagaaaagtcagcattgcattatattctagtacatttttgcaaactatttaaccaacttaaaatgtttggttaataactagaaggggccaggtgcagtggctcatgcctgtaatcccagcatttgggaggctaaagtgggaggatcgttgaggccaggagtttgaggtcagcctgggcaacatagtgaggccctgtctcttaaaacataaataaataaataaatatttagcaattgattttctttctttcacataaagaaaactgattattatcaaaacaaccaaaagctattttcatatatattttagttataatgtgtagaacatatagcaagggagatgagtataatattttttaatggaatattactttctacacatactacatttcccaaagcattttcccatgcattatcttgtttaatcctgagaaatctatggcaagtattattatttctagttaaagatagtgtggccaggacttaaaactggcctttggatcacaagtttggtgccctttgctccacaccacatggcaacactcaggctttgtctaaaggagcatctcctaaccttagcctctctggaaaggaaatataagaccaatagaagatacttccatcatttactgacatttcaggcttggaggagacctagaaagcacagaattggtgttagacatgatgtgattgtcaaatgcctattgrttttaacctgatttcytatttccttcctcccattcattctttcactggtctccttgttgaaaagaatggcctcccrtcgccagaacggtcatatgtgttcaacggtgactttgtggatcgaggcaaggattcagtagagatcctgatgattctttttgccttcatgctggtttaccccaaagagttccatcttaacagaggaaaccatgaggaccatatggtgaacttacggtacaagtcaaaacatgcttgagtatttgatgtttgtttgttgtaattgtaaaacgttatttctccagaacttcttatttgttaaatgcctttaaaactagttttccaatttttttaaaaagcagaatacacagtatataacattcaaaaaaaaatttttttttttttttggagagagtctcactcggtcgcctaggctagagtgcaggtgcaatcttggctcactgcaacctctgcttcctgggtttaagtgattctcctgcctcagcttcccgagtagccgggattacaggcacgcaccaccatgcccagctaatttttgtattattagagacagggcttcaccatgttggccaggctggtctcaaactcctgacctcaagtgatctgcacccccttggcctcccaaagtgctgggatttacagacgtgagccaccgcacacagccagattttcttttttttgagatggagtttcactsttgttgcccaggctgtgcaatggcacaatcttggcacactgcaacctccacctcccagtttcaagcgattctcctgcctctgcctcccaagtagctgggattacaggcacctgccaccacgcccggctaatttttttttgtatttttagtagagacgggtttcaccatgttggccaggctggtctcgaacttctgacctcaggtgatacacccgtcccggcctcccgaagtgctgggataacaygcatgagccaccgtgtccagcctagattttttttttttttttttttttttttgtgacggagtctcgcttggtcacccaggctggagtgcagtggtgcgatcttggctcactgcaagctctgcctcctgggttcacaccattctcctgcctcagcatcctcagtagctgggactacaggagcctgccaccacactcggctaattttttgtatttgtagtagagacggggtttcaccgtgttagtcagggtggtctcgatctcctgacctggcgatctgcccatctcagcctcccaaagtgctgggactacaggcgtgagccaccatgcccagcccagactttttttttaatttacacattattttactattccaatgaaaccattgaatttgtttttgcatacacatactctatcatataaataatagagattcatgatagtaaagcaggaaatacagataagtaaaaggaagaaaattaaaatatcccataatttctctacccagggataatgatataattgtaaacattttggtgattattcctcagtctcttttctatgtatttaagtacatrtacccagaatatgcattcttctaaaaatgtgattatgccctgattattgtcacccagtttactctaatatctatttgtgcttctaaatctagatatggcttcaccaaggaagtgatgaataaatacaaggtgcgctgcctttaaagacaaaagtttctctcagttcagataagttgagtgaattatttgataacattttgtttatatcattttttccaggtacacgggaaggaaatactaagaaccctgcaagatgttttctgttggcttccactggccactctgatagatgagaaagttctaattcttcatggtggggtgtcagacataactgatctggagcttttggacaaaatagagaggagcaaggtagtggttaaygaaataatacaaatttcaccataatgcccagtttcattgccaatataaatgtcatcttacatgctgactgcagtcaactgattatggctgttaagagtgtggaggccattaagagtatggaggctgggcacagtgtctcacacctataaactcagcactttagaagacaggaagattgcttgagaccaggagtttgagaccagtctgggcaacatagcaaaactttgtctctataaaaaaattaaaaacttagctgggagtggtggcatgggcctgtagtcttatctacttgggaggctgcagtgagctctgattgccattgcactccatcttgcagggacacagtgagaacctgtttctaaaaaaaaaaaaaaaagattgagaatctgcagttgggatagggggcaagtgtgctgtagtcacttagtcatgtctaccatgtacatgccagtggggagtagcaaccagtgccgtgttatctgccattggatctagataattctaaatactacctctcaattattgccacctaaagagcctacgtttcccaaataattcatattaccttcaattaaagtcaagaaatatgtatttagtgcctactactacattcagagagcgtgctagttggcagaaaaaaaagatgaagatcaatttcagttaaactcaacaaatgtgctttgrgtgcttactatgtgcaaagaaagtgttacagagataaaaagatgaaacagagatggtgcytgccctaaaggaacacaaaataaccagaatgtgttggggttggaggtggaagagtatgagacagaatgtatgatttaccaataacaatagatttctattttccatttcattttggaaatggaaagctaggaagcaaaggttctattttcttacacctaactcttaaacttgactcatcccacacaggaaatgctgctacaacatccatgacaacattttcctgggaagttccaaagacagggaacaatcagtctacttcagctttgggcaattctaatggatatggatatgaaagtctatgtatatgagacatacatgaaatgaaagaatacggctttagagtgagacagacctgggtttgaaccctggaataggcaattgttggctgaaatggcagtttggttctatgaagttgtccagagacccaggtttcttgttactctgccacccctaatgtgtggtttctagacttagctaccatttagcaagtaaggatatgactccttgtggtttggtaactagaaattgctgtgtccctgtacayccaaactcagtgttttcacttacacatctgttatatctttttttgtttgtttgtttttgagacaaggtctcactctgtcatccagactggagtgtggtaccacgatcacggctcactgcagccttgacctcctgggctgaggcaatcctccagcctcagcctcccgagtagctgggactacagtcacacacaatcatgcttggctaatttttaaaaaattatttgtagagggccgggtgtgatggctcacacctgtaatcccagcactctgagagtcggaggccagcggatcatgaggtaaggagttcgagaccagcctgaccaacatggtgaaaccctttctctactaaaaatacaaaaattagccaggtgtggtggtgcacacctgtaatcccagctactcaggaggctgaggcaggagaatcgcttgaacccgggaggcagaggttttggtgagctgagatcgtgccactgcactccagcctgagccacacagcgagactccatgtcaaaaaaaaaaaaaaaattatgctggatgcggtggctcatgcctgtaatcccagcactttgggaggctgagatgggtggatcacgaggtcaggagatcaagaccatcctggccaacatggtgaaacccygtctctactaaaaatacaaaaaaattagccgggcatggcagcatgcgcctgtagtcccagctactcaggaggctgaggtaggaraatcacttgaacccaggagacagagactgcagtgagccaagattgtgccactgcactccagcctggcgacagagtgagactctgtctccaaaaaaaaaaaaaaaaagtatttatagggatggggtctcactatgttgcccaggctggtcttgaattcctgggctcaagtaattctcccactttggcctcccaaagtgttgggattgtaggcataagtgaccacacctagccatcagttgtatcttgattttctcacaaactttcaactcaaacattctgtccagcwgcatgtatgtctggaggcagagacagcaarccacagtagagcaaattatctcatgggaagaatcatatttaattatgtaaacatagaagaaggaactctgggaaagaatgctaacgaaaagtttattttctgtggcttagcaaaaaactaacttcccaatgtttggtttgcaaagctctggagagagggtgatgcagcaaatgatacagtccaaggactacttgagagagaagtacagagaggtatgggctccagagtcagactatctggattcagtcctggaagagtcttagtattttgtgcctcagttttcttatctgtactataaaagatgctatcttataggagtggtatggtggttaatcaactaatttatagaaaatgcccagaacagcgcctatttggaaaaggctcaatacatattaacactattaatctcctcaagttagggatgctgcttggagcagataacaacatcctyaaaataaaattacctgggccaggcacagtggctcacgcctgtaatcccagcattttgggaggccgaggcgggcggatcacgaggtcaagagatggagacaatcctggccaacatggtgaaacccccgtctctactaaaagtacaaaaattagctggacgtggtgacgcgcgcctatactcccagctacttgggaggctgaggcaggagaattgcttgaatctgggaggcagaggttgagcaagccgagatcgcaccactgcactccagcctaagtgagagtgagacccctatctcaaaaaaaaaaataaaagtaaataataacattttaaaaattcaagtaatatttaagcatttgttcaattgatactgaatttgagcttctaaattaagcctcagagcaagaaagcaacttaatttgaacattcataccttataaaatataaatattaagtcatccaattggccatgtaagtctcctaacaaagatagaaaaagaatatcagttctgattgttccttaccagtgcttctaatttttattataagaaagaaaatacccagaagaatccgacaaaaaaactctacarttactaagttttccatatgtaagataaggataaatgttaatttctccttattgcagagatagtattgaaagcagaaggcacaatattttttctgcctgattattataaatagtaaatgagctacatttttgttgaagcaaagatgggacagaacaatgccgggttgcaaacctmgatgagaactggacagattttgcccatgttaaagtaggaagcagctactcacttatragccagtattagaagatttttcaggagacttttaaagcaaaatctagaccttaayataaaatcctccaaatttcaaatgtcaaaataccattttaaaaattttatgaacattgcaaggcaagcaagacctatctgcaggctgcaggtgaccctagcagtgccagttacaatccctcgtgtactggagcctccctccactaggttaaggtgtgggacatcagtctacagtggatgttaaaaatcactggaaacataagatggggaaaacagtcattaataggacttcttaccaggagaggaatgtgtgtgaatgggaggaatcatttgctagtcatcagggctttctccagtaccattaaataaaccatcttctaacaaggagggtctgcttatttgcagagattttcttttgaattaagaacacgagtttgagtcgatatgaattgcttgggaatataaagcagaggttttggtgagctgagatcgcaccactgcactccagcctggtgacagagcgagactccatctaaaaaaatataataataaaatacctgagaatcggaagaggtgggactggtggactggccctcactgtgtgccaacaaggagcaagaaggttgttatgagttggtttacattttgtggctttgcactctctatgcccaagattggaactgcctagaaagtgattaacgcttgtccaatgtcagataataagctctgttctattctcttcactctggactgtccttcaaacatcagtcagctctgctgcccctctctgggtgtccttctttgttcttgccctaagccagtccaagctgggacgtggctttcttgtatcacagtccttagatctatttgcagaaagttctcgttctttgattatgtgctcacacagagttccttttgtgaacaagccctttattgtggatataccatggaagtcttccccctcggggttcaccatagcactgaggcacagcaggaatggctgctctctctttttgctcgctgctacaatctgctctgtggcctgacccctgatcagaattcgtgccacttatgtcctcagcccagtcccagtgccatgatgaccgcaagtgagagggwctctattcaattccctgtggcaaggagtgtctttctgattaggtccaggctgaaaagaggagctccctcccctcccctgtccttccccaacaggtaagataatgggtacaagagcacttcctctaaagtaccattaagtgctgcctcctctgcagcaagagtcaagtttttcctcttcctatttctcacctatatactttgattctttttctttgttttagcatctgtggaatgacaggaaagtcaatgaggactggcctgagacagrgttgccctttcctatccttgtctaaaaaartcactggtctcccagacagaaacgatgaactaggttagtgtttctcgaaattatatgtgaaggaccaggttttataaacttccaatttgttgcagatcaatactttcgtaaaatacaataaatatgaattattagaaaaatgatgaaataatatgtaaaacaaccccctgtgacatgtgtgtacctatgtaaaaaaccttcgcatatacccccaaacctaaaataaaagttaaaaaaaaaaaagaaaaaggaaatacaaacaaaagatacaagcccactgatcatgtgcttgactgtcatgacaatgtcatattgctgtcaatgtttctcagacttactctcaagggctgtacttaccttgtcccaggccaggaacagtgaaccgaccagcacttgtctgtgggcaccagtgtttaggactgacctgggtgtcaaagtggtactctcaaaggacctacagttccttccttccttccttcccttctttccttcctttctctctctttctttctttttcttcctcttcttctttctttctctttctttctctctctcttttttattgtttattttttttttgagatggagtttcactcttgttgcccaggctggagtgcaatggtgcaatcttggctcaccgcaacctccgcctcccgggttcaagcaattcccctgcctcagcctcccaagtagctgggattacaggcatgcaccaccacgtccagctaattttgtatttttaggagagatggggtttctccatgttggtcaggctggtctcgaactcccaattcaggcaggtgatcagcctgcctcgggctcccaatgtgctgggattacaggcgtgagccaccgcacctggcttctctgtttcttttctttctttctttctttctttctttctttctttctttctttctttctttctttctttctttctttctttctttctttctttctttctttctttcttttttcagggtctccctctgttgctcaggctggagtgcagtggttcaatctcagtttactgcagccttgaccttctgggctcaagtgatcctcccacctcagcctccctagtagctgggactacaggcatgtgccaccatgaccagctcatttttttgtattttttgtagagacacggtcttgccatgttgctcaagctggtcttgaactcycgggcttgagtgttctgctgggctcagtctcccaaagttctaggattacaggagtgggccaccacacctgtctgggcctacagtttcattccagcatctgtatctctttctggacgtgtttagatagtttccaccatgaggtgcaaaacgagacagaagagtgagaagcagatggaggagaagagaagagccaaccagaagagctctgcacagggacccatcccatggtttctccccgaaagccgctctcttccctcttcgccccttcggcttggctcctacaaggcccagaaaaccagcaggtcctccagcatcccctgcagcggttccctggacgggcgggagctctcccggcaggtgcggagctccstggaactggagctagagcggtgccggcagcaagcaggcctcctggtgaccggaragaaagaggagccctcccgctcagcctcagaagcagactctgaagccggagagctgcggaagcccactcaggaggagtggaggcaggtgagcgtggccaggcgctgcttcctagcatgtggctgccaacaggtcamaactctcccttccagggaaactcaggatatgttttgaggcccctctttctctctctttctggggtaacaacaccccagaaggacactagtatttgcctaatgactcatatgttttagagttttataaaagatggggatgtgtggctgttaggctctattgcctgatgatacttgggttagtgattgagcactagtagggtaagaagataagctaygatttgttggatgctattgtgtgctattttttttaatgtgtcagtaatatagctgccatagttcaaggccaaaagggctaggcagcagcttctttcctctgttaccaggcaagagctgtccccagatctctagaactgggtcacatggccacccctagctgcaggggagacttggagagtaagtagtatgcagcgaggcaccctgccaccccaaacccgcagttctgtcagtacggaagaaggaagaggagaatggacattgagtaggcgctaacattacttgccaaaatagatggcttaggcagccgacttcaccgatgatgactatggcagagagagccctgaaaaggctgttgtagccatccaggtgggagatgattattgtgagcttgttttgtttttgtttttktttttctttgagacaatgtcactccagttgcccaggctggagtacagtggcatgatcatgactcactgcagcctgtacttcccaggctcagatgatcctcctacctcagcctccccagtagctgggactaccggtgtgcaccaccatgcctggctaatttttgtattttttgaagagatagcatttcaccatgttgcccaggctggtcttgaacccctgaggctcaagcaatcacccaccttggcctcccaaagtgctgggattacagacgtgagccactgcacccagcctgagctgctgtgcctggcctgtagtagtgttaacagaattataggaacttgctggtattcaaccatttctgacccattagaatggcaatctcatacagttcacccaataaagaaatgaattcagccgggcgcagtggctcatgcctataatcccagcactttgggaggctgagacaggcggatcacgaggtcaggagatagagaccatccttggctaacacggtgaaaccccgtctctactaaaaatacaaaaaaaaattagccaggcatggtggtgggtgcctgtagtcccagctattcgggaggctgaggcaggagaatgtcacgcacccaggaggcagagcttgcagtgagccgagatcgtgccactgcacttcatcctgggcgacagagcgagactccgtctcaaaaaaaaaaaaaaaaagaaagaaagaaattcagaattatttaagagctaaaattagcagaacttgctgattgattggatggagggtagtgagaaagagaagttgcagctgactctgagtctagaagcctcggagaaagagatggtgagtttagttaatgttctgtcagttattgatctgggcttcaacaccaatttagaattgaaattataaagtataggtctttccttttgcaaactgactcagtgttaatgtcttgatctttacaaatcgaatgaagtttttcttttacaaaagtacttttagaaagcattaaatgttggctaagtgtggtggctcacgcctgtaatcccagcactttgggaggctgaggtgggaggatcatctgaggttaggaattcgagaacagactctggttaacatggtgaaatcctgtctctactaaaaaatacaaaaattagctgggcatggtggcacacgcctgtaatctcagctactcgagagactgaggcaggagaatcgcttgaacctgggaggcagaggttgcagtgagccgagattgcaccactgcactccagcctgggcaactgagtgagactctgtctcaaaaaaaaaaaacaaaagaaaagaaagtattaaatgacaataaccaaaattattcagttatttcatctgagtattgtatgactggcagttattgttttcctgagtattaataatagagtagaaactgaagtgctagaaaaattgctcaactcttctgcaattatttatttatttatttattwgtttgtttgtttgtttgtttgaggtggagtctcgctctgtcacccaggctggagtgcagtggcacgatctcggctcactgcaacttccctcttccgggttacagtgattctcctgcctcagcctcctgaatagttgggattacaggtgtgtgcctccatgcctggctcatttttttgtatttttagtaaagacgggatttcacatgttgaccaggctggtcttgaactcctgacctcaaatggtccacctacctcagcctcccaaactactgggattacaggtgttagccaccatgcctggcctcttctgcaatttgtaaaaaaaaaaaaaaattcttaaactactttaagaaataaaatgtcgattgcattttcccaggaccacgtctggggtcttgtgaatatgcaagagactctcttgccagtcccaggacttgcgccttctctttagggcaaatgtccagtagcctggagcattggcactgactgacaactactggccatgatcaaagcttctagcaggacaacttcatctgttttacatattgagctttcatatcagatttattttcaagaaagtgggtatatgcttgtcgacaaatatgtaggcacgcacacattcattttgtgagtaataagaaattctggaaccttagaggtccaaaatataaatgtatgtcaaatattgcttgcatggacatttattcacttatttttattcaaatattttcctcctcctcttcctttcatttgaatgactgtggatgaatatgtatctagtttttgggaaggaaatcatctcttggtcttctcaggttgtagatatcctgtggagtgatcccatggctcaagagggctgcaaggccaacactattcgaggaggaggctgttattttgggcctgatgtgacacaacagttgctacaaaaatacaacctgcaattcctgatccgttcacatgaatgcaaacctgaaggctatgaattctgtcacaaccgcaaggtgggtgctccctctgcagcagtacaggcttgtgtgtcaccaaagtagtccgaagggctcaggcctggatgagcaaaggctctcagtttctaacaacctacagaccttgtatttgttacctacttgctcaaagcaactaggtcctttacagtcatttatccttgactcttatgtcctctttaaaacccaaagtttgattaaggccactgtccaccaatgccctgactgacatggtcccattttatgaatggaaatatgaggccagtgttttctcagccacacctctattcttcaggtcgctccccaggcagggattcaggctcatttgtcttctcaggagcacaattaacatcctgactaatctttggacatctccaaatcctacaatatttgtctcacctaataccactggttatattgtacaagtttctttattgcaggacttctgagtacctttagtttcctaccactgtaaatcctcaggaagagatacagtatctagcatttcccaacgtattgactgtgaaaacttttttcatacaccatctgaggagccacaacattccgtagaaaactgctttaaggcaccacatcagctctcagaactcatcttcttgctcattgtaatggccatcctggtttatcagacccagcttgcctctaagttgaagcaaatatggtgttttctatgacccttgctattttcacttgggataaaaatgtgaagaagatacattgtgaaactatcggaattcaaatttctatgacttgagtcacaactcttgccctattagcattgatgcctttagaaaaaaagaaagaaagaaagaaagaaaaggattcccagatgagcactaggagaaacagcagcttctgcagttgagttgggccacataggattgagggtgaaggtttcttcagtgaatgtgaacacctgtctctcttctgttttgatgtaggtattaacaatcttttctgcctccaactactatgaagttggcagcaacagaggggcctatgtcaaactggggccagccctgaccccacatatygtgcagtatcaagctaacaaggtgacccacacactcaccatgaggcaaaggcaagacttttcaatgagtrattttcagaaaaaaaaattatagtgttcatagaatctttgaatgaagtgtcaaacgttatatttattcaaattctacgtgagaattcagaatttggctatgtcagcatgaagttctattaatacaatagacattagagtaggagtctcttccttctcctccacacactcctaatagctctatctacccatcattaatgggagcaacaaatttgttttctgcagaaattattctcagtggggcacagtggctcatgcctataatcccagcagtctggcagactaaggcagaaggatagtttgagcccaggaattccagaccagcctgggcaacatggcaaaaccccatctctacaaaaaattcaaaaattagcctgatgtggtggcgtactcttgtagtcccagctacttgggaggctgaggtgggaggatggcttgagcttgggaggtagagtttgcagtgagccaagattgtgccactgccctccatcctgggtgacagagcaaggctgtctcaaaaaaacaagaaaaacaaaaagaagaggaagaaattattctccatggctgcgtcttgggtaaagtctgcttactaaaccactaagtctttctgaggttactcttctattttctctcatctttaacgggtttgtgttacccctacaagccacagccagaggttctttcactgtctggagattttgcaggtgaaattcagtgcacagatttgttaatgaggcccgtttctttctggaaggaagcatgtaatactattcgaatggtagattttggccgggcgcggtggctcacgcctgtaatcccagcactttgggaggccgaggcgggtggatcattggaggtcaggagtttgagactggcctggccaacatggtgaaaccctgtctctactaaaaatgcaaaaaaattagccaggcgtggtggtacacgcctgtaatcccagctacacgggaagctgaggcaggagaattgctggaacccaggaggtggaggttgcagtgacccgagatcgcaccactgcactccagcctgggcgacagagcaagcctccatctcaaaaataaaataaaataaagtaaaataaaaataaataaataaataaataaataaawaaataaataaatggtrgcttttgagatgattctgagttcttagttgagagattacaaccacaaaatgttataaagaatttatatgggtagcctcacagtaaatttatgcaacagatattgttattaatttcagttttgtagaagagattattaaagaaccgatgttaaatcatctgacctgtggtcacacagctagtccttgagtgaaggtagtccttgaccgaggcaattctatttcagaacccacwcttttaatgtctatgcaatattgcctcctacaacgaagatggcctcagagtatataagatgctaacagatacagttttagtgctattgaacatgcttctttaagtattcagcctaacagagttagaaattaagatcggcaaarctagcataaatcaggtggatagagaacatgttagtatttagcatttacccttgtgtgagtgctgtaaaagtgcattattttaaatcattctcaagttattaaatataggccagcctcacttaaaaagaagaattatgtaaaaatataaacctaccaagtgaatgtcagacctactgtgcagcaaaatcatcttggagctttataaaaaatcagccatttgagcctcatccagccctaccaaattagaatctccaggggtgagccctggtacctggagtgcagaactatgatcccataggatttaggggttgtcactgcaaaaagagtcactctaggattccctacagtagtaatagtaatgtagtaatgtaatagtaatgtaggattccctacagtgaatagtgtgtttcaataagatagtcaaaaagcattcaactctttgaaaccttcattgattgcattaaataagtacaacatcacctgatttacccagaaatcacttatccagtgacttcaactgtatgaagcataatggagaacttagaaaaaaggagggaaatgtctctgagcagccataattgatgatgtctcaatgtccataaaccgaagataacatccttgtttttcttttctcttttttttttctttttgtgagacaggatctcgctgtgtcacccaggctgtagtacagtggcaggatgacagatcactgcagcctcgacctgctagtcttaagagatcctcccacttcagctacctcacacctggtactacaggcgtgcgccaccatgcccagctaattttttaaattttttgtagagacgtagtctcactattctgcccaggctggtctcaaactcctgagctcaagcgatcctcctgccttggcctcccaaagagctaggattacaggtgcgagccaccatgcctggcctgataacatgctcttcttagaggaatcctcagtcagagtccatttactttttgtttcaatccacttctcacaataatagagagccagcttggagccagcatagccagataggtatctggcctcactccttggtagctatgtgaccttgacctaattactatctctgtctgtaatgggcataatggacttcatgttatcgttctttcttcaatgagtgttgagggatttaatgagataatccatgtagagctctgcatttagtaagtgcttactaagtgttacttgacgtagggacaggaaagccttgtacatccagatagctttcaagggcattgccctactccatccctgcataactctccatgactacagattaccaggagcagcttaaatgctttgtctaactagtggttcttaaactttttaggagtcccatacttctgttagcctctgataaaacaacaaactgtctacaaaaaattcacatatgctcacatacctgtgaaatttggggtgagttttaggtggttcacactttcttttccttttgtagagacagggccttgctctgtcaccaaggccagggtatagtagcatgatcatagatagcttactgtaacctcgaactcctgggctcaagcaatcctcctgccatagtctcccaagtaactgagattacaggcatgcaccaccatgcctggctaatttttaaargttttttttgtaaagaaacccagcctagctgtgttgcccagggtggtcttgagctcctggcctcaagtgatcctcccgcttcagcctcccaaagtgctgggattacaggcatgagccaccatgcctaactggttcacagttttttgtgttttttgagacagggtctcattctggttgtccaggctggagtgcagtggcgtgatcttggctcactgcagcctcgacctcccaggctcaggtgatttccccaccttagcttcccaagtagctgggaccataggcacgtgccaccatgccaggctaggttcacactcttctaaggatctatgtagcccacttaaagactgtcatgttaaatgccttcaattgcagtaagattttcatcaaacatgatttagttttttttaacttttaacacgggaaaagataggttatctggtcattatttatagaatgattggttcctcaataagacattacaagtaacatatgcttaccttttatctctgtttatattctttttttttttttttttttttttgagacagggtcttactttttcacccaggctggagtgcagtggtgtgatcttggctcactgcagcctctacctcctaggttcaagtgatcctcccacctcagccccacaagcatctgggactacagggacacgccaccacgcctggctaattttttttttttgtactttgagtagagaggggggttttgccatgttgccaaggctggtctcgaactcctgggctcaaggaatccacccaccttggcctcccagagtcctgggattacaggcatgagccaccacgccaagcctctttttatattcttgttcattcaactacagatatttattgascacttactttgggccaagtactgtgcccagcattactctattgacccaataagaatgraaaaactaaactagtgttattttgttattcataaattttgccttctgtttcacatgataataaattacaagaaatgcacaacagttgtgataatagatactatttggtgagtgctttctatgtgccaggctttcttctaagtgctgtacatgaaattactcattgtaatcttcacaataatcctgtgaagtggagacaggtaccattttaatcactgttttayaggtgggaaaactgaagcaaaggatgattagataactttaccacagaggtgatccttctccagaacttcttctctaaccactgtcccataccaggaaggacagcggcattccccatactcatcctgtttgtgtacaacagggaagagtaaaggcgctctccctcraaaactgagctcttgggagactgatatgttaagaamgagagagtggaaatatagtaaaatctctaagtattttttctataccagtgtgttaaaatgtcgcttttcatctcctgtcccaggattagcaragtggaggagtcggctctgagagctctgagggagaagctgtttgctcattcttcagatcttctcwgtgaatttaagaagcatgatgcagataaagtcggtaagaatgatcaagttaaagattcacagaggaaggaagctagccagaaaatctctgtcttacactagttagcaaataaatatttgttgctttaatgagtgacccaaagttccctttggctatatcctccattttattcaacttaatgtctcatttattctaactaaattttaaaattgtaagcttttaacaaaataygaacttagccaaatagagagggtgaaaagaaatagagtcagggaaggataacatggccagaaccaagcaaagaacaagtgggagaagttataagagtataagactggcaaaagatgaatgacttgagttgttgaagctgagtctgtgtttacctaggtatttcatgatttattatccaagctaaaaatgttgtctgctcaactaatggaatttctaatggacattgacaaaatatattcctatttaaaaacagcagtaacatttatgaattcatagtaatatcttttcacgtacacatactgtagccttccaagagtttcagtggatatattctaaggaatttaggtggtttaattttttttaaataaccaatgctgtagatatataatattttatgatatcatttacaagacttttatgtggcttgcagaagtattgccagatttagtaaacaaaaatgtaaaatgcctcaataagtttgaattacagacaaacagacaacaaataatttttatgcaatatttggcacttttatatactttactgtctgtcttcaattaaaatttaactggacatcttgtattttatctggcaggcctagcttccagccaactctgctactatcaacaaaaatagtgacagtgcccattatttctattacctgcagatagtaagaaggatgtcaggataaaaatatacacaccattgggcaggaaactagacttctaggtgacaaggcaacaggttagctctcacctgtaggtttaatcaccttgagtgactgggcagcagcggtggagtctgtgttgcacctaggactgccatggcggatgctgaggccacagctggtgaacagctcagcagacaacatgctggagtacaagtcttggctgaagaacttggccaaggaacaactgagtcgcgaggtaacggtgtggtaatggtggatgagagcacatgtggactatgatactccttagagagaatttgattcagaaacaaccaactagtaataacccaaaaagctggatgggtgagaaaggggaataactatttcttgagtttctatgtgtcaggcttttgtgttaagtggttttcatacattgcctcagttaatcctcaaaaccactccaagaagtacatattatcagcaccattacacgtatgaggacactgcccacagaggttagcaacttgcctgaggtcatagaacgactaagttgggactcaagccaaggtctgtcttacctcaaggcccattttctttcttcaacaccatggtgcttaccctacttaaaaagtatttattcaataactgcttataaaatatgtaacgtatgtgcaaccttgggctaggtacttcttttaacagtgttactgcaatataatttacataccatgcaattcatccatttaaagtgtataattcagctgggtgcggtggctcactcctgtaatcctagcactttgggaggctgaggagggtggatcacttgaggccaggagttcgagaccagcctggccaacacgatgaaaccccgtctcttctaaaaatacaaaaattagctgggtgtggtggcatatgcctgtagacccagctattgggaggcgaggtgggagaattgcttgaacccaggaggcagaggttgcagtgagccaagaccatgccactgcactccagcctgggcaacacagcaagactctgtttaaaaaaacaaatctgaaaggctccaaagtccaaaactttttgagtgccaacacgatgccacaagtgaaaaattccacatctgacacctttgctttctgatggttcaatgtatgcaaagtttgtttcatgcacaaaattattaaaaatattttataaaattaccttcaggcaaccaggcgcggtggctcatgcttgtaatcccagcactttgggagaccgaggcgggcagatcacctgaggtcggaagttcgagactagcctgaccaaaatggagaaaccccgtctctactaaaaatacaaaaattagccgggcatggtggtgcatgtctgtaatcccagctacttgggaggccaagacaggagaatcgcttgaacccgggaggcggaggttgcagtgagctgagattgggccattgcactccagcctggacaacaagagtgaaactccatctgaaaacaaacaaacaaaaattacattcaggctagatgtataaggtgtatatgaaacaaaaattaattttatgtttaaacttgggtcctatacccaagatatctcattatgtacatgtaaatattacaatgtccgaaaaaatccaaaattcacaacatttctggtcccaagcatttcagacaaggcatacacaacctgtatgtgcaaccatcaccagtcaattttagaagattttcatcatgggtgaggtgcttcttaaaccactagattatttgatgggctgaactgggtagagggaatggagggatggcaaaatattttcaggttttttcaagaatgtgtgattgtcagggttgattgtgtgttaattatrtattggaacaagyctaaacrtatgacaaagaaggaaaatgaattttttcttgcagaacatacaatcaagtttgctggaaacattgtatcgaaacygatccaacctagagaccatttttaggatcatagacagtgatcattcaggtaaaggcactcattattctatcacttttgaakcactgcaagtattttaccttaaacccttaatctccttcctgattcatcctcattcatctccactcaggcatttggagagcaaggtaagaagattagtgcttataaatgacagaaactaggaaagtacttgagtagtatcagcagcccatagagaaagaagtggggcagagaagaatgaagacaaactgaatgagagcttcttataggaagaataattattagaagatgtgatatcctctggacatggtggctcctgccttaatcccagcactttgggaggctgaggcaggtgaatcacctgaagtcaggagttcgagaccagtctggccaacatgaagaaacccagtctctactaaaaacacaaaaattaggcgggcatggtggcacatgtccgtaatcccaggtacttgggaggctgaggcaggagaattgcttgtacccgggaggcggaggttgcagtgagccgaggtcgtgccactggactccagcctcggcgacagagtgagactctgtcgcggaaaaaaaaaaaaagaagaaagaaagaaagatgtgatatcctttatattaccatcgaagatagccacaaagtaatgaaaagtgcttagaatagaaaggtgtttgcaacctcactctcaaaatgttttttttaactttaaattttgaaataattatagattcacaggaagttataaaaaaaaatatggtgaggtcctgtacatcctcatcctgttcccgcaatggtccaaaggcttttttcaatgttattattggtttcttttaaggcataattcacaaaccatataattcacctgtatgaagtatgcaacttagtggttctcagtatagtcacaagattgtgtaaccatcaccactatctaattttataactttttttttttttttttgagacggagtctccctctgtcacccaagctggagtgcagtggcacaatctcggatcactgcaacctccacctcccgggttcaagtgattctcctgcctcagcctcctgagtagctaggactacaggcgtgtgccaccacacctggctattttttttttttttgtatttttagtagagacaggatttcaccatgttagccaggatggtctcgatctcctgacctcgtgattcacccacctagatctcccaaagtgctgggattacaggcgtgaaccactgcacctggcytagaacattttaatcaccccagaaagaaatctcatacctattagcaattactcctcattccctatccctcctccacgagtccctggcaaccactaatctactttctgtctctatggatttgcctgttctggacatttgatataaatggagtcaaaatatggcctttggtgtctggattatgtcacctagcctgtgttcaagattcatccatgttgcagcagtatcagtttttcattccttttttatgactgaataatattccactgtgtggacagaacttttatttatccagtcattagttgattgactttggattgtttctacttttggctattatgaacaatgctgctatgaacattcatgtgtgactttttgtgtcaatatgtgttttcagttttcttgggtttatatctaggagtgtaattgcctggtcatatggtgattctatgtttaactttttgaggaattaccaaatcatttctcacagtagctgtacatatttatattgccaccaacaatgtatgagggttccagtttctctacatcctcaccaatgcttgttattttccatttttgttttttgtggggtttttttttagtttttattatacccattctgcagttttgactttcatttccttaataactaatgatgttgaacattttcatgtgcttattggccatttgtatatctcttttggagaaatgtctattcaaatcctttgtccatttttaaattgggctatttgtctttttatttgagttgtaagagttattcatatattctgggtactaggatagtatcagacatatgccttgcaaattttttttctgattttgtggattgtcttttcactttcttggtagtgtcctttgatgcccgaaagttttttttttttttttttgagatggagtctcgctctgtcacctaggctggagtgcagtggtacgatcttggctcactgcaacctccgcctcctgggttcaagcaattcttctgcctcagcctgctgagtagctgggactacaggcacctgccaccatgcccagctaatttttgtatttttagtagagacgggatttcaccatattggccagactggtcttaaactcctgaccttgtgatctgcccacctctgcctcccaaagtgctgggattacaggcgtgagccactgcaaccagcctgatacccaaaagtttttaattttgaaaaaatccaatttattttttcttttgttgtttatgcttttggtgttatagctttttttagctataaaactgttgcataggccggtcacagtggctcacgcctgtaatcccagcactttgggaggccgaggtaggtggatcacgaggtcaggagatcgagaccatcctggctaacatggtgaaaccccgtctctactaaaaatacaaaaaattagccgggggtggtggcgggcgcctgtagtcccagctactcgggtaggctgaggcaggagaatggcgtgaacccaggaggcagagcttgtagtgagctgagattgtgccactgcactccagcctgggtgacagagcgagactccctctcaaaaaaaaaaaaaaactgttgcataacctaagatcacaaagatttacacttatgtttgcttctaagagttttagagttttagctcttacatttaggtctttgatccatatagagttagttttttttatatagtgttaggtaggtatctagttttactctttttgcatgtgaatatctgcttgtcccccatcattgttgaaaaaaactattctttccccattaaatgatcttgggacccttgtaaaaaaatcaattgactatagatgtatggggtccagaggattttaatggccagaataaattaggatatgtttgagatgattaaatgcagggtttctcaacagtggtactgttgataattctttgttttagggtccatcttgtgcattataagatgtttggcagcatgtctggcctttatttattagatgccagtagcacctcacctccatcttagtcataacaaacaacaatgtctccagacattgccaaatgtcccctggagggaggggagcacaattactcccagctgaaaatcattggtgagccagtgggtttgtgtgatcctcttgggagtttaaattagatactaggatttgtgtgtctctctgttgagcagtagggagcaggtgtccttgtaagaatgtcagagaaaatgaacattaaaaactagactaactcactgaagtgatttcctccctctgataagggttcatctcactggacgagttcaggcagacctggaagctgttcagctctcacatgaatatcgacattacagatgactgcatctgtgaccttgctcggagcattgatttcaacaaagatggccacattgatatcaatgagttcctggaggccttccgccttgtggagaaatcctgcccagagggcgatgcctcagaatgcccacaagctacaaatgctaaagacagtggctgcagcagtccaggtgcacactaagaacagcctggtcttcatcacccaaagtgcctcataggcaatgctcagcttctcactagactatctcccttattctccatgtgaaactttatgctgaaaatttacctatccatatgcatcagaatcacctgtgtatttcagtgtggaggggtgggttggggtgttgtgtatgtatgtgttttaagtatatgagtgccccaaccccacctcacaatcttcacaaagtagaacttaggtatagtgttttcaaattctaaagtccacttcagttaagaaccactgacaatgtaactctctcattgttttcattttatacgtttttttgagatggagtttctctcttgttgcccaggctggagtgcattggcgcgatctcggctcaccgcaaagtccgcctcccaggcgattctcctgcctcagcctcctgagtagctgggattacaggcatgcaccaccacaccaggctaattttgtatttttagtagacacagggtttctccatgttggtcaggctggtcttgaactcccaacctcaggtgatccaccctcctcagcctcccaaagtgctgggattacaggcatgagccaccgcacccagcctattttatactttttatttattgtctttaacaatgtctattggtaaagsaaagttatttttaaaaattgtattgtaattccatgacccaagcatatggattttcttcattatttactttttcttacttgttactgtagtgtttatataattttatgttctacttttaaaaaaataaattaatatctaattgtaaaccctttcccatgtgcttcccttgtgattctgtattcttcatgataattagtttaatgcttgcataattttctttgaagtgaatgtgctataatctatgcagcccttctccaattgttaaacatgtgtattatttccactttttcattattagaaataacactagggagagtgttaggacaaatacctaatgcatgcggggcttaaaacctagataacagccgggcgcggtggctcacgcctgtaatcccagcactttaggaggctgaggcgggcggatcacgaggtcaggagatcgagaccatcctggctaacacggcgaaaccccgtctctactaaaaaaatacaaaaaattagccgggcgggtgcctgtagttccagctactcgggaggctgaggcaggagaatggcgtgaacccgggaggcggagcttgagatcgcgccactgcactccagcctgggtgacagagcgagattccatctcaaaaaaaaaaaaaaaacaaaaacctagatgacaggttgataggtgcagcgaaccaccatggcacatgtatacctatgtgtatacatatgtgtaacaaacctgcatgttcagcacatgtagccaagaacttaaagtaaaataaaaaaaaaaaacactgtagttaataacatagtgcatacagcttattttacacaaatcttttgaattttacattttagtggtataaattcccaggaatgggattactttgacaaaggatgttgtattagtctaggtgcttcagagaaacagaaccaatatgaaatttacataagtatttactattaagaattggcttacatgattatggaggctgaaaagtcctaagatctgcagctggcaagctagagaaccaggagagccaatggtgtcagttacagtctaagtccaaaggcctgagactcagaagatccaacrgagtcagttccagttcatgtttgagtaggcaggaaaaaaccaatgtccctgctcaaaggcagtgagacagagaaaaataactctttcttattcagccttttattatattcaggctttcaacagattggatgaggtccactcaccttggcaaggacaatctcctttactcagcctacagattcaaatgtcatatctcatccagaaacatctttacagacacacccacatataatatttaaccaaatatctaaatatcctgtggctcaatcaagttgacacgtaaagttaaccatcacaggtatgaacattttaatggcatgatacgtattgccaggttgctcttcagaactgggcataccaattctaccataaactcataagcttttagtgggatcatttctaacttatgcaaaaggtgaatgatagtgcttccatgatattttactatgcatttatgtaattaacatccaatgttgggaacaagccccccaaaatctggacataaactggccccaaaactggccataaacaaaatctctgcagcactgtgacgtgttcatcatggccataacgcccatgctggaaggtggtgggctttccagaatgagggcaaggaacatctggcccgcccagggcagaaaactgcttaaaggcattcttaagccacaaacaattgcatgagcgatctgtgccttaaggacacactcctgctacagttaactagcccaacctattcctttaatttggcccatcccttcatttcccataagggatacttttagttaatttaatatctatagaaacaatgctaatgactggcttgctgttaataaatacgtgggtaaatctctgttcagggctctcagctctgaaggctgtgagacccctgatttcccacttcacacctctatatttctgtgtgtgtgtctttaattcctctagcgctgctgggttagggtctccccagccaagctggtcttggcaatccaaagctgtctccacaaccttattttatttataaactaaggaaattgaggtttagagaacttgctgtgtatatgtgatctaagttactaacacagccaggactggagcccatgatttctgcctccacctaggattctttccagttatacccatgactgtattatctgtttggattgtctatatacaatctatggctctttcttgtgtgacaagcagaccctatccctatagtgacccccaaccccagtgattttccacctcatggtgtttgtgcctttgtgtgatctccccatgagtgtaggtgggacctgtgacttgcttctaaccaagaaactatgacacaggtgatggggtgttactcttgtgattatattacattatataaaattccatgttagtagactgaagaaagagagattttccttgctggctggacaagctaggagctatgttaaggaaactcacataaggaatgatgggtgccctgtaggatctgccaacagcctccgacaaatggctacaaaacgccggggtcttcaaaaatatattcacaaggaaatacattctcaaataagttgtgttagtttggaagcaggttcttccttagttgagcctccaaatgagaatgcagtctggccaacaccttgaataaagcttgtgagaccctaagtagaggatccagtaaagccatgctcagcttctttatccactaagtttgttgtaatttgttccacagcatagaaaatataccttgccaccaggcgcggtggctcacgcctgtaatcccagcactttgggaggccgaggcacatggatcacttgaggtcaggagttcaagaccagcctggccaacatggtgaaacttcatctctactaaaaacacaaaaattagctgggcatggtggcacatgcctgtagtcctagctactcaggaggctgaggtgagaggctcgcttgaacctgggaagcagaggttgcagtgaatcaagatggtgccattgcactccatcctgggcaacacagtgagaccctgtctcagaaaaaaaaaaaaaaaaatatatatatatatatatatatatatatatatatatatcccttgcttcccagaaaacgtcttattttcttattccactattcaggaaaatctgaattttcatcagtgggtagaatccagagaagcgtcagggtcatttttggtaaggcatttgagtgaatacttacgaccgtgggtttatcttgcctgacttagtaactgagaggcaaagtattggttgcaaacgcatgtctgcatctgtctgtcctatcttgtgcaaacagctcaaattcaacaaagtgcttatttatttgagattgtgatttattgtgattaaaagtaagcaaatgttctgagacatcaaaagaataattcagagacaatggggtaaagccctgggggtttactcatatagagagatacaaaagggagaatagcccaggaagtccatctctctccaccaagggcaaggggcttatcaagacagaagccacaaagctacataaggtaaagtgattggtcagtctaaatgagtctttggtttgtcaattcaggatttgttgatagtggaggttgatggggggcttgctgaaccctgagatcctttcttgagtctagatagcatagtcaccaattcacatcaggctgttctgcttattctgatgggttttctgcgagctgttgttccggttccttcttcaggggccctcactacttgctgtcttatactcttcagcctcagtatcccacatgtcctgtgcacatatgcaaggctcacaaaaaatttccttagtcagttaacacagtgaattaataggggtttgcttcaagggagttttaatctaaaatgaattttttaattgtgctagaaaaacatagcaaaatcatacctctaatccagtgatttacccttgactgctaattaaaatcatcaggaagaacttttcaaacctagaatgcctatggccccctccagaccaatcaaaccaaaatctcttggtgagacgtcatgccactggtatgttggtacgtttgagttttgctttatttttaattgactattattattattattattattattattattagagacaggatctcactctgtcactcaggatggggtgcagtggtgtgatcatagctcacagctcactgcagcctcaaattcctgggctcaggtgatcctcctgcctcagccgcttgagtagctaggactacaagcgtgtaccacaatgcttggctaagttttaaagaaaaatttgtagagacaaggtcatgctacattgccaggcaggtctcaaacacctgggctcaagcaatcctccctcctttgtctcccaaagtgtgggattaaaggtgtgaaccaccacaccagaccgacaaataatgattatatacatttatggagtacaatgtactgtttccttacatgcagacattatggaatgatcgaatcagcctaattaaccctaattaacatatccatcacttcaaatgtttataatttattttggtaagaacattgaaaataatctcttttagctgtttcgaaatctacaaaacactattaacagttatagtcaccatgttgtacatggcacaccagaacttatttctcttgtctaactgaaacgttgtaccctttgacccaatgtctccccttttcccatctatccccctgtctctagcctgtggtaaccatcactctactctctatttctatgagttagactttttaagatttcacatataagtgagattatgtggtatttatctttctgtgcctggtttatttcatttagcataatgtactctaggttcatccatattgtcacaaatgacaaaatttctactttaggctggtctcaaactcttgagctcaagagatccacctgccttggcctaacaaagtgctgggattacaggcatgaaccaccacacccaggaaaggttctattttctacacatcccagccaatacttgttgtcactcatctatttgataacagccaatgtaacatgagtgaggtgataactccttgtggttttactttgcatttttctgattattagagacgtttattggtatgtttgaaatactccccaggtggtgctaatgtgcagccaggcttagtaccgttcatctaattggtttaccctgcaataataaagggtgattatttggtaagactatcctactgctatctgcactggtataaccatcaatatgagaagtcaattcagaaaccaaacgttttcagatttagatgactaaactgctaaataccctcaaattatattaacagacccaagaactcttgatgaaaacagattaaaacatacaaagttctccaagaattattaattttttaaactggaaatttactaaaattagtttttctttagaaagctgggacatataaaccagttgagactttacattagtaccactctaaagatcttctcccttggtttttacgcctgaatacccaactgctttctagacatctccacctacatctctcatgaacatctcaaatataacatgttcaaatgtgacaatctcttcacccccaaactgttttggctcctaatttctgtatttcaggttggtaccccactttctatgcagtctgttacccaggcttaattcctctacctctctcactcccccagtcgcaacggtttccaaattttgagaattctgcttcctaaatattcctgatcaactctctcttctccatccccacatccatggctgaaatgcacaccttcactgtctctggccctctcctattacagcctccacttccttgagccccttgctcggtttggctcagtcccatcctctatcctccccacccttcccaagcatccagaatgatctatctaaaatgcaaattggactgtgtcacttttcagcctaaatcctctaagtggcttccccaaacccacagcataaagtctaagtctttaatatggaatgccaggcccttcacaagctgactcctgcctgcgctcccatctcatccctgccccttatgc

SEQ ID NO: 95172 - DNA, 27527 bp, Homo sapiens
tgcctacgtcggcctcccaaagtactgggattacagggatgagctaccgtgcccagccaaagaagattatattttttaaagacaaatttttgggccgggcgcagtggatcacgcctgtaatcccagcactttgggaggccaaggtgggcagatcactaggtaaggagatcaagaccatcctggctaacacagtgaaaccccatctctactaaaaatacacaaaattagccgcgcatggtggcacacgcctgtagtcccagctactcgggaggctgaggcaggagaatcacttgaacccgggaggcggaggttgcagtgagctgagatcacaccactgcgttccagcctggacagagcaagactctgtctcagaaaaaaaaaaaagacacatttttggccaggtgcagtgctataatcccagcactttgggaagctgaggcgggtggatcataagaggtgggtggatcacacacacaaaaaaagatacatttttatcatactgtagtttttgctcatttacaaattctggtatttttttaattttctttttcaaaggatgtctattatattttctttgagacagtctcactctgttgcacaggctggagtacagtggtatcacagctcactgcagtctcaacttccccacactcaggcgatcctccaacctcagcctccccagtagctaggactaaggtatgggctaccatatccagctaattaaaaaaaaattttttgtgagacagagtctcaccatgttgcccaggctggtctcgaactcctgggctcaagccatctacccactgtggcatcccctcccaaaatgctaagattacaggtgtaagcctccacacccagcctcttttacaaattctatacccacaatttttaacctcaaattatttgctagtgtatcatagatactggagaactttttgtaaagatttaatttactcatgaaccttgagaaacctgtattattatcttgataataacaagagtcaacaaaactaaggcacaaagtaattctagtcagtaatggttgcacaaactgagcatctgcttgacacagtaggtatgtaaatcattgctgtgagacctctgccattgagaagtacacagtctagtgggagagactgtcgcataaagcagtcaggactgtactttaaatttaaggggtatgtttcagacccggcacggtggcacacacctataatcccagcactttggaggccgaggtgggcagatcatttgaggttaggagtttgagaccggcctggccaacatggtgaaacattgtctcttaaatacaaaaagtagctgggtgtggtagcacacacctgtaatcccagctactcgagagactgaggcaggagaatcgcttgaacctgggaggcagacattgcagtgagcagagattgcaccactgcactccagcctgggcaacagagcgagactctaattaaaaaaaaaggaagctaaaaaaaaaaaaatttaagggatatgttccaggtgctattatggaagctcaaggctgagcagtttggacaacccaggagtcccagaaaaacttcatgggagatggcaatttagctgagccttgcgggataagtaggtcaaagcagaagcaacggatattctgggcagaaaggacagcctggccaaaatggtgaaacccagtctctactaaaaatacaaaaattagccgggagtggtggcaggcgcctatagtctcagctactcgggaggttgaggcagagaatcgcttgaacccaggaggcagaggttgcagtgagccaagatcgcaccattgcactccagcctgggcgacagagcgagactctgtctcaaacaatgacaaaaagaaaaagtgtaactgtaggggtgggttgcccctccacacctgtgggtgtttctcgtaaggtggaatgagagacttaggaaagaaaaagacacagagacaaagtatagagaaagaaataaggggacccggggaaccagcgttcagcatatggaggatcccgccagcctctgagttcccttagtatttatttatcattcatgggtgtttctcgaagagggggatgtgtcagggtcacaagacaattgtggggagagggtcagcagacaaacacgtgaacaaaggtctttgcatcatagacaatgtaaaggattaagtgctgtgcttttagatatgcatacacataaacatctcaatgctttacaaagcagtattgctgcccgcaggtcccacctccagccctaaggcggtttttccctatctcagtagatggagcatacaatcgggttttataccgagacattccattgcccagggacaggcaggagacagatgccttcctcttgtctcaactgcaagaggcattccttcctcttttactaatcctcctcagcacagaccctttacgggtgtcgggctgggggacggtcaggtctttcccttcccacgaggccatatttcagactatcacatggggagaaaccttggacaatacctggctttcctaggcagaggtccctgtggccttccgcagtttttgtgtccctgggtacttgagattagggagtagtgatgactcttaaggagcatgctgccttcaagcatctgtttaacaaagcacatcttgcaccgcccttaatccattcaactctgagttgacacagcacatgtttcagagagcacggggttgggggtaaggtcacagaatctcaaggcagaagaatttttcttagtacataacaaaatggagtctcctatgtctacttctttctacacagacacagtaacaatctgatctctcttgcttttccccacatgtaacagcttgtctatgaaaggtaggaggaatggtattagagatctataaagggtcagcggagggtcctcttactttgtttttaggctaagaggaactttgatgtgtttatgggttcaggagaaagagccagaagagagacctttgagatgtagggaagaagagctaactggtggtataaggtcccattgggaataagaggggatgagactaccgtgcaaatgggctggcagagggagcgatcatggtgggttggtgggatagtttgtgctgggaagctgacagcttttatgcttatccatcctttgatgggaatgttactgaaaagcaccggtgttgtcttttaactcttcctcatctgctaaggatgtgatcttaatattgggacttttaccctacaggccatgtaggctgatattttgtctttatttgtttgctgaagggaaaagtagctctcccaaattatttaaataagagatgatttgttatgttttaccaaaaggattaaatgtaacactgaggccgggtgcagtggctcacgcctgtaatcccagcactttgggaggccgaggcgggcagatcatgaggtcaggagtttgagaccaccctggctaacacggtgaaaccccatctctataaatacatacatacatacatatatacatacatacgtgtaacactgaaagactagataggtcatgggaagagatggccccaattgtgaacttagtaggattaggttcttcctaagctaagagctacatttttttgggaaacagagtctcactctgttgcccaggctggagtgtagtggtgtgatcatagctcactgcagccttgacctcctgggctcaattggtcctcccacctcagcttcccaagcagctgggaccacagacatgcatcaccatgcctggctaattttttaaattttttatggagacaaggtctccctgtgttgcctaggttgatctcaaactcctgggctcaagcgatccacctcccttggcctcccaaagtgctgggattacggaggtgagccactgaaccaggcttgcctgtctggcttgctcacagttgcagcctcaacaattagtacgtaacagatactcaatttttttttgagacttttttgagatggagcttcactcttgttgcccaggctagagtgcaatggcgcgatctcagctccctgcaacctctacctcccgggttcaagcaattctcctgtctcagcttcctgcctcctgagtagctgggattacagtcacctgccaccacacccagctaatttttgtatttttagtagagacggggtttcaccatgttgtccaggttggtctcaaactcctgacatcaggtgatccacctgcctcagcctcccaaaatgctgggattacaggtttgacccaccrtgcctggcccccagacactcgagttttaaaggaatgctataataaatagaaattattttacaacagtgggatgaaactatgttttttttgttttcgttttttttttttgagatggagtcttgctcttttgccagcctggagtgcagtggcgcaatctcggctcactgcaacctctgcctcccaagttcaagcgattctcctgcctcagcctcctgagtatctgggactacaggcgcgcaccaccacacccaactaatttttgtatttttagtagaaatggggtttcaccatgttgaccaggattgtctcgatctcttgacctcgtgatccacccaccttggcctcccaaagtgctgggattacaggtatgagccaccgcgcctggcagcataccattacattttattttacttggatttaacaaaaataaaaagaaattgaggtaaaactggtgacattattggatcattcattcaggcagatttcagaatttggagtcattatcccrtgtgtttccayttcagtcaatatcctttagctccctgcttagaaataggaattagccttcttaaactcctccctcgcttacctatttttgttagctattgtaaggaacatggctgtgctttggtcaaggataggccaaggtaagatgtttacatcctgcgtgactcagcaagtttagacagaggcgtataactccacttgttatcacagccatgtaggcataacatgggaaggtcatcacttggctctaagccactattttctgtaaaaggtataattgccctgctgatactgtacaggcgttcgtgcccagagaaagagagagccagagctgtcagtctttgcagacagacagggggagccagatcacagctgagagagagttaagctgctgaccctgaaggcaagggagagccagcctcgcagttgtgtgggggagccatgggactaagcagctgagacaaggcagacagtgtgagagaactagtgtaagtaagctgctgatgagagctgctgctgaataaaatcatctttcacctgcctaccgtcccctgagtgttctttcagctatctgttcatccacccactcccctcagacctcgatatgggctggaacctggctgtgggcatgacagttggcatagtcgtggacctgacagctatattatacactgtcaagttttaaaacatgtatattgttttaatcgtaattctcacatttattagtcttaggtattgaaattgattattttttcacattattatatatatttttttacctattcaataaatgttaatacttgtggaagaattgtggaatcaaaactttgtcctttttttcttttaatcttttttgtaatagagacggagtcttgccgtgttggccaggttggtcttgaactcctgagctcaaacagtcctgccaccttggcctcccaaagtgctaggattaaaggcgtcagccaccgcacccggccccaaacgtttaaacagatgtatttcagaactttcagataaaaaatgaaagtaggtttctcgtgccgtgtcgtttagggaaagacggcgacgtctgcacagtttagttgtgacaccaagcagttgttcgtccccgaacctggatgggctccgagggcgcagtgcctccaggagccgccaggggccgccaccgccggcggtgcccgacagcgctgccgtgtgcgtcgcctgcgcgccgccggaaaggaaccctggtccggaggcggcggsgcagtgcatcctgggttggcgtagccatggcgtctcgtgtcctttcagcctatgtcagccgcctgcccgcggcctttgcgccgctgccccgggtccggatgctggccgtggcccggcctctcagcaccgctctstgctccgcggggacccagacgaggctcgggactttgcagccggccttagtgctcgcgcaggtgactcgtggtgactttgctgccgcttggcaagggtcagggattgggcccggtgggggtgggggccgggcatccggggcgcgccagctgcaggcaggggtgacccggggggcagccggctcgctccgcagccccgctgcctaaaggtgtttagttgacccctgacgggaggccgggtgacctcgtaataacgagcaagagcactgactcgagtccagcactgctgggctgccgcttaccgaaactttggacaagtctcctagcctggctcacactcacctgcaaaattgggatcctggtctctaccttgcggagtagcaatgaggattagatgagttaatgcggctagagcacctcgtacggtmtcaaaatagcggtcaccgtattgtagtgaaagcagcatgcaaagaggcagccacactggcctacagccttctccagagcggttttctctctgcagttctgtccttactcttccctgcagcaccttctgcctgtgtccaggactcctggaagtaattctaggaaacaagccaagtgacctttgamcaataaggatttgaattgcgcgggtccacttatatgcggattttttttcaaccaaacgcgaccagtatttacgggatgtgccgccccgcgtataaggagggcaggctcttcctataagcggattctgcaaggctgactgcgggacgtgagtgtgcggggatttgggtatagtcgggggtcctggaaccaatctgcgcaaataccaaggaacgactgtacctgtagtatatagcttgagctgatgaaatctgcgtgaggctgaaacgccgggaggcagtgatttcggtgttgttgttgttgtttttgagacagagtctcgctctgtcacccaggctgtaatgcagtggcgtgatctcagctcactgcaacctccggctaacggcaacctccgcctctcaggttcaagcaattctcctccctcagcccccccgagtatttgggactacaggcgcccgccaccatgcccggctaagttttgtatttttagtggagacggggtttcatcatattggccaggttggtcttgaactcccgacctcgcaatccacccgcctcggcctcccaaagtgctgggattacaggcgtgaaccaccgcgccctgccttttttttgttgttttctragttctccagatgactctgaagtgcagttgggaataaaaataaccgtcttaaggtaggatagactcccaaggtcaagttatgaaaccccttttcaaagtcatagacttcaggtaatagtggtttcaaccttgactgcatgttagtgtgaaaaataagtgtgtctggccaggcgtggtggctcacgcctgtaatcccagcactttgggaggccgaggcgggcgaatcgcttgagcccaggagtttgagaccctcctaggcaacatggtggaaccccgtctctacaaaaaatacagaaattaggccgggcgcggtggcttatgcctgtaatcccagcactttgggatgccgaggcgggcggatcacgaggtcaggcgatcgagaccattctggctaacacagtgaaaccccgtctctactaaacatacaaaaaattatccgggcgtggtggcacgcgcctgtagtcccagctactcaggaggctgaggtgggaggatcgattgaacccaggaggcagaggttttagggagctgagatsatgccactgcactccagtctgggaggcagaccgtcttaaataagccagccagcccgtgccagatcgacagaatctagaagtgagtactaggcgactatttttagaagtcatcaagtgtttcttttgtgaagccagtgttgctgttcactgacagtgtaatggattcattcattgggcactgccctgttggctgtatcaaaaggtgaaaagtgtcaccttgaaattaagggttaaaggccaggcgcgatggctcacgcctgtaatcccagcagtttgggaggccgagacgggcggatcacgaggtcaggagatggagaccatcctggctaacacggtgaaaccccgtctctactaaaaatacaaaataattagccgggcgtggtggcgggcgcctgtagtcccagctactcgggaggctgaggcaggagaatggcatgaacccgggaggcagagctttcagtgagccgagatcgtgccactgcactccagcctgggcgacagagccagactccatctcaataaataaataaatawataaataaataaataaataaataaataaataagggttaaaaaggcagtagttagaattgatgagtgtctggttcctaagattgatttcaacattgggctaaaatgtgaagtgactgtctttgttcttacagcattgattctcagttgattggacatacagatcacttaggytggaatacagattctgattcagttctgggaaggggccagagagtttccacctccagtgggcttccagaagatcctgctgcgggtgttccttggaccatgctttgaatggcaaggagctcagaaatgttccactatggcggcttggcttgcatatatagcagaggaaccattttatttatatttacaaagtggttttgactaagttcattcaaagatattgagggccagctgtgtgccaggactcatgctagctgttgagagatacagagatggatacaaaaggaagacattagcttacatcttcattgaacgctttgcagcccttatgtccaacttgctggctccttctctgctgctgtcttcttccctaggctgttgtgacactgttctcccttggttggtttgtcctcctaccttgttgggacactttgcctttcaggctggagtgcagtggcatgatcgtggctcactgcagccttgacctcctggactcaaatggtcctcctgcctcagcttcctgagtagctgggactacaggcatgagccaccacccctaattttttgatgtctgtcttctttttagagacggaatctccttatgttgcctaggctagttgtgaactcttgggctcaagcaatcctcctgcctcagcctcccaagtgctgggattacaggcatgagccatcacacctggtgtgcctaacccttaaatgttggtgggctcccgagttctcttaccacacatgctccctggactcttcactcctggtttctgttattgctgtatatcccagacctccgcctccagtccttgttyatctcatttggaccattgctcatgctacctattccctgctgtgaaatttcctctcctcaaatccatccactatgccaacttcagagcaactagtcactcatttacaccctttttcccaaaaggagctaaggcagttttcctgggtataaaaataccagatgatataaaatagaaggtaaggaaaaaacaaaaaaacaaaaaccaagggcaatggcctaaaatgcagcctggaagtcttatacttgatccaggtaggccccgaatctacactgtctagcagatggagcacaaagataatttccagcagttctatggggcatggtacgcagatgaagacagcacttgtacaaaaaaaagctagctattccaggactgggaccaggaccagacaaagtcccagtcccttcccatggcccttaaggctctgcagacctgggccctccctcttagcctccaagcctgtcatctgtgtaccatctcccaacatgagctgatgtcttctcacatagacacaggcactgcactttcatgwctttttttttttttttttttccagacaaggtctctgtcacttaggctggagtgcagtggcatgatcatatatcagtgcagcttcaaactcctgggctcaagcaatccttctgcctcagtcccttgactagctgggataactggcctgcgctaccacgcctgacctcatttcgttttcttgacctgttcttccctctccttgaattatcagtctcagctcttttcctcaccaaatccaagtctggcatyctcctttccggccactcaaggactgagtgacaacttttgttattgcatcagcctacagatacttctgtcatggtgcttgccatatttttatttcaactaaaatgatctgtggattggtcttttccattagagtgtaagcttcttttgggggaaggttgtgtcttattcatctttgcatttccagcccattgcacagttcttggcacacaggtaaagttcccaggcttctgagacagtcgtgtaaataaaggcaaggcattgtgaaacaggtgtgtgtagtgcaaaagcaaaaagagatacttgaccaayctctcagtgaacgtgatcttgaaggcctgtgcagaggccaggaagagcctggcacttacctccttgtggttgactcttagggtgtctggaagggaacattgttggggggaagagagtgagcatatcatgaagggagctgtatgctgcagcgaggaattgtgggtattctctgcaaaggtcatagggagtgaacatgaaacagggcttattgaaggaataagccccaggtggcggagaaggaacagaggtctgtaagcaggagttttggagacaggtcaggagttcatttccaaactgttgagtttgagaggtctgggctgcctgtgtagagtggaccagtcggcagtttgtagagacggcctttaaagccctctccttagcctcctctgagtttgcctcaggcagaagtgagccccagtggagtaccgggattctgatggaacctcatctgtttgaattactagcccagagggtcatcactctttacctgcaaacagtaccttctctgatgtctgggagaggtggtttatttcccatatacttgttaagtgtagatcttggggaagaacaactaacaccagaaacatcacatgttggctgttggggaggtgcttgtccattttgtwtcccttttattttttcccaatcaacagagatccagttagaaggagcagcaagaccttccaggaggccatgctggaaggacatggggtgaggaggatacctaaccttcccttgcctcagtttctcatctgtaaaaaggagggtgatagtatcatggatctcaccagaatactggagagctgaagaaagatgatgtgtgtaaagtgcaatatcatagcctgagctgataagaaattaatggaggccgggacgtggtggcttatgcatgtaatcccagcactttgagaggctgaggtgagtggatcacttgagaccaggagttcaggaccagcctggmcaacatggtaaaacctcatctccactaaaaatacagaaattagccaggcatggtggtgcacgcctgtaatcccagctacttgggaggcagaggcataagaatcacttgaacctgggaggcagaagttgtggtgagccaaggtcacaacactgcactccagcctgggcaacacagtgagactctgtctgaaaaaaaaaaaaaaaaaaaaaaagagaccagaggcaggagcatgagagggtagtaggatcaagtattttggggctacgctacagccaaggtatcaaactagctgctgctggtcattgttctcaggatcctactaaataaccctaaatagcacttactgtgttaagtgccagccaatgtccaagcctttacttcatctcactgatgcttcacaacagtcctgtgagtgtggtactgttgtttatccccattttacagatgaggaaactgagatgtagaaggttaagtaacccacccaaggccaaacaactagtgagagccagcaccatggtgcaggcataggtggtctagtttcagcgtctgagctcttgcccactaacttactgcctcacgctgatcctgatgcagcacccactctagattggcatgtggcctccagtcagagactcrtttaatttaatcacatggtgcccacctggcccttgtaggtacttgcyggagctgctgaggacaatgctgacaacctagttggcctcatgrgtagttgtgtacgaacatagaatataccctcaccaggggtcttgctttgttgcccaggttggtctggaactcctgggctcaagcgatccttccactttggcctcccaaagtgttgggattacaggcgtgagccaccacacctggcatcgtaccatttctttttttttttttttttttttttctttttggagacagagtctcaccctgycgcccaggctggagtgtagagccatgatctcagttcactgcaacctctgcctcctaggttcaagtgatcctcccacttcagcctcctgattagctgggattataggcacacgccacgatgcccggctaatttttggactttcagtagagatggaggtttcactgtgttgggcaggctggtcttaaactcctgacctcaagagatccgcccaccttggcctcccaaagtgctgggattacaggcgtgagccaccacacctggcctcgtaccatttcttgataagcacacagcctctgttagatccctccaactgaaatttcttttctgccattgccatattacctcatttcttctccccctttctctttattcctttcttctccattttatttgtgacttggaaacctatttgagtcattgttaagtaggccggtcatgtgcctgtataaaaggtctccttaacccatgtataatacgaaaggagactagacatttagacaaagaaacatgctctaaaactcttgaaagtactcagaaaggctcgttagaatatctatcatactctccaactcatctctttagtttgctgattaaacctgattttttttttttttttcttgagacggaatctcactctgtcacccatgctggagtgtaaatggcrtgatcttggctcactgcaacctccgactcccaagttcaagcgattcttctgcttcagcctcctgagtagatgggattacaggcacatgttaccacgcccagctaacttatatttttggtagagacggggtttctccatgttggtcaggctagtgtcgaactcctgacctcgtgatccgcctgcttcggcttcccaaagtgtggcaattacaggtgtgagccactgcgcccagcctaaacctgattttaataactgacttctttttcttttcttttttgagacagagtctcgctctgtggcccaaggtggagtgcagtggcacagtctcggctcactgcaacctctgtctgggttcaagcaattctcatgcctcagctacctgaatagctgggattacaggcacacaccaccacgcccagctaatttttgtatttttagtagagacgaggcttcaccatgttggccaggctggtctcgaactcctggcctcaagtgattggctcacctcggcctcccaaagtgctgggattacaggtgtgagacacacatcggcccaatayctgttctttatgcaagatgaatgtttcttctacagaggttatactggtttsgttctctgggcagtatttattatgatttttcatggacctttgtgagtttcagggacctgagccctaacaagcagccccactttctatagggaaatgcctgaagaacgccaagcctcggacttaaaatcaacttcaggaggtaaacaaaccaatttagattagggatttctttctttttcttttttttgagacggagtcttgctttgtcgcccaggctggaatgcaatggcgcaggctcggctcactgcaacctctcctcccacattcaagcgattctccttcctcagtctcctgagtagctgggattacaggcgcccaccaccacgcctggctaatttttgtatttttagtagagacggggtttcaccatgttggccaggctggtctcgaactcctgacctcaggtgatctgctcaccgtggcctcccaaagtgttgtgattataggcgtgagccaccacgactagccagattagggatttcagtagtgagcaaaactgccagataccctgttttgttttctctgattctgcgtcgtaccttccacagcattaaaccccctgacctgtaattgcagctcattccacatttgttgaatgaaatctggtcaataccctaatacctaaacattgagccgactaataccagagatacgtgaggtattgctctaacatggcacaggccagaagggctcatggtttggctggtggccatgaggcaagcctcgctggaagggaaacagattggaatgtagtgactgtaagctccctcatcccctctttgggtgggaggccagcttcctttgtcctggctgagatcagggagataactgctggaaccaaactagacctttctggtgtatggtcctcaatttgaattgcctttgggtttaccatgacagctctttccttttgggttattttgacttgggtcagcctattaaaggtggyagcaccctgtagaggcctcgggatgctgaagatgccatgagaagacacaggcattctgcagacrctagacaattttagtggcagttagtgtcgcagagcagtatgaatgtccagagcctgagggttgaagccaggaggcagaggggccggtcctgactcccaggaaggaggcctgagatgctgctgaactgttggggcttctgcgattacccagtcctgcaacttagtstgtcctggtggccacaatgagaatcagatgctgtgggttctctaaagccccgaaagttctgtgaaagttacctataggcttgtgcattgatttagaggtattttccattcaatgacagtgtttccttcctgccgtcgctctaggttcctggtagagttacacagttgtgccgccagtatagcgacatgcctcctttgacgttagagggcatccaggaccgtgttctttacgtattgaaactctatgacaagattgacccagagaaggtaactgatggtggtttgaatttttttctttaaatatagagtatttaattacatgctagaaaatgcaaagggaaagatactcagtaaaaatctccctggctcccagacacccaggcccattctgggagatagccagcgctaccagtttcatgtatgtttccaaaggtactcaatgcatatgttaaagaagtatacacacgtgtgtatattatatgtatgtatctctcaccctttttaaaaaacacaactggccgggcactgtggctcatgcctgtaatcccagcactttgggaggccgaggcgggcggatcacctgaggtcgggaattcragaccagcctgactaacatgtagaaacttcatctctactaaaaatacaaaattagccgggcatggtggcacatacctgtaatcccagctactcgggaggctgaggcagcagaatcacttgaacccgggaggtggaggttgcagtgagccgagatagcgtgattgcagtccagcctaggcaacaagagtgaaactccatctcaaaaataataataaataataaaaacacaagtggggccgggcgtggtagctcacgcctgtaatcccagcactttgggaggccgaggcgagtggatcatgaggtcaggaawtgaagagcagcctggccaagatggtgaaaccccatctctactaaaaatacacaaattagacaggcgtggtggcagacacctgtaatcccagccactcgggaggatgaggcagagaattgcttgaacccgggagggagagggtgcagtgagccgagatcatgccactgcacactgcagcctggatgacagggtgaaactccatctaacaacgaaaaaaaattgaatctgttgtgtaggtaaggcagttttttttttgatttgggtttttgaagaatcattcctggtgatcctgaggtctaaattagagtgatagggtgatagtaaacactttggccaggcgcagtggctcacgcctgtaatcccagcactttgggaggccaaggtgggtggatcacgaggtcaggggttcgagaccagcctgactaacatggtgaaaccccgtctctactaaaaatacaaaaattagctgggcgtggtggtgcacgcctataatcccagctactcgggagtctgaggggtgagaattgcttgaacccgggaggccgagtttgcagtgagccgagatcgtgccattgcactccagcctgggtgacagagcaagactttctcaaaaaaccaaaaaacagacaacattagagtgaaatccttcattagctatgtatatattgttcacttcaaaacagagtaagataaagcaaaccatrtacatactagcataggttacatataaaatgtcagttatagcctctgtatgttaaaaaaaattcgatgtagtcacaaggacagaaaaccaaacactgtgtgttctcgctcataggtgggaactgaacaatgaggtcacttggacagagggtggggagcatcatttaccagggcctgtcaaggggtagggggyttggggagggacagcattaggagaaatacctaatgtaaatgatgagttgatgggtgcmgcaaaccaacatggcacatgtatacctatgtaacaaacctgcacgttgtgcacatgtaccctaaaacttaaagtataataaattcaatatagtgattaagtggcattgtaccaccctgttatcttgggaagcagatgctttcatggactaaattttgtgtttggtgctcctttcttgcagctttcagtaaattctcattttatgaaagacctgggcttagacagtttggaccaagtggagattatcatggccatggaagacgaatttggtaaggctcagtcttctatctacacactgcgatttttgattaaggtggattaaactgaaagaagtggtgggcgtctgaattggaattagaattaaatattaatagaaacagtagcatccactgcccttcacacacaccttcctgcccacttaccatcaggtgaagtaagctttagggatggtacatttattcagagagcaccttgcacaagcccagcagagtgcccagtgtggtgccaagagccgaatgaccagagatggttccaggggactgattcttcagacagggttctaagacaaagggcaaaagcctccccggaacacatgctgatgacatgtcagcccctcctgagctcgggtaacgcgaaccaggtagaagtaatgtgtgccaggacaagagacgcacccagagcctctggccttggtctcctatcctggctcacaagcacactccaagtttgggactgtgtgttgggcaggtgagacctttataaggttccatggctgtttctgcgtgagttggctgaataggaaatcaaaggacttctgtgctgttctgcagagcagggcctagttaaaattcctcacagatgatgctgactaggatggaatccctttgcctagtgcttaagagtaccaggtctggaattgagcttagtcaggtatgagcctggacaagtaactgtatctctcaaagcctgtttcctcagctgtaaagtgggggtgataatagtaggaaccccaggattggaattgctgtgagaattagagatgatgtgtaaaatgctcagcacagtgtttgggccaaagtaagctaactaccaaaacccagccatttataaaaacccaaccatcataaaaaaaaaaatgcatgggtgacgtgtgttacagcacacgaaccttgagaacgtgcygagtgaaagaagccagacacagaagatgacacgttatataccatttacatgaaatgtcaagaagaggcaaatccagagatagaaagtacacgggtggttgccagagctagggaggatggggagtgactgctgacgggcactgggtttctttttttttttttttttttaattgatcattcttgggtgtttctcgcagagggggatttggcagggtcataggacaatagtggagggaaggtcagcaggtaaacaagtgaacaaaggtctctggttttcctaggcagaggaccctggggccttccgcagtgtttgtgtccctgggtacttgagattagggagtggtgatgactcttaacaagcatgctgccttcaagtatctgtttaacaaagcacatcttgcaccacccttaatccatttaaccctgagtggacacagcacatgtttcagagagcaccgggttgggggtaaggtcatagatcaacagcatcccaaggcagaagaatttttcttagtacagaacaaaatggagtctcctatgtctacttctttctacacagacacagcaacaatctgatttctctatcttttccccacatttcccccttttctattcgaaacaaccgccatcgtcatcatggcccgttctcaatgagctgttgggtacacctccctgacggggcggctgccgggcggagacgctcctcacttcccagacggggcggctgccgggcagaggggctcctcacttctcagacggggcggctgccgggcggaggggctcctcacttctcagacggggcggctgccgggcggaggggctcctcacttctcagagggggcagccgggcagagacgctcctcacctcccagatggggtcgcggccgggcagaggcgctcctcacatcccagacggggcagtggggcagaggcgctccccacatctcagacgatgggtggccgggcagagacgctcctcacttcctagacgggatggtggccgggaagaggcgctcctcacttcccagactgggcagccgggcagaggcgctccccacatctcagacgatgggtggccgggcagagacgctcctcacttcctagacaggatggcggccgggaaggggcgctcctcacttcccagactgggcagccgggcagaggggctcctcacatcccagacgatgggcggccaggcagaggctgcaatctcggcactttgggaggccaaggcaggcagctgggaggtggaggttgtagctagccgagatcacgccactgcactccagcctgggcaacattgwgcactgagtgaacgagactccatctgcaatcccggcacctcgggaggccgaggctggcagatcactcgcggttaggagctggagaccagcccagccaacacagcgaaaccctgtctccaccaaaaaaatacgaaaaccagtcaggcgtggcggcgcgtgcctgcaatcgcaggcactgggcaggccgaggcaggagaatcaggcagggaggttgcagtgagcagagatggcggcagtacagtccagcttcggctcggcatcagagggagaccatggaaagagagggagagggagagggagagggagaccgtgggaagagggagagggagagggagaccttggggagagggagagggagagggagaccgtgggaagagggagagggagagggagaccgtggggagagggagagggagctgggtttcttttacacaatggtgatggttgcacaatgtgaatatactaaaaactaccaaattatatggtatatacaaggaggaattttctattatgtgaattctrtctcaacaaacaaacaaacaaacaaacaaacatacctccaaarcatcgtacccaacctgtatgcatactgtctagaagctaactggcccacaacctatatgggattcaaggttgctgaaagttttgatatacttgtagctgttgtagaagggtcaggtgtgttcagttctaaaggattttttttttttaactctctcacattgttgtatatttttcttttagggtttgaaattcctgatatagatgctgaaaagttaatgtgtccacaagaaattgtagattacattgcagataagaaggatgtatatgaataaagtatcaggtaaatagacttaaaaaatgatgttcacccatagatttgtctgtggttcttcaataaaggaaacttaagaagaaacagaaaatggaaatgcttgaccaagatttttcactacttataaaatgcaagccctttcctgttgtctgccactcaaaggggcccagccctggtggtgatctttgagaggttgagaactgtcattcctggatagaactcccttgattgtcagctgtcctcacaaaagcagaacattgtacaaagtactgaacagggtaacctggaaacagacctctgtctccctcaattactcagccaaggtaagcccagcctgctgggtaagacactgaagtgacctggctcttaagtaggcaagagaggcctcatgtataagaggatggactttggagtcagagacacccaagtttattctcagctttgccacacactataagcctggtggtctcaggcaggctgcttagctctgtaagcctcagtttcctcatatgtaatatggtggtaatgataggacctacctggggcttttgtgaaagcaaaattgaagagagtatatatatcacttgatataatgatgtaaagaagcctctcagtaaatagtagcttttgttacttgggacctagaataatcaaataagactttttgaattaaaacattgtattagtgtttttagtctttagcttttagtgaccctgcatttttttttttttttttttaaagatggaaccttgctctgttgcccaggctggagtgtagtggcacaatctcggctcactgcaacctccgcctcctgggttcaagcaattctccggcctcagcctcctgagtaactgggattacaggcgtgcacctccacgcccagctaatttttatatttttagtagagatggggtttcaccatgttggccaggctggtctcgaactcctgacctcaggtgatccgcccagcttggcctcccaaagtgctgagattacgggcatgagccactgcactcagccagaggctgcatttttagcacctgaaagatgtcacttatcattagtaagaatacatcaaaaataacattgaacttattttgtcttttccagaccctttggctttgctgagagaggactcagatgatagtgacgaatgtctggcagtgaggacacattttggcattcttgctgactctgacagagtgattctgatggacttgtatttaaattgtatgtgttttactctttgaaaataaatctataaaaccaacattttcccccatcttcagtttttcaatgatgtctataaagtgcttttttatgtttgtatactgacattgcttaatatttttaaaggtctgatttgtcatttgtattcatgcatgtcaaaaacaatggcttccccagccatgtacttgaagtaaggctgtctccccaccttcgtatcaggagtgaatatattcatggaaatggactttttgcttcaaaaaaaactttgttttggtttccattagcttattatcagatgtgtcagctgatatcagcaggtgggactagtttttcatcactgtcctaaagatcccttttaatacagtttaacagttttggagaatgggaggctctctttcctcctggaaggtcagtttgacattgccacacatcaaaccacagtttgatttgtcacacatcattattggttctgccccttttactcttagcactgtgttggttccttggggttgatgtaaataacatgtatgcattgcttagctcttgaagagtttagtttgagagttacatcaaaataattcctctccttttactgactttctagtatggggaaggaagaggaaccaaaggcctacagtaagtagtgtctttgaggcagagggactaaggtgaggggccctcagccagcagagaatctcatggctgagagatgaggtggtcgaaggatgggagtcagctctgggattgggtccacactcacatctgcttcccttcctgcaggtaccaatacgctggttccttctgggttgctctagagttattccaggcatgttaggcagacatagtccttttttttttttttttttttttaacttttatttaggttcaggggtacatgtacatgtttgttatataggtaaattatgtgtcatggggtttggtgtgcagattatttcatcacccaggtaataagcataataccccatgggtttttttatttgagaaggagtttcgctcttgtcgcccagactggagtgcagtggcacaatcttggctcactgcaacctccgtctcccaggttcaagcgattctcctgcctcagcctcccaagtagctgacgttatacccgccaccatgcacccgccaccacctggctaatgttttgtatttttagttgagacggggtttcaccatgttggccagcctggtattgaactcctgaccttaggtgatccgcccacctccgcctcccaaagtgctgggattacagatgtgagccactgtgcccagtccctgatgggtgttttttggagcctcaccctccaccctccagtaggccccagtgcctgttgttcccttctgtccatgtttactcaatgtttagctcccacttaaagtgagaacgtggtatttggttttctgatcctgtgatagttcacttaggatactggttccagctgcatccatgttaccataaaggacatgatctcattttttatggctgcatagtattccatggagagtgtgtgtggtgtgtgtgtgtgtgtgtgtgtgtatacacactttctttttttttttttttcagacagtctcactctgtcgcccaggctggagtggtatggtgctatcttggctaactacaacctctgcttccccagttcacgtgattctcctgcctcggcctcctgaatagctgggattacaggcatccgccaccatgcccggatactttgtatttttattagagatggggtttcaccatgttggccagattggtttcgaactcctgacctcaaatgatccgcccgccttggcctcccagagtgctaggactacaggcgagagccactgcacccagcctacacattttctttacccagtctgcagttgatgggcatttaggttgattccatgtctttgttattgtgaatagtgttgcagtgaacacaggcatgtgtgtgtctttatggtagaatgatttatattcctttatgtatatccagtaatgggattgctgggtcgaatgcaaacctcgttttctttgagttctttgagacattcactgtcacccagtctgagtgcagtgacacgactgtggctcaccgcagcctcaacctcccaggctcaggccatcctcctgcctcagcctcccaagtaggcacaccactgctaattttttaagttatttatagagatggggtctcactgtgttaccccggctggtctcgaactcctgggctcaaaagatgctcccgcctccacttcccaaagtgctggaattacaggcatgaggcactgcacctggcccctttttagcaatagaaagcatatcctcagttatgaaaatcatacattgttacactagaccttttttatttttttgcaatatttagcaacatatcttggaaaactgccaaattggaggataaggctcttcctcattgtttttttacaactgcatttatttaacaatagcttgagcacttactaagcactggtgatcaaatagggagtaaacaggctgtgtgttattcctttgattggaacgtctagtagtttaacactgggggtattttggtggtagtccccaagttgttctggctattttaaatcccatggcagctgtacattttaccaaaaaaaagcgtctgtgattgtgtctgcctaagatcacaaagtctgactgtactgccacttgagtgcctgctttgctactatcttcaccagacgcctgcagtgaaacagcccattcacatcatccagtagctggtgtaagccccaaagaagccagaatgagggaagacatttactggatctcacacacacacatcattcatccccaaggccatttagggtctggttgttcaagcaatagcaaaggcctttctgttctttctgctctaagagcttatcagaatgttcttttgagagacttctgtgccactataggtaggcagcaaactggccaaatgtagcattccaaagtgtgtgtgaattcaagaacaggataaatggaattgtatgcatatggtatttaatagctgctgaaaacacctcagaggatctgtgcctctgttgtacaccgttcccactgggaaagggcggtttgtgaagcctgtcatgacccagtcccagtcctgtctccagccatccccaccatatctccagtggagctgcttcagtcttctcactgtgttctccatacagcaagttcactcactcgctccacacacaaggaagtacccactgtgtgttaagcactcctggagcctgagtacacagtttcacaccatatagtttgtctcccatctccaggagctcaccaccttgtaagggaggtaggtacaacctaggtggaggtatcatactcagcatcaccaatgatacaacaagtcaacctcctatgctgctcctgatgtgaggcactgaggtcatgtcacctctgaggcactcttgctaaaatcatctaacctgaatctgattatgaggaaacaaatccagaaggtgggagtttataaggcctggactttaaaaagtgtcatgagaggcccggcatggtggctcatgcctgttctgttaatcctagcactttgatttgaggccaggagtttgagaccagcctgggcaatatcgtgagaccctgtctcttcaaaaatattaaaaattagctgagtgtggtgtcacctgcctgtagtagcagttagtcccagatgtggagattgggataaagagagatggatgggcaagagattctgggaataaaatggcagaacctgggaggatcacttgagccagggaattagaggctacggtgagctatgactgcaccatggcactccagcctgggcaacagagggagactctgtctctaaaaaagaattgaaaaataaataggcggggtgcagtggctcacacctgaaatcccagcactttgggaggctgaggtgggtggatcacctgaagtcaggagtccgagaccagcctggccaacatggcgaaacctcgtctctactaaaaatacaaacattagccaggcatggtggcaggtgcacgtaatcccaactacttgggaggctgaggcaggagaatcgcctgaacccgggaggcagaggttgcagtgagccgagatcatgccactgcattccagcccgggcaacagaaactccatctcaaaataaataaaataaaacaaataaatggcagaatctgatcagttgtgtctaagctatctcccaacataccagtactgggtgagttgcggtctaaagcaggtaccagaggattggatttgatgcattgaatttgaggtgtttgtaggatacctgagcaggcaacagataatgagcaacagttcaagaaaaatgtcaggcttggagtctgagcgctggtgaggtgcttccccagtgccggctccctcctgctaagttcccattgaggagtcccctcaccctactctaggaagtggcttaagtgggaatgattggccctctgcccctgggatgcgcacttaagtacttgagcgtaatgtgaattcttcttcagggatgatttggtgctggggttgagaagctaggagaactgagtgaaagacttacctatcacctgaaattctttatcaagtgcatgtgttactgttttaatttttaaagtggtagccaactaataaataaagccaattaaacaaatgtaactgacaaattaactttattaatatgcaaagctaattaataaagccaacaaacaaatgccaaggttcaaagtttaaaaaagcaactcacacacccaacttagtgccctgaagacacacagcaaaaccaaggaaagaaaaaaatttgaaagcaaaataaagcagctgggttctttcctaacttctcaagtaccaggccagtatctaagagcacagactttagcatcaggcaaagctgggctctgaattgtagcttcactcggtaacaggcatgtgatgttggctaagccatctaacttctctgaacctaagatttcctctagtggctgaagtgagggtcacaggagggatgtggtgcagtgttgactgtataatgcaagtaacatccttcacactgttaagacataaggaagaagctgatgtcacaggacctgaatgcagagtgtttagagcaagtacgtagtggaagagcgcccaaagrtgatgtccattcttccctccagggctggaggcctagagaaacagcatttgcctggcacacagcaagaggtcaaaacaccctgctaggtggtctctttttttttttgagatggagtttcactcttgttgcccaggctggagtgcaatggcacgatcttagctcactgcaacctccacctcccaggttctagtgatcctcctgcgtcagcctccctagtagctggaattacaggcatgcgccaccacgcctaattttgtatttttagtagacatggggtttctccatgttggtcaagctggtctcgaactcccgaccttaggtatctgcccgcctcagcctcccaagtgttggcattacaggcatgagccatcacactcagcctagaagtaccagatagcagattctccagatgggcatcagccaacgtatagcatgggatacaatcccaatgatccccctctcccatgtaggagtcagatccctaagcatccagccgtattgtttcaggattatgaggtactgtgaaaaagtgaagagctgaccccctccgcctgctaggaagaagtgagaccagcagggacaaactccatcactcttcatataccaaggattctgttttagtcccctgcctttttttttggcgggggggacaggatctcactctgccacccaggctggagtgcagtggcacaacctcagctcactgcagcttctgcctctggggttcaggcgattcttgtgcctcagcctcccaagcagctgggactacaggcacctgacaccacatctggctaatttttatattttctagtagaggcagggtttcaccatgttggccagtctggtctcgaactcctgacctcaggtgatccatccacctcagcctcccaaagtgctaggattacaggcgtgagccaccgtgcctggccgatatctgtattttttgtagagatggggctcttgctatgttgcccaggctggtctcaaactcctgggctcaagtgatcctcccaccttggtttccaaagtgctgggattaccggtgtgagccagtgagcctggcccattttttggtaacagatttt

SEQ ID NO: 95173 - DNA, 47281 bp, Homo sapiens
  misc_feature (1)...(47281): n = A,T,C or G
gcagagggcaaccaggcggggagggagaggcagattcctcggcagcggttaggaaaacttcacctactatagggtcaaactctgacctacaggggccaggcaggtgacaaatgaacaaagctggctacttctaagataaatgggaccatgaagactgtagtatggcccactggaaaccaccactcggctctagtggatcgatgccatgtgagaatgcaggccccaaagggccagatcatttgagttttcaagagaagccaaaaaaaaaaaaaaaatcagattagtgaaatctcccaatttttacagattgtgtgtcatcccacaaaacatttttctgtggaccagatttggcccttgggccacgtgtttgggacccccaaatctgtgtgcaactgaagagccactgtttggtggatcagccctaagatcagactgaaaacaatgagggaaaacggtccaaacaaaaggcgagcatctaaaagcaaatttaaaagccagaagcaagcaaagcacagtggagagagaggtttcagaaggaggggtgaaatcgcactctaaaatgtgagtgctgctgggtgccagaggcaggcagtgggccagcaaggaggcgaggaagaacatacctttagtgccaatccacagctggtcttgttctagtttaaaggtgagtctcacttttcctccagatttattgtacatgccggacagcggtaccgttggcaggcgctcctgaaggcacgagagaatggtaagagatggagggacagtcagaaaaaaagagaagggggccaagcgcggtggctcacgcctgtaatcccagcacactgggaggccaaagcggtcagatcacctgaggtcaggagttggagactagcctgggcaacatggtaaaaccccgtctctactaaaaatacaaaaattagccaggtgtggtggcacaccccagcctgggtgacagagcaagactctgtctcaaaaaaaaaaaaacagggaaaaaagagaagggacaggattggaggaacctcaagtcagacggtggggctgcctcattttcagaatgctcacaaagaaatccgccttacctgggcccccttaacagatggcatcacatcttcaggttttcctttatccarcactttcctgtgttgctataagtcagaagagagaatgaaatgaaacagctgactacatttcgtcgtgttactattcccttgaaagagaggatgaagaaagccttagtgttttggctcaaaagcttttaatgacgacagactatggatcctttgaaactatagcacagtgctgtccagcagaactttctgggagggcgaatatgttygtacctgtgctagccactacctactgctgtgactattacacacttgaaatgcagctactatgactgaggaactgaattcttaatttcattttaaccagccacatgtggatagctaccatattagatatcaaagttctacagcaaacgggatttccagattgccctcctcccctcaaaaaaaaaaaaaaaaatcaccactgaaatgattaaaccatcaaactaaagagggcgacaaagggtgttgctctcctagcagacaaaaaatggcacccacctttttcaacttaaacttccagagaacactataagatgctggtaatccgtctaactgcctaggaggagcagttcttcaacaaatggagacccagcccatcgccgaagttttccccactgccctacccttaactccagctaaacaggaacctggaagagccacctttcagaaagaaatgcttattactctataacctgacattaagaagcctctaaactccacccctaccacctgccccaagaactctgaggcagctctttaaggattctaagttcagggccccttaaacagttctcctgcctggcccaaatgcctgagtcttctttcttctccatctgtggccttataggcatagccactgcttggaaggctggaactaggggacaatgaatggatagaaggtaacaatttaatcaaatgtaagcactaggcagccacaagccagcccaaatcctcactggcatggtggaatccctctgggaggaataaactcagcactgccagactgctagcaaaaagtcactccagacatcacccccagaccccttaataagctggtaaaaaggcaagggactatatccctctcattaggtcatgtgatgcatcataattggcctcaatgaaacacagcagcatgggctggaagtacaattcgagtcacacctttcaagtaccttttgaacaagatttcctgtactgtggagaacagttctaagcctgttaagctaccattagtaactaaaaacctgtatttaggaggcatgttatgctccaagggtgtgaccattgcgaccactcctatctgacgtgctcacatttcactatttcatacatgtggcaaagaaaaacaggaatatgagaagaaactcaatcggtttcaagacactgagaccccatatgtgggggtgaagtctccaaatcaacaccttttagataattaatataggtttataaccccttatctgaaaccctagagttttgaactttcagggttttggaatttttataaagataatattgctttcaaatacataacaatcttctctgtggggtctggggcagtaccttgtcaccaaagaggaaaattcacactaattctggtcaggttttgctgttaaatttataaaaacacttctcgtttttatactcctttggggttttggaagcacacatgggggattatggatctgtaacacaaactgtgtccttttcttactgttggtcatatatcttagtgtctatggtcactaaatgatgttgattgaagtttatctactctacttcagacacagttgagaatacctgtcttccttggaacactaggaagaacgatcaggaggctacacagcaatcagtataatttgccaggtaaaaagataacaagtaatgattcttacaacctgttccttccatagtaaaataatctcacttttcctcgttacgtgaaagaatgttaatggctatgatgagcacaagacaaggcaggatctcttgcagccaaaagaacagagaacgtaaaaaaccaagctcctatttcacagatcaggacaaaaaaataaataaacaaatccatcagtgtagttgtcttcctactcagcttcatttagcttcctgaaacggtcagctttaggggaacctccgagagttgttgatttccatgcctagccaggcttgttgacttggggaaagccacaaaccaaaaagccaaatgtaagcacttgtacaaaatgagggcttacttctagtactggtagttttctctggcactaaataagagagagaaacccacgtctgattcctttcaacacatggtctgaagcctccctttaccaaggtcttatcctaaagtaggtagacttgagacacactgacccgccagatgagacaaagttgcaaatctcaggtagttgtcacctccactctgcggcacccaactgctgccataaatttccatcatgggccctgtccaaaaaggagcttattctagggagaatataaccagccacggctcaagaggacaaagcctcaaatttctcaagaccaagaagcacaagatggactcactttctgcctgcagagaggctccttcttgttctcttcggcctttgcatcctgctgcgcagcatctttgggtgtgtttactgctaaaacatcattgatggtggagccaaccaccatgatcttggccccactggtcacttttatttctctcaatgttttatcctcggggacgagtcccttatacatgactttctgcatggcaggcgggagaccttgggaaaaggtagaaggtggacagtgaaaggaaggaaggacagaaaaatgtatggatactacacagctctttggtaacagaccaaaaagtgaatactgcctccaccacctattagctttgtgaacttgggagatttacaacctctgaacctcagtttctagaactgtagaagatttattagagtaagtccttctgtacagacctgtttcaaggattaagagaccaatgcggggcatttagtacggtggctagcattgaataattgttcagtaagtactagctctcattctttccaagttgttcctcagtcatctaaatcattcacatattaagtgagaatccacaggcatcagagctacagaagccaatagggacaaaactcctgttcttaatggagattacaaggctacatgtagaaagctttaaaaaaaaaaaaaagttcaaggccaggagtgatggcttatgcctgtaatcccagcacttcgggaggccgaggtgggtggataaaataaaaaaaactagcccggcggggtagcgggcacctgtaatcccagctactcgggaggctgaggcaggagaatcgcttgaacctgggaggcggaggctgcagtgagccaagatggtgccagtacactccagcctgggcaacagagcaagactccgtctcaaaaaaaaaaaaaaataggaaaaagaaaagaaatctcagatggcaaagagctatgaacaaggtaaaattaagaaacagaatcgactgtgaagaaccagcatcaaagtcaatagcagcgtttcctaaacttcacttagaagaattacctaagatatttgctaaaaataaattcctggctacatcccagacccactgaatcagaatctcctgggaaagggcccagaagctgtaaaacaagcgccttaggtgattttttaattagagatgttagagcaacatcaatgagaaactggggcctaaacgtcagacttcggctttaatcccagctctgcaacttactagctctataaacttgagtctctttccccagctgagtaatgggcatccaagtatccttcagaagactgctgtaaggatggggggacctgatgcaaggaaagccaccaggtgcctagtagggtgcaagggccatcaggaggcggggtggggaagactggctgtcagcgccacaggaattacctgtaatcgagtggatcttctgtttcagctcggagcctgtgctgtccagggggaacttcacgtcatgcttggtcttattccagatgatcttcaagtccaccagctccctgcccgcgccgccgcccgcgtcttcgccgttgctgaccgaggcctgggctgcggggtccccagggggctgggccggggccggctgcaggctgcctcgtgcggcgccggagtcctcggccgccgcccccgccgcggcttcagcctccaggcagttgacgggccgcgcgggagcctcagtagccacagtctcggcctccgtgtccatgccaggttcctccatgcctgcaagggggttagggggtgggcgctcgccgcgggctgggcttgggaacggacgctgtccgggcgccgccggacctccgttcccgagccgcggttctccctcccgggccgggccgcatcccccagaggagcgaccgcaacctcagccccggcccggcgcccgccacccccgccgcactcaccatccggggccccggccgccgccatgatgattgtgtacaacacccaccgctcccgcagaggccgctgggaagaggcgagctggctgagattggcccccgcagcagcccctaatctctcacagcccggccggaaacaggtggaggtttctatggagacccgcctcctccgctcccaggtccggcccctgccacgcttycgctttcccaagctgaagggggcgggtccgggaaatagccctttctctggcctctgccccctggtggcgagtgcggccgcagccgtccaggggrgcgtgggatttcgcgctmgggggcctgtgactttaaggggcaaggctgcgctggctgtggcggaggccgattggctggaagcagtccccggaagtgacgcagggagaagccyacgtgtgctattccatcccacatggcggcgctcctgaggagactgctgcagcgcgagaggccttcggcggcctctggccgccccgtaggacggcgcgaggccaacctgggcactgatgccggggttgcggtgcgagtgcggttcgctcccagccccacaggtaaccctggcggacgtgacgctacaggccgaggccccctgtcccgtctccgccccacgartgttcccgaatgaatcctttccggtggtgtcagagtgggcgggcggaggagggttaaggcagcgcgagcccattttacagaggcggaaactgaggtgcaggagcggaaataattcaaattgccaggagtttcttgtgttttttgtgccatcccatctctttcgatctttttttcatgcattccatacatgtgcattgatgayaacctgtgtaacaggtgttgtagacgctgggatacagtgatcattgagaaaggtaggggccttgctctgtggaagtctgcattctagtggctgccgcagacacttataaaaaataagtgtaattttagagtcacatgtgccatgcgggaagtgaaacaggataggagactggggattaagaaggacgctccagaaggctttactgagcaggtaacatttgagctgagmtccaaatgacaagaaggagcaygctatgtgaagcctatagaaggaaccttctggaggccaggcgcggtggctcacgcttgtaatcccagcactttgggaggcagaggtgggtgcatcacttgaggtcaagtggatcacttgagagccgtctgaccaacatggtgaagccctgtctctactaaaaatacaaaattatctgggcatggtggcgcatgcctgtaatcccagctacttgggaggctgaggcaggagaatcgcttgaacgcaggaggtggagattgcggtgagccaagatcgcgccattgcactccagcctgggcaacaagagcgaaactgtgtctcaaaaacaaaaaagaaggaaccttctgggtagaggaaatcgcaggtaccaaggcactgtgctagtgctgttgggagcttagyaagctagagggtgacagaggcccattgtatagcctgttggagatctcgtcagggccttttggttcccaccagtaaggctaccttctacgttctctacacggagtatgcctctcatcccaaatcccaggatgaacatacaaagatctttgtagtaaaatcccagctatacatgacaggatctttctggcaggcagtatagcctagagcagtgcctttcaaaccatctgttgtggaagtgctggttttaaatttccaatcaattgtgtatcaatatttgcacaaaattaatataatgaccagaaaaataaaattttgaaaacatccaaaatacaaaccaatctcattttatttgggttagcagaggtaaaatcattctgccagattgctatgtaagtttcgcctggccaatatggcaaaaccttgtctctactaaaatacaaaaattagccgggcatgtggcccaggcctgtaatcccagctactcaggaggctgaaaatcgtttgaacccaggagaaagaggttgcagtgagccgagatcgtgccaccgcactgcagcccgggtgacagagtgagactccatctcaaaacaacaacaaaagtttctaaacctttactctcagtttctgtacttgattgtgaactgacaactgttttcagaccagcactggattgcacactttgctttgaagagcacttatgtagaatgccaaagcctgggattgcctgggtccaaatttctgtcgtggccacttattagatgtgtaacttactagatgtgcaaattattattgttattttgagacagggtttggctctgtctgtcgtccaggctggagtgcagtggtgcaatctcggctcactgcaacctcagcctccggggctcaagtgatcctcccacctcaacctcccgagtagctgggactacaagtgtgtgaccactacgcccagctaatttttgtattttcttgtagagatggggttttgccatgttgcctgggcggatcttgaactcctgagctcaagtgatccacctgccttggcctccgaaagtgctgggattataggtgtgagccatcacacctggcctagatgtgcaaattatttaatgaatctgagcctcagtttcaccatttgtcaaaacggggctaataataatatctgtcttatggggttaagctcatgcagccgaaccacttagtaaggtctagtacacccagaaagcacttaatacacagcctctattatgatgattgtacttctcatttccttgctcatttgcggggaaagcccatgtgggaaaggcttttgactataaacagataaaagaattatcaggcacagatcattacagtagctgaaattaattgagggtttactttggtcagcatttagacctcagagcaaccctataataaagaaggttcttatttttttgctcttaatccctctgacagatgaggaaatagaagctcataaaagttaagtagagttccttctcaaggggtagcaactaataaatggtggatgcagaatttgaatccaggtgtacttgatgtaagaggctttgttttcagcagctgggttcctcttttgtcttggggactcgtgggactcagtgccactgaataccactggttttctggtgtccttgcagtaactatccgaaggttacacacatcagtgttgaagcagggtcggcctggccccagaagagctttttctctcctctgctgcctcttgtacttgtaaatgtagatgagctcattgtggagacttagggctgtgggctggtccgaagaaggtacggtaagaggtaatgacaactctggaaaagctgttaactttcagttttcagacaggaatgatgaaaaaggcaaatcttaggagtttaaactgatgaagagaaatacagtggaatcaaacactacttttggttagtgtttaaagccagcaattagggtgaaaatcttggcaaggcatggtggctcatgccagtaatcccagcactttgggaggctgaagtgtaaggattgcttgagcccaggagtttgagaccagcctgggcaacatagtgagaccttgcctctgcaaaaaaaaaaccaaaaaacaaatattagccgggcatggtggtgtacacttgtagttccagctacttgggaggctgacgtgggaggattgattgagcctgggtggttgaggctgcagtgagccgtgactgtaccactggacttcagcctgggcaagagtgagaccccatctcaaatttcaaaaatgaattttgtttctttaaaaaagtaaaaatctcaagtagatgaaatttaaaatgtacgacgtggacagtcatgcacactgcatagactgcatatgcaaaatgtgattttttttttttttttggagatggagtctcgccctgtcgcccaggctggagtgcaatggtgcgatctcggctcactgcaacctctgtctcctgggttcaagcagttctcctgcctcaacctcccaagtagctgggattacaggcgcccaccaccatgcccagctaattttttttgtggtatttttagtagagacggggtttcaacatgttggccaggctggcctcaaactcctgactttgtgatccacccgcctcggcctcccaaagtgctgggattaaaggtgtgagccaccatgccccaccgattttttttttctttgtagagacaggatctcacaatgttgcccaggctggtctcaaatttagagacccaggtgatcctcgtgcctctgcctccaaaagtgctgggattagaggtgtgagctactgcacctggcccacaatatgattgtacagtattttaaatttctagtttgtttgtaattaatttttttcccagcgcacatcattgaatttctgtaagttaaatgtacatgatatggcctcaatgaataactctctgcttctctttcaggcgaaacttggccttgagacaaatatcaaaatagagtggtggatgcagttggggaaaattggagccttttaataaaatgacatgctccaaatcctgggtggtttccattttcaggatgagggattaaatgtgtctggagacagggcacaggggtaactagttcttagtctttgaaaaaaaattttttaatttttaattttttttgtttgagacagagtctcactctactgctgcccaggctggagtgcagaggcgtgatcatggctcgctgcagcctcagcgtccccaggctcaggtgatcctcccacctcagtaactgaaaccacaggcatgtaccaccatgcccagctaaatttttatattttttgctaagacaaggtctcaccatgttgcccaggcagatctcaaactcaggccaagcacaatggctcacgcttgtaatcccagcactttgggaagccraggcagatggatcacttgaggtcaggagttcgagatcagcctgaccaccatggcaaaatcctatctttactaaaaatacaaaaattggccaggtgtgatggctcttgcctgtgatcccagcacttgggaggccgaggctggggggatcacttgaggccaggagttcaagaccagccttgccaacatggcgaatgcctgtctctaccaaaaatacaaacatgtagctggacgtggtggcacacacctgtaatcccagctactcgggaggctgggcatgagaattgcttaaacacaagaggcagaggttgcagtgagccaagactgtgccactgcactccagcttgggtgacagagtgagactcttgtcttaaaaaacctacaggaacctcctgggctcaagtgatccccccggccttggcctcccaaagtggtaggattacaggcgtgagccaatgtgtcctgctggtcttttaaatttattgcaacattctgtcacagtagtgcttacttgccccttgctgaggcctattagcttatcttccctgtcttatctgagctgttctcttctccaggcttcttgcacctgggtggcctccgcactgccttgtacaactacatctttgctaagaagtaccaggggagcttcatcctgaggctagaggacacagatcagactcgcgttgtgcctggggcagcrgagaatattgaggacatgctggagtgggcaggtaagcctggcagagaaaggatctttctgcagggaaggaacaggaagcaggaaaaggagcctgtgggtcttctcatggagttctgagtggaaaatggggagttcctggagaagtggctacatttgtactgccctgcccggggtggcagatgacacctgaaaaaatgccgaagctctctgaaacacagctccaagactggtttctttatttttatttatttattgtttttgagacagagtcttgctctgttgcccaggctggagtgcagtggtgcgatctcggctcactgcaagctccgccttccgggttcacgccattcttctgcctcagcctccaagtagctggaactacaggcgcccgccaccacgcccggctaagtttttttgtatttttagtagagacggggtttcactgtgttagcaaggatgatcttgacctcctgacctcgtgatccacctgcctcgacctcccaaagtgctgggattataggcatgagccaccgcgcccaacttggtttctttattttttaattttttagagtcagggtctcattttgttacccaggctagagttccatggcacaatcataacttactgtagcctcgacctgggctcaagtgatcctccaccttagcctcccaagtagttgggactacaggcacgcaccaccacgcctggctaatttttaatttttttgtagagatgagatctcactgtgttgcccaagctattctcaaactcctgggctcaagcaatcctcctgctacagcctcccaaagagctgggattacaggtgtgagccactgccaaggctgttttgagattcctgttttcacctcagaatctcaagttcattccctacaggggccaggcaggaaacacagggccaagtgggaactggaggagctgggccagtgctgagctgtgaaaaccacacctcatccagagttgggagtgcctctgagctccagctccttgtgcccatgcgggaatgctggcccagcttgtccaatcctctgagttgcaagaggagccagaaatccagtttttctggatgaatacttaaccattattaaatctgggctcagattttttttaaccatgttgtataagccacacaaaacacgtacagcttctgaagttgatcttgtgggaagttttatcctgaggacagctaaggtcagggagaacaaagaggagtgtgtttccttttcatgggtcgacagttgtctacctgtatggacgggtgtgactaggaaaggggagattcccaaggaaaaataccaagactctgctagtctagagattgaaaaaaaaagaaagaaaaaccccaagactattttgagatgtgtgttctaatctcaggtaaattactcactaaactctggattcctaaagagtataaaatggttggccgggcgtggtggctcacgcctgtaatcccaaaactttgggaggccgaggctggygcatcacgaggtcaggagatcgagaccatcctggctaacatagtgaaaccccatctctactaaaaatacaaaaaattagccaggcgtggtggcgggtgcctgtagtctcagctactcaggaggctgaggcaggagaatggcgtgaacccggaaggcggagcttgcagtgagccgagattgcatcactgcactccagcctgggtgacagagtgagactctgtctcaaaaaaaaaaaaaaaaaaaagaccatgtgcttagtgccaagggaaaagacagatgagtggattaattatttctttttttttttttttaacaaacaaaatcttgctctgttgcccaggctagagcgcagtggttcaaacacagctcactgtaatctcaaattcctgagctcaagggatcctctcaccttagcctcctgggtagctggcaccatagctgtgtgccaccatgcccagctaattttattaacttatgtttttgtagaggtagggtcttgctatgttgcccaggctgctgttgaacccctgacctcaagttaattctcctgcctcggcctcccaaagtgctggcatcacggtcatgaaccatcgctcctggctcctaattcattcttcataggatactaaatgataataaccagtatggagaaaagagtaacaggcttagaaactagggcgagggatgcccttgtagatagggcagttttctcttaggaggtgatgctggagcagagacctgcatgaagtgaggagccagccccgtggtgacctgggggaagaatgttcaaagcaaaaagaatagccaatgcagaggccccacagcaggagtgttctagatgtatttgaggagcatcaaaaagaccagcttggtctaaccatagtgagcagaatgaccagggatgtgaggatagaaggcttgccaggtcgggcacaggggtacacgcctggaatcccagcactttgggaggccaagaagagaggatcacttggacccaggagtccaagaccaacctgggccacatagtgagacctcatctctacaaaaaattacccaggtgtagtggtgcactcttatagtcccagctacttgggaggctgaggtgggagcatcacctgagcctggggaagttgaggttgaggctgcagtgagctgtgatcatgttacagaattccttcagtgccactttgccagccagaaatctctgcagctgccctcacctctgtcggkgcctcgcttgggccttctgggcccatttggcccagcaggctgcacttggctcatgcccacttggatcccacacctgccatggctccacactcagcccatggctggactgggtgtgccacgagtggcttctgtgttgggtgctggcatctagatgaggggaacatggtggcacccaaaaacttgggaaataccatcagttgtggagctccaaggggtgttatagctcttgtttggggagtcctgagatctgagtccccagcactgtctcagctcttcactcctgtagcttggtgagtgggagcgtgttacagctctctttctcctgtagtctggtgagcgggagcgtgttacagctcttttattcccgtcaccygcagcttggcgagttttgggttcttgtcctgcaaccaagaggaatgaggtgtgcaggtaccatagagtgagtaaggcagagaagaattttattgaatgacagaagggaaactctccactgcgagaggggaccctgaaagtggtagccatctgtgaggctgagtctatcatttttatgggcttagaatgggggmrtgcctgccgattggtccatgagtggtcttggaaaaaggaccattcagttggttaaaacatcatccggaaggaaccaatcgagagagtgggtgagacagggaaacaagttctcactccagtcatggactctatcctgacttgacagtttggttttcaggctgtctttggcttagaagtcagatttcaccagggacctgtccctgactgcctaggaatttgtctgtctcctgtcagtcatgccattacactccagcctggagcgacagtgtgagaccctgtctcaaaaaaaaaaggctttccaggagccagattacatggtgcctcacagaccaagatgaaggcttcagtttcacagaggatctgctacttatcaggtaccacgccaggcatgagggatacagtgatgaacaacggtgatggtggcgggtcccaccctcgtggaattcctggggcagcatcattgtgagaatgaggcttgcagcccagagcttgtcccccaccctggtgttttggcgaggcagagggcaggtattcaggcacctcatggtggctgacttctggagcaccttactttgggagtcattctttcttttttaatttttttcattttatttatttatttatttatttatttatttatttatttatttattgagatggagtctcgctctgtcgcccaggctggagtgcagtggtgcgatctcggctcactgcaagctccacctcccgggttcatgccattctcccgcctcagcctcccgagtagctggaactacaagtgtctgccaccaagcccagctaattttgtttttgtatttttagtagagacggggtttcactgtgttagccaggatggtcttgatctcctgacctcgtgatctgcccgcctcagcctcccaaagtgctgggattacagacgtgagccaccgcgcctggctattattattatttttttagaggcggtgtttcaccatgttgcccaggctggtttcgaactcctgagctcaaatgatccacctacctcggcctcccaaagtgctgggattacaggcatgacccagcatgcccagccttttaaaaataatgacatataagcaaggcgtggtggctctcacatggggtggctcttgtctgggcaggcggatcacaaagtcaggagttccagaccagcctggccaacatgttgaaaccctgtctctaataaaaatacaaaaattagttgggcgtggtggcacatgcttgtaatcccagctactcaggaggctgaggcaggagaattgcttgaaccgggaggtggaggttgcagtgagccgagatcgtgccactgcactccagcctgggtgacagagctagactctgtcttcggggaaaaaaaaatgacatataattcacatgatatgaaatttaccatatcaaagtgtacaattcagtggttttcaatatatttactgtgttgygcaaccgtcaccactaattccagaacatttccatcacccctaaaagaaactcttccttattagcagttgttttccattctaccctctcctaccacctggcaactactgatctctttctgcctccatggatttgcctcttctggacgtttcatatgaatgagatcatataatatatggccttctgtgactggcttccttcacttaccataagcgcatctgtgggctatcatgcttcattcctttttatagccaaataatattcatcatatggttataccacattttgtttattcatcactagtgaatgagcattttagttactctggtttttggctgtccaataaaactctatgaacatttacatgccagagtttaagttaacatgttttcagttctcctaggggagtccctcttaaaccctggggcattccaagataccacattaaagagacttgtttagcattagatcaggaagggatccccccaaatttacccgatttagccctcctttctgacaaatgaagaaatggaggtcccatgagagggagccaagtaacactgataatcacagatggctgggtgccatggctcacgcctataatcccaacactgggaagccgaggcaagaggatcacttgagcccaggagtttgagaccagcctgggcaacataggcagaccttgtctctatagaaaacttaaaaaaagttagccaggcctggtggcatgtacctgtagtctcagctacttgggaggctgaggtgggaggatcacttgagcctgagaggttgaggcttcaattagccgagaacgtgccactgcactccaacctgggcaacagagtgagaccctgtctcaaataaataaatacataaataccaaagcatagagagcaccggtcacaggccacttgatgagtactttacttagatcatcttactctagtctcatgatgatcctcrtgagaaagttactacttgtttccttctttgacagatgagaacccagagcccagaaagatgacttgcccaagrtctctgagctggctggtacgtttgaacccaggcccactcagctcagtttgtgttagcattgagggtagcaaggtgaacaatgtccttatcttcccaattcctttgaaagctctttgagggcagaaacaccatcttccagttcttgtgtccctgtgccctctcctgaaagcattcataatgaaatttatcctatgtaatcggagggaattggactttgggtttggggtttggcttacagtagatcatatttaatctattctatagcatatattgaaactgtcctaaatatacaccactgggctaagtgcttataagcactgacacatttgttctcacaattccctctgcacaggaggctgctagctccacttttcaaaagaggaaactgaggcttagaaagattaagtctagctgggcatggtggcacattcctataatcccagctactygagaggctgaggtgggaggatcacttgagcctagaaattggagactgtagtgagctatgattgcactactgcaccctagcctgagtgacacagcaagactcgctctctactaaaaaaatagccagatgtggtgatgtgcacctgtagttctagctactcgggaggttgaggcaggagggtggcttgagcccggaagttcgaggctgcagtgtgctatgatcacaccactgcactccagctgggtgatagagtgagaccccatctcttagaaaaagaaaggctaagtaacacaaacagcagtgtaatgagtggttaagaatatcggctccggtgcccattagtctgggtttgaagctgatygtgccccttctactcggccaggtgacaaagcatctctgtgcctcagtgtcctcacagagtgggggaataaccgcacctacctggtagggtgggtttgaggcttcagggaaaagtgtcttttatggcactcagcaccctggtgctcacacgttggtagcacctcaggatcccttgtcacagctactaagtggcagagccatgagtcccaccagggcctgatgggctgttctctgaaccatgcttttttctcctaagtcagctgttcccaggcctgggcttgtttctccctctccagggaatcccatcagggattgagaggacatacaattagggatgtggactttggaacccgtacacctccgtttgctccttagtccatgagcccatgcgactttgagtgcttcacctctctgtgttttaacttttcatctctaaaagggacattgggccgggtgcagtggctcacgcctgtaatcccagcactttgagaggccgaggcaggtggatcacctgaggtcgggagttcaagaccagcctggccaacatggtgaaacgctgtctctactaaaaatacaaaaattagctgggtgaggtggcacatgcttgtaatcccagctattcgggaggctgaggcaggagaaccgcttgaacttgggaggtggaggttgcagtgagctaagattgcaccactgcactccagccttggcgacatcagagcaagactctgcctcaaaaaaaaaggcggcggggaggacattgtactaatgccaacctcatggattgttatgaggattaaagctttaatatgtgcataaagtgcttagagcaatgcctgagaacgagcgctgtgtgcaccttagctgtcattattccctgtgttccaggcatcccgcctgatgagagcccccgccggggcggtcctgctgggccctaccagcaatctcagcggttggagctgtatgcccaggccacagaagcgctgctgaagaccggagctgcttacccctgtttctgctcaccccagcggctggagctcctgaagaaggaggccttgcggaaccaccagacgccccggtaagaacctcagcttgttgcagatgcctcatcaacattgggtgtgtttgttaccttgtgctgcgtaagaaattcccctaaacatgtattacctctcagtttctgtggrtcaggcatctgagcgtggcctcacctgtttctttggctcagggattctctcaaagccacaagcaactacaggtcctagccagtcctggagttctcttaaagcttagcttggggaagatctacttccatctcctctcagaaggctattggccaacctcaggtccttgctagctgttgcctggagacatcagttctttgccatgcgagcctctccatagagcagcttacagcgtggcagccagcatttctcaaagccagccaaggagagagtgagcacgtacgagctggagtctacctagttgtggaagcaacttctcaccacttttgttttataggctatgtattccttctctggaacgcttgggaccagaagtgttttggatttcagattttttgcatattgaaatatctgcatatatataatgagatatcttgggggtgggacccaagtctaaacatgagattcatttatgtttcatgtacgccttatacacataggctggaggtgattttatgcaatattttaaataattttgtgcacgaaacaaagttttgactattttgactgtagcctgtcacatgtgtttgggtgttgtattttccacttatggcatcatgtcagcactcaaaaggtttcaaatgtcagatcagttgtggctttttttttttttttttgagacagtctcactctgtcgcccaggctggagcgcagtggtgcaatcttggctcactgcaacctctgcctcctgggttcaagcagttatcctgcctcagcctcctgggtagctgggactacaggtgcccgccaccacacccatttaatttttgtatttttagtagagacgggtgtcactgtgttggccaggccaacctcaggtgatccacctttctcagattcccaaagtgttaggattataggcgtaaaccaccgtgcccagccagatcaggttttttggttttttttttkttgttgttgttgttgttttttttcatagagtcagggtcttactttgtcacccaggctggagtgcaatggtgtgatgttggctcactgcagcctccaactcctggactcacgcagtgcccccatctcagcctcccaagtaactaggactgtactcctggctaatttttttttttaaacttttcataaagatggggatctcactatgttgcccaggctggtcttgaactcctggcctcaagcaatcctcccaccttggcctccyaaagtgctgggattatagatgtgagccactgcacctgactttttttttttttttttttttggtgagacagagtcttgctctgctacccaggctagagtgcagtggtgcaatctcagcttactgcagtctccacctcccgggttcaagggattctcgtgcctcagcctcctgtgtagctgggactacaggcacatgccaccacacctggctaatttttgtgtttttaatagagagagggtttcgccatgttgcccaggctgttctcaaactcctgaactcgaacaatcttcccacctcagcctcccaaagtgctgggattacaggcgtgaaccactgcacctggaccattggagcatttcagattaggcatatttggcattatttttgttcattagacaaaagtcactaggcccagcccacactcaaggggaggggactacacaaggacagaaacaccagaaggcgagaatgactggggctatgttagaagccaagatttggtctcagaaagtaatgtgtaaagtaattttaattatttgttatttttaatgagcaaggtccacaggccggacgtggtggctcacgcctgtaatcccagcactttgggaggctgaggtgggtggatcacgaggtcaagagttcaggaccagcctggccaatgtggtgaaaccccgtctctgctaaaaatacaaaaattagctgggcgtggtggtgcgcatgtagtcccagctgctcgggaggctgaggcaggagaatcatttgaacccaggaagtggaggttgcagtgagccaagactgcaccactgcactccagcctgggcgatagagcgacactgtctcawaaaaaaaaaaaaaaaaaaaaaaaatgaaaggtccacaaagggccaagtatggtggctcacgtctgtaattccagcmctttgggagggcggaggtgggcagatcacttgaggtcagaagttcgagaccagcctggccaacatggtgaaaccccatctttactaaaaatacaaaaattaggcctggagtggtggctcatgcctgtaatccccgtacgttgggaagccgaggtgggcagatcacctgaggtcaggagttcaagaccagcctggccaatatggtgaaaccccatctctacaaaaatacaaaaattagctgggcatgatggcgggtgcctataatcccagctacttgggaggctgaggcgggagaataatttgaacctgggaggcgaaggttgcactgagctgagatcatgccattgtactccagcctgggcaacagagcaagactccatctccaaaaaaaaaaaaaaattagctgagcttggtggtgcacgcctgtaatcctagctacctgggaggttgaggcactagaatcgcatgaacccagaaggtggaggttgcagtgagctgagattgtgccattgtactccagcctgggtgacagagggagactgtctcaaaaaaaaaaaaargaagatccacaaagatatatattgaaagaactctcttccaatcttgactctggccactcaattctgctctccagagataaccagtgttaaaattttcttatgtctcctccagagacattcagtacatatacctataagtacatattattttctctttttccttattcacatggtagcatgcaatgtactatgtacatgctatgtggtgcaatttaccatgtccgcttaccatcttgaggatcagatatcagtccataataatgcataatattccatttgtggatataacttcatttacttaatcagtttcgtcttaacaaacatttatttttgttttgttttgttttgttttatgttatgttgtgttattttagaaatggagtcttgctctattccccaggctggagtgcagtggcaagatcttggctcactgcaatctccatctcccaggttcaagtgattctctggcctcagcctcccgagtagctgggattacaggtgcccgccaccacaccctgctaatttttgtatttttttggtagagatggggtttcaccatgttggtcaggctggtctcaaactcctgacctcaagtgatctgcccaagtgatcctcaagtggcctcccaaagtgctgggattacaggcatgagctacgacactcggccttaataaacctttatgttatttatttatttatttattttttggagacggagtcttgctctgttgcccaggctggtgtgcagtggtgtgatcttggctcactgcaacctccacttcctggatacaagcaattctcctgtctcagcctcctgaggagctgggactagaggtgcatgccaccacacttggctaatttaattttcttttatattttagtagagacggggtttcaccgtgttacccaggctggtcttgaactcttgagctcaggcaatccacctgcctcggcctcccaaagtgctaggacgagctcaggcaatccacctgcctcggcctcccaaagtgctaggactactggcatgagccactgcgctcagcccaaacctttatgttatttctaatatttggttataaaagaagagagctgtgatgactaatgttgacatatgtcattttgcacttgtgcagtatgtttgctgaataccttcctagaggtggaattgcagagtcgagttgtagctttgatggatactgccaagtggctggccctttacttgtttacactcccatctgcaatagcattgtaacatttacattgcagttccagtgaactatttggtcaagggctcagctgtttggccaaggtcatgacgtttacggtgacattgcctttttattataaacaatgtatttgtctcttgacagaatattttttttctcatctcattctgtgacccaggctggagtgcagtagcatgatcacagctcattgcagccttgaatctcctgggttcaagcaatcctacatcctcagcctctcaagtagctgtgaccacagccatgtaccaccacacacagagtgttatgttttgttttgttttgagatggggtctcactctgtcacccagattggagtgcagtggtgtgatattggctcaaggcaacttctgcctcctgggctcaagcagtcctctcatctcagcctcccaaacagctggaaccacaggtgtgtgccgccatgcccggcaaattttttttgtattttttggtagagacggggtttctccgtgttgcctaggctggtctcaaactcctgagcataggagatccacccacctcagcctcccaaagtgctgggattataggtgtgagccatcatgcccggctggcacacagctagtttttaaatttttgtagagatggaattcccctattttgcccaggctggtatgaaactcaagcgatcttcccacctcagcttcccaaagtgctgggattataggcatgagccaccatgcctggccaacagatttttttttttgttaaattatagtcatgccctgttgtggaatccttgcagccatttatttatttatttattttaagctttcaggatttgtattaaatcctagtctartttaacrgtatctgatgttacacacatcatctcatggtgaacgtgtttaataagcgaaagcaaatcagacagcttatctaagtcgttattttttgtggactaaacagtaaggtaacaactacccagaaccctatgggtcatgatggacacttgctcagttttcatacaagctgtgttggttatcaaagtatatctgctaatatttaataaagtgaaatgtcattggggtggaaaagtcaagcctagacatttggttggaaaagaacagatcaagtatggatttcacaaaccaaaagtttataaactcaatgcaatacaagtcctttctattgtaaaagcttagttgaaactaaaagatctgtaaaaactattactttgggccttaaacagtactagctcttatgagcaaaaaaaggacacaactgcagcctgggcaacgtggtgaaaccctatctatattaaagtacaaaaattagctgggcttggtggtgtgtgcccataatctcagctacttaggaggctgaggcaggagaatcagctgaactagggagatggaggttgcagtgagctgagattgtgccactgcactccagcctgggagacagaatgagaccctgtctcaaaaaaaaaaaaaaaaaaaaaaggaggggggccataactgttgagaatgtattacttggttttattttacattaggtggtaggtacaaagcaatccttcttaataaagctgacagttagcttcccttaggacttttttttccagacagggtcttgctgtgtcacccaggctggagcgatgcaatcatgactcaccacagccttgacttcctgggctcaagcaatcctgcttcagtctcccaagtgggtggaactacacacatgtacccaccatgcccggctaattctttttttttcttaaatttctagtagagacaaggtctcgttacccaggttggttttgaactcctgggctcaagcagttctcctgccttgtcctcccgaaatgctgggattacaggagtgagccaccgcacttggacagaacatattcaataatgcacatttaaaacaagtattcatcttacaagttgttctgtaatccaaacatatgacagcttggagaacaacatttagaaaacagaagccaatgtaaaaagacagattaatacaactagaagccaggcacggtggctcacgcctgtaatcccagcactttgggaggctgaggtaggcagatcacctgaggtcaggaattcgagaccagcttggccaacgtggtgaaaccccatctctgctgaaattagctgggcatggtggcgtgcacctgtaatcccagctacttgggagcctgggaggcagaggctacagtgagccaagatcacgccgctgcactccagcctgggtgacagagcgagactccatctcaaaacaaaaaacaaaaaaacccaactaggatagtgtaggttttgtatggctcagactttacagttttcttactgcatcatcaatgtatcgatagaatatctgttccagctaggtgcggtggctcatgcctgtaatcccagcactttgggaggccaaggtgggcagattgctagagcccagccttcgcaacatggtgagcccccatttctactaaaaaaaatacaaaaattagccaggcatggtggtgcacgcctgtagtcccagctacttgggaggctgaggtgggagaatcactttacccttgggaatgtctaggctgcagtgagctgtgatcactctactgtactccagcctgggtgacagagtgagaccctgactcaaaaaaaaaaaaaaagaaagaaaaagaaaagaaaagaaagaaaccctgtctctactaaaaatacaaaaaattagctgggtatagtcgtgcatacctgtagtcctagctgctcgggaggctgagatgagagaatcacatgagcccaggaagtcaagactgcagtgagccatgattgcaccactgcattccagcctgatcaacgagagtgagaccttgtcccctgtctcagtaaatgaatgaatgaatgaatgtttcttcagctggccccattgctgtggatttaaagaaataccttttcttcctggttttatttaacctttgagatccatycaataatctctaataccatcaattagcacttcccctttaacatcccaaacactaaggtacctcattttcccaatctgaaacatgttatcagctgagtacagtggcctgtaatctaatcacagcactttgggaggctgaggagggtggatcacttgagactaggagttcgagaccagcctgggcaacatggtgaaaccccatctctatatgaaatttaaaaaagaaaataaacatgttattatgtttactgccgctgctctgtttggaagatgacagagctcccaaagttttgccagtcttttgttcctttacaagtttttctggagcaacttactttttcttctttaactttttgtcaaactcactgtcagaattcctgccagaagagcttgaagaaacaagttcctttgattcagacataatgctgccctgcttctgcagctgaacaccctcctgttcactcatgtgcaactgactcatttgtaaaaatttcttttttggccgggcacggtggctcacacctgtaatcccagcactatgggaggccgaggcgggtagatcacgagatcaggagttcgagaccagcctgaccaacgtggtgaaaccccatttctactaaaaatataaaaattagccggttgtggtggcaggcacctgtaatcctagctactcaggaggctgaggcaggagaattgcttgaaccctggaggtggaggttgcagtgagtcaaggtcacgacactgcactccagcctgggtgacacagcgagactctatctcaaaaaaaaaaaaaaaaaagaaaaaaaaagttttttttttgagacagggtctcgctgtgtcacccaggctagagtgcagtggtgccatcatagtttactgcagcctcaacctcctgggctccagtgattcttccaccttggcctcccacagagctgggactacaggaatgcaccaccacacctggctgattttgttttgttttgttttgtagagacagagtctcactatgttgcccaggctggtattttaaatttttaaataagagacaggattttgctatgttacccacgctggtcttgaacccttgaggtcaggctgtccttctaccttgacctcccaaaacactgggattacagacgtgagcaactgtgtccagccctgtgcaccatttattgattgattgaacacttagctgtggcaaagactaaccttacaagcattccatctgtgtctcagaacgcttttgggtgcagttagtggaataccctgttagaagggacaaacgatactttaactcacagatggatcacctggggacctagttaatgttcagattctgactcagtaggtctggggtggagcctaagagtctgcatttctggcagactcccaagaggctgatgctaggggcccacagaccacactttcagtagccagggcatcaatcatagacatttgtcttttgattctgcacaaggctggaggtgggtgactccaggatgagactagcagtgtagagacaccagggctctattttggcttctctctgacttcattgccttccctcctgcagttgcaagtagctgccgcaggtccaagcatgctccccttacaggacaacatccaaagaggacagaagtggggcagtgggaaattttaagaagggattttcctcctgtggctttctcttcttgtcctttggagagaaaaacctttcccggaaccttaaacctttcttactccccaggcatgcttttctttgcatcccagtgactaggatggggttacattcctgcctggactggtcactggcatggagcaataggattgcaagattggctataccaatcaggattcaacccctcggactaagcattttgctattttcttgttagcaaggaagaagcgtggaatggctggtagataggcagacattagtgtctgctacaccatgttatctcagttttccacacaactgtaccatcatccctgttatagactgaggaagcagcttgcagcagtaactgacttgcttaaggtcacacagctatgacagaggtaggactcctgtccatcaacctttccatcaacagtactcatgctgctctgctccccatcaggtatgacaatcggtgcaggaacatgagccaggagcaggtggcccagaagctggccaaggaccccaagcctgcgatccgcttccgcctggagcaggtggtgccagccttccaggacctggtstatggctggaataggcatgaagtggccagcgtggagggagacccagtcatcatgaagagcgacggcttccccacataccacctggcctgcgtggtggacgaccaccacatgggcatcagccacgtgctgcgaggctctgagtggctcgtctccactgccaagcacctgctcctctaccaggccctgggctggcagccaccccacttcgcccacctgcccctgctcctcaacagggatggcagcaagctctccaagaggcaaggggaygttttcctggagcactttgctgctgatggcttcctgcccgattccttgttggacatcatcaccaactgtggctcaggttttgcaggtacgtgcccacctgaatagtcctggcagcagagagcatggccaggaggagcagggctttggctcagacagtcctgctctttggtcccagctttgccacctaccagccaggtgaccttggacaagtttattcttttattcaataaatgtttattttgccagacaccacattaagtgctggggctacagtagtgggtgagatagacatgatccctgccctcaagggacttatagtctctgagcctcagttgcatatctggaaaatggggataagtgtctacctcattgggttaggattcactgagctcaggagtgtaaggtacccagcccagcacctgtcacactgtaagcacaaaaaatgacagaccctatgattgtgacaattattacaagcatgtatgctaacagtatgactagaattaatatggatttagtttctttttttccttcttcattttactgccagatgaatctagtttatttcaagctgagcacttayccatggtccaagacttagacccaaaccttgaagaagcaagcatcaaataggatgacctgaaggatttctgaaaatgtgtccagaatagcctgcctgctggtctcatttcatttaacacaacatactattaaggggtagatacatatctccactgtttgtaagaggattgtgaagctcagagaagctgagtaacttgccaaagtcacacacctagtgagggatatagcgctttmggcctatgcctgatcacgatgcctgctgaccgtatgggactgagctgctgctcacaagaagcagctcccagcactacggttcttaacttttttttttttttttgagacagaacttcttgtcccccattctggagtgcaatggcgcgatctcggctcaccgcaacctccgtctcctgggttcaagcgattgtcctgcctcagcctcccgagtacctgggattacaggcacccgccaccacgcttggctaatttttgtatttttagtagagatggggtttcaccatgttgtccaggctgttctcgaactcctgacctcaggtgatccacccgccttggcctcccaaagtactgggattacaggcgtgagccaccgtgcctggcctggttcttaactcttgatcgtgctttggaatcagctaggaagcttctaaaatatgctcagaccccaaccaaacccagttgactcagagtctctggtacagccaggcaatgggcgtactgttctgcagctcgtgtcttgagagtaatggagatgggtttagcctgattgttttcagacctttttttctttaatgatggaaccctttctgaaaatgaaagctcattcaggctcttgatatataaatagctagaagttaaatccctttgggcaaagtggaatggggggcccagggcttgctcactcagcctcccttatgtttgaaagtagaaggagggcgggcacagtggctcatgtctgtaatcccagcactttgggaggccagtgcaggaggatcatttaagcctgggagtttgagaccaacctgggcaatatagtgaaactccatgtctacagaaaaatgtatgtatgtatgtgtgtatgatgtatttatttgatagagtctcgctctgttgcccaggctggagtgcaacggcacaatcttagctcactacaatctccgcctctcaggttcaagtgattttcctgcctcagcttcctgagtagctgggattacaggcatgcgccaccacacctggctaatttttgtatttttagtagagatgggtttcaccatgtttgccaggccagtctcgaactcctgacctcatgatctgccgacctctgcctcccaaaatgctggtattacaggtgtaagccaccatgcctggctctacagaaaaatttaaaaattagccaggtgtggtagtatgtgcctgtagtcccagctacttggaagacaggctggaggattgcttgagcctgggagtttgaggttacagtgagctaggattgtaccattgcactccaacctgggcagcagagcaagatcctgtctcttaaaaaaaagagataaagtggaaggaggaagggagagaggaagctgagtggctgggcctctcttctttgcagagaaccaaatgggcaggaccctgccggagctgatcacacagttcaacctgacacaggtcacctgtcactcagccctgctggacctggagaagctcccagaattcaacaggtgagtggggagcatggagatcccctggtggcaaagggctttcttgcttatgatgatccctacagcagagggtataatgggctctggtacctaattctgtgtgaccatggctaaatcacctagcctctttgagcctctgttttctcttctctaaartgggattaataacagtactgatcttatatccttgttctatgaaagtatcttgtattaagtgttgcatgaaaatatcttgtatagccctggcacatacaaagtgctcagtaaatggtacgtatatttttatcattaacattatgttcctagccaccccttgcatggactctgttaacaaccaaagcctggagaggtgtatcttcattttagactccctccccaccctcagccttacatccagccaacacagtgagtgagcactgtctcatggcatctactttatatttcatgtatttgatattgcaagtagctcttcacttggaaacctccaaatatcgttccaactcagatcatagttaacatgtctgagtcaaagggtattagtgtcggctgggtgtggcggctcacacctttaattctagcactttgagaggccaaggttggcagatcacctgaggtcaggagttcgagaccagcctggccaacatggtgaaaccctgtctctactaaaaatacaaaaattagctggacatggcacatgcttgtagtcccggctacttgggaggctgaggcacgaggatcacttgaacctgggaggcagaggttgcagtgagacaggatcacaccactgcactccaacctgggcaacaaagtgatactctgtctttaaaaaaagttattagtggtttgyaagaccatcagccaggtgtgcacctggggtgagggtcttcctgatactttgcctagagcactggtttggggacacagtatcagtgcatttacttgcatgagcccagagaattaacatcagttgcagatattttagggctattactttatttacttctcccatcagacctatgaggtcagttgtatgattttgccctgtttcacgtatgaggaacccaggacatagagaggttaagaaactagccaaagtggccaggcatggtggctcacacctgtaatcccagcactttaggaggccgaggcaggcagatcacaaggtcaggagatcgagaccatcctggcgaacacagtgaaaccccgtctctactaaaaatacaaaaaacttagccgggtgtggtggcgggcacctgtagtcccagctactcaggaggctgaggcagaagaatggtgtgaacccaggaggyggagcttgcagtgagccgagatcgctccactgcaytccagcctgggtgacagaacaagactccgtctcaaaaaaaaaagaaagaaactagccaaagttcacacagtaaacagtgggcatcttttgaatggggcattcaagagtggatgtaggctgggcgcggtggctcatgcctgtagtcgcagcattttgggaggctgaggcaggtggatctcctgagtcaggagtcgagatcagcctggccaacatggtgaaaccacatttctactaaaaatasaaaaaaaaaaaaaaatcagcccgacgtggcgggcgcctgtagtctcagctactcaggaggctgagacaggagaatcacttaaacctgggaggtggaggttgcagtgagccgaaatcacaccattgcactccagcctgggcaacaagagtgaaactccatctcaaaaaaaaaaaatgcctctttctatatattttagtggctgggtctcgccctgtcacccaggctggagtgcagtggtgacatctcggttcactgcagcctcagactcccaggctgaagtgatccttccccctcagcctccagaccagctgagtctataggtgtgtaccaccatgccaggctaattttgttactttaaattttttttgtagagatggcatcttaccatgttgctaggttggtcttaaactcctggcctcaagtgatcctcccttcttggcctcctaaagttctgggattaagtgagccactgcacctggccaaaagcttctccaggtccagcaggactgagtggcaggtgacctgggaagcggaggttgcagtgagcggaggtcgcaccactgcactccagcctgggtgacacagtgaggctccgtctcaaaaataaataaataaaaataaaaggtcagctactattttgaaaacactgaaagcgtggctgggcatggtggcccacacctgtaatcctggcactttgggagcccagctgggtggattgcttgttgttgcctagcctggacaacatagcaagaccctgtctctacaaaaaactaaaaaattagctgggcatggtgatgtgtgtctgtgggcccagctacttgggagggtgagatgggaggatcgcttgagcctaggaggtctaggctgtagtgagccatgatcgtggtactgcactccaacctgggcaacagagcaagactctcaaacaaaaacaaaaaccaaacccctgaaaagaaagcacgtctccgagttgcttgggactttcaggctgtttgtgaccttagtcacatccctttctttttataaacgtgaagagattcttctagcttgcgaaagggagggctcatgggacctgatatgtcattcttccaacttcaccctttccctgggggagagacggtttgggtgggttggggtgttgacagcagggcagccccttgatttcttcygcagactgcacctccagcggctggtgagcaatgagagccagaggcgccagctggtggggaagctgcaggtccttgtggaggaggcctttggttgccagctgcaaaacagggatgtcctcaacccagtctacgtggagaggatcctcctgctgagacaggtgtggtgtcaggaytctgggaagctgagggaggggttactgggtgcctcaattcctcctgccttccagagccctgtccctagtgcattcaatgactgcctccttccccagggtcacatttgccgcctgcaggacttggtgtccccagtatactcttacctgtggactcgccctgcagtaggtcgagcacagctggacgccatctcggagaaggtggatgtgattgccaagcgtgtgctggggtgagtacccgcaggctgagctcarggttccacaccctccttccctctctctgtcccatggmtctctttccttcagggctgggctgttggggccccagcacaactccatggccagtgaagaagtgmcccttcactggctttcgctggtgaggagggcttacccggagaacccgggctttctctggacataggcatgtgttcactgcttgcaccaacctggttgcatcccagctctgccgtgtactcaccagattatgtcaccttgctcaggcggcttcactttggccaagttactgtacctatttgagcttccttttccttctcagtgagagagagatgatgctaattcttactgtaacagtaataactttcaattacaaacgcaaccaaagctggcttaggcaagaggggaataattgcttatgtaactgtagatgctagaagaagggctgcttgaggcacagcttaatgcaggagtcggtactccattaccaagattcgctttcgctctctgcctttccccttctgcccctactcgccgatgctgaccacttttcctgcagaggctgtgtatcaggtaactagrgggcaagactctctaccagacaaaagaaatgacagcgcatgtcctttgtggaagtacatttctccattatgtagcaatctgcaggaagcagctcagggctcatcctcccacctcagcctctttagaaactgggactacaggcacaagccaccacgcccaactaatttttttattttttgtagagacaaggtcttgccatgttgcccaggctggtctcaaactcctaggctcaagcaatcttcacacctcagcctcacagagtgctgggattacaggcgtgagccatagtgcctggccagggcctattagttctaattcaccaggattcagtgtcgtaactgcctgtctccaccatgaggttgggttttagatttgctctgggactccctctcgagtcaggaaagctgatacccaaatgttcaggagctgccagatcactagaaatcctttctgtgcctatgccatggttcttaactctgggccagctctagcaggtctggaactgccattgttcccggcctggggcctgtcattgtttcatcagctcctcggcagcctgcttccctgcagtgccattggggagagtgtctgcttttttcccacattatattttttgtcttcagtatttcatctcctgatttttgtaaatagcagtactcatgtgacccagttaataattgtctcagtccatggggttgctatagcaaaataacatagactggtggcttcaacaacagacatttatttctcacagatctagaggctagaactccagggtcaaggtgccgccgattcagtgtctggtgagagccttgttcctgggcccttcccttttccagcccttcgctgcatcctcacgtggtggagggacgagggactctctggggtgtcttttataaaggcactcatctgtgcataagggctcggcctgcatgacctgttcacctcccaaagcccacacctgtgaatactgtccccttgggggttaaaatttcaacatatgaatttaggggaacacaaacattccgaacatagagatgatgcagtaagaacgatcatcctttgctgggcgcggtgactcacgcctgtaatcccagcactttgkgaggcccaggcgggccgatcacgaggtcaggagatcaagaccatcctggctaacacggtgaaaccccgtctctactaaaaatacaaaaatttagccgggtgtggtggtgggcgcctgtagtcccagctactcggaaggctgaggcaggagaatggcgtgaatccgggaggcggagcttgcagtgagctgaggttgcaccactggactccagcctgggcgacagagcaagactctgtctcaaaaaaaaaaaaaaaaaaaagaacgatcactcttgtctgaaattgaaactcatctgcttcagtgctgacagttagtaaggagatctgtctgcactgaaaggctgcttcttcaaatcacttatgaacccagttccctgagacagtagtggtccatactgagttgactttggaatgcagttgcctggaccatgtttgagcaggcagggtcagaactgacatcacagaycatctgcaccagaaagatgtccagccccagttcctcttcagtgtttccatgttggaatctccagtaataactgaagggaggctggacactgtggcttgtacctgtaatcccagtattctgggagggtgaatggggaggatcacttgaagccaggagtttgagaccagcctgggcaacatagcttgaccccatctctacaaaaggtaaaaataaaattagccaggcatcgtggtgggtgcctgtggtccaagctgctcaggcagctgaggtgggaggatcgtttgagcccaggagtttgaggctgcagtgagctgtgattgcaccactgcattccagcctaggtgacagagcaagatcctgtcttaaaaaaaataataattaattatttttaaaaactgagaggaactggaaagttgcagtgaaatatactcatccccagcctattcccatctcttgactaactcaatcagggccgaggcaaatttttgttaagtccacctctaactgaatggagaatttctcctgaaacaaaagcttttgggcagagcatcttgctcagctggactgccaggatgtgggggttggttgctggcccgctggaatcctagaggcttcaatttgtggaagaatggccatagcaagttggtggcagagccattgctggagctgggtggggtcttctgatttcttctcttcttggctacgtctccaaagaagtctctctctaccaatcttaaagctatatttcagataatttcccagaaattatccattctatgtcaaatctattcctaagtttcttttttgttgtgcctgcaagcagaactgtttctttttagatccttttgtaatgtctcaaagctcttgattgtacttaactaatttttaaaaattytaaattcaaatacgaaatgtaatacttggccgggcatggtggctcacgcctataatcctgcctataatcccagcactttgggaggccaaggtgrgtggatcacctgaggtcaggtgtttgagaccggcctgatcaacatggtaaaaccctgtctctactaaaaatacaaaattagctgggcgtggtggcacgtgcctgtaatcccagctactcaggaggctaaggcaggagaatcgcttgaacctggaacgtggaggttgcagtgagctgagatcgtgccattgcactccagcctgggcaacagagcgagactccatctccaaaaaaaaaaaaaaaaaaaggtaatatttctgagtatttatcatgtgttcaggcacttggtgctttataagttttaactctctacgatagccttgtgcaggacagatactattatttttttttttttattttgaaacaaagtctcgctctgtcacccaggctggagtgcaatggtgcaatctcggctcactgcaacctcctcctcccaggttcaagcaattcttctgcctcagcctcctgagtagctgggactacaggcacccgccaccatccctggctaatatttttgtatttttagtagagatggggttttaccatgttggccaggttggtctcgaacacctgacctcaagtgatctgcctgccttggcctcccaaagtgctgggattacaggtgtgagccactgcgccagcctcagatactattattctccccactttacaaatgagaaaactgaggcataaagattgcatgacacagaggtagcaatgagtaaagcctcttatggcacctcttacctccctgcattgtgaccactggcttctctgtgtgtggtcccttggtggtttttccttcccgacctggataagggagaaagtggtcaatatcttcctcacctccctcaaaacaggcttgaacattggttgtgctgctcgtactgtagctgatcaataaccttctgaagcccttcctcccacccacttgccattggcccatgcaggccctgtaaactggccctcttcttctaggcttctagaaagatctrgtatgagcttaactcaggatatgctgaatggagaactgaagaagctatcagaaggtctggaaggcaccaagtacagtaatgtgatgaaactccttcggatggccctcagtggacagcaggtgaggcagggacacgggttggattgttccctggagcccctcattgatcctttgaacttacatttcctggcaggcactgagctcaatattgagtatacaaaggtgaatgaaacatgatcactcccctcatttagtcaatcaacagacactattgagtacctactatgtgcaagcattgtgttaggtacagtgaatacartatagaattaaacacacatacataatctctgcctccatggggtttgcagtttattggggataacagacctagcaacagcttacttaatatgggaaaatcaggccaggcacggtggctcacacctgtattcccagcactttgggaggcctaggcaggtggatcacctgaggtcaggagtttgagaccagcctgggcaacatggtgaaaccttgtctctactaaaaatacaaaaattagctgggggtggtggtgcgcctgtaatcccagctacttgggagggtgaggcacgagaattgcctgaacctgggaggcagaggttgcagtgagccaagatcgcaccgttgtattccagcctgggtgatagagtgagactctatctcaaaaaaaaaaaaaaaaaagggcggtggttggaggagaaacaggctcttaggacccatccttttccagggaaataacacaagcactgatcctcagaacacaggcagcagtgtgggggctggcctgggaataatttctgcagactaaggctgagcttcagttctttaggctgtttaaggtagtaaggcaatatttgctctttttgttcttagcaaggacctcctgtagctgagatgatgttggccttgggaccaaaggaagtacgggaacggatccagaaggtggtttccagctagggagaggatgtktcgggcagtggagatcgccctaagaacctgtgagcttagaaacagctttcagagaccagaaggaggcctggggcccgtcgggaagtttgctgaaggaactaagagtggaaacaatctctgactgcacacaagtgcatttgtgatccaccacaggcacgtttttgtcaattggctggggaagcccaacccatctaacctcctggactctggaaaggcattctccgggtctggtttctcacacattacacagcagaggtttggagttagttcacagaaaagttaacatcccggaacagtgcagaaggcttgggtttcagtttgctagggcccccataacaaaatgccacagaaccaggtggtttaaacaacagagatttattttctcacatttggaggctagaagttcaagatcaaggtgtcagcaggcctggtttttcctagaggcctcttttgttggcttgcagacagctgtcttctcactgtgtccttgtgcggtcttccctccatgcacacacatctctagtttcattatgtgcccaacgttcctcttctaagaacaccagttggactggattttaactttaaccagcctcatttaagttaatcacctctttaaatgctcaatctccaagtacagtctcattctgaggttccaggggtttctcaacgtaagaatttagggggacagaattcagcccgtagcagctgggcagcaggactcatgggtcccagttctcaggcyccaaggactcagagcagcaaaggatacgtgacacaagcagggctgaactggacaccagactttctttggggttgtaaaaggagaagtgtgactccactgccaagggtaagcactcttgtcttatgctaccctttattcttgaaccttggggcagcctgtgtctcccttccctaaacgtcatctgttccgtttttccagtcttccagacctggtccttggactggagaccttcacccttcctattttgtggctttctcttcaaatccacctcgtccttcctccatgacttataagtcatcatctctgctggtttctgaaatgagatatgcttcttggggtcttcagtgaagaggaatagcaagtgaaaggaggatggtggcagrgtacatgaacccctaccaggcttctaggcttcccctgcatggcagccagcctctaagttggcccccaaccatccctgccttcttctattcacacccttgtgtggttccttcccacattgaataggcctgacttgtgtaaccactacactattgaagaaatgagagtttgacttctgagggtaagycataaaatacatcgtggcttctgtcttgttttctttgatcgcttactttgggggaagccagcttccaggtcatgaaaatactcaagcagccttatggagtgctccacatgacaagggatsgaggcctcccaccaatagccatgggagtgtgcaatcttgaaagctggtccttcaattccagccaagcattcacatgaccgcaatcctagctgatctcgcttgtgacctctatgggagaccctaagccagaaccactcagagaagctgctcyggaacgtcagacacacatgaactgtgagatagtaaacgtttattgtttaaagctacttggtttggggataatttgcgtttcagcagtagacaatatatttattttgtccaggggagtggaaaggcgattacagagtttgttgagccccatagagtcctagtctttgcttaaagaaatataccagttctttctaatacagaatccattaagttcgttggttgcaaacaatagaaaccaactctgcctcacttatgtttattggaggccataagagagccacagcatctaccaaaaagccaaaaaaaaaacaggttttggaaaagacaggaactagctacaggagctaatggccaatcttgtctgagttctttgatggcgacacatgaactacagccgttttgttgttgttaatttctccgtgttttcccctcagttttggatgactctgctcaaggttcagattctgaggagcaagtatctgttgggctatctgaggtcctgctaccattccttggccagtaataggtagtttcacagggattatatgcaatggaggaaaagttgttctcaaggaaaactagggagctttctccagaagatgatgtaatggcagaaacaacaggtggttgaccacagaagsggacaataataatacttgtaatttattgtgcgcttatatgagcctcaccctctcccaggtgtcagataatgctcgtaaatgccttagtccatcatctcagtaaattttttttataacactatgagagaagcagtattttttttttctgttacagatatggaaaccgaggttctgaaaagttaactaaaacttccgaggttatagtacgaggcaaaaccaagatttaaactcagatctgtgccgatccagagtccaagcttaactctgatctactgagtgttgtcagagcatctgtttctaagacattaagaatggttaaaaggagcttcttggctcatggtcaagtgagtgtttttaacaaagtgagtggtcaaaatactaagtcgattctggtatatctacaacatggatgaacctctaggacttcatgctaaatgaaatgtcagtcataaaaggacaaatacgtcctaatgctttgtgaggcaaaggtggtaggcttgtcaaaggccaggagtttggagaccagcctgggcaacatagtgagatcctgtctctacaaaaaatttaaaaattagccaggtgaggtgacatatgcctgtagtcccagctacttgggagactaaggtaggaggatcacttgagctgaggagttaaggctgcagtgagctatgaatgcactactgcactctaacctgggcaacagagcaagatcctgtgtctaaaaaaaaaaaaatgaataaaataaagttaaaaggatagatactgtaagattctacttatttgaattacttaaaataatcaaaattatacaggcagaaaataagatggtggttgtcagacttggggaggcagaaatgggaagttactgtttagggtatagagtttcagttttgcaagatgtagttacaggggtcaatggtggtgataattgcacaacattataaagatacgtaatgccgctgaactgtatatttaaaaatgactgagatggtaaattttatatttttctgtattttaccacagtttttaaaaaatactaaattagagctgggcctggtggctcacacctagaatcccaacattttgggaggccaaggcaggcagatcacttgaggccgggagttcaagaccagcctggccaacatggtgaaaccccatctctactaaaagtacaaaaattagccaggtgtggtggtacatacctataatcccagctacttgggtggctgaggcacaggaattacttgaacccccacagaacgggaggttgcagtgagccaagatcacaccattgtactccagcctggggaacagagcgacactctgtctcaacaagaaattaataaaaaagcgaaattaataaagctgttgctacttcctcaagtgaagtgtgctgtgctatcttgaaagcagctccagacgtctgtcttctgtttgagggttttgctcaggatcagtaagacttttttttttttttttaagaggatgttgctctgttgcctgcccagactggagtgcagtggcacaattatatttcactgtagctctaactcctgggctcaagagatcctcctatctcagcctcttgagtagctggaatcacaggtgcatgccaccacacctggctaagtaaaagtgtttgaaggaatttcatacattttaaataacctcaagcccatccccagtgttttgagggtatagtgcagcagtgaagggcacagaggctgtctagattcagaaacattctgccccttattcacatgtgactttctgtacctcaattttcttgtttgtaaaataggaataagaattgtacccatctcaaagagttgtaaggattggaatagataacatatacgaagttcttttttttttttttttttgagacgtagtttcactcttgttgcccaggctggcatgcaatggcgtgatcttggctcactgaaacctccacttcccgggttcaagtggttttcctgcctcagcctcccaagtagctgggattacaggcatgtgccatgtgccgccatagccagctaattttgtatttttagtagagacggggtttctccatgtggatcaggctggtctcaaactgccgacctcaggtgatccgcctgcctcggcctcccaaagggctgggattacaggcatgagccaccacgcctggcaacatatatgaagttcttagaacattacatggcatttaataaatgttaggtaactatcaccattattttcatccttagaaacagtgatcttggtggcaatgcatagaaacacactcagactaactgaaaccatgaaaggaatttattggaagaattaggactctcacagatctaaagggcaggacttccaactggacctcacaaaagaatggaatctgtacctagaaacctgttgggaccaaaggcagccactcggccctctgagatggcacagtttctaacattcacccctctgtgtgtctgctccccttgttttccctctgcaggctgcctttctctttatctctgcagttggccaacagctgccctagccctgaaggtaaatcatctctcttctcctacatcaccaattaaataaccaatattccacatacaaactcgcaggggagaatctgattggcctagcctgggtcaggtgtctacccctggtccaatcagctgtggtcaatgggagtcatattctatgatcatggctgcaggtggctcactttagtgtgtgggaaaccagttccttcccctgagcgtgttctttttcggtgttgtttagagagtatcttttccagggctgggcacggcggctcatgcatgtaatcccagcacattgggaggccaaggccagtggatcacttgagcctaggagttcgagaccaacctagaaaacatggtgaaaccctgtttctacaaaaaatgcaaagattagtggtgtgtagtgatgcacacctgtaatcccagctactggcgtggctgaggtgggaggatcacctgagcccagggaggtggaggctgcagtgagccaggatagtgccactgtactccagccagggtgacagagcaagactgtctcaaaaaaaaaaaaaaaaaaaagacagtatccgttctagaaaattacatttttatagccaaatttggaatcccattcatactgcctttatcctactttatttttgccttcatagtactttttactatatgaaattatatatttgtacatatttactctcttactcaaaagaatatgagattatggcaggaagtctgtctttttgtataaccatagcacctggcacgttgccagatacatagtaagggtcaagatctcatgatgaaaaagtgtttgaggactatgttagtaagatcggtttcttcagaaatggcactcatcagctggtctaactgccagactcttaacagttaccagtatcacttccatttaagcggggaagtctttcctcttttgcaagatttgccagtataattagcagtccagtctgttgcttgtaatttgcattgaatccagctgtctgggagaaactacctttgacaaagcttggaagtgaagggtggggacagatgactgacatgtgtttagtggggactaaaattagaagttgttggctgggtgtggtggcttactcctgtaatcccagcactttgggaggccaatgggggaggattgcttgagcacaggcgtttaagaccagcctgggcaacatgatgaaacccccccatctttacaaaaaaatacagaaattagctgagcattgtggtgagcacttgtggtcccagctacttgagaggctgaggtgggaggatagctggagcccaggaagtcgaggcagcagtgagctgtgtctgtgtcactgtactccatccctggtgacagagtgagattctgtctcaaaaaatataaatgtcagccaggcgtggtggctcatgcctgtaatcctagcactttgggaggtgaagtcaggtggatcatgaggtcaggagtttgggaccagcctgaccaacatggtgaaacgccgtctctactaaaaatacaaaaattagccaggcatggtggtgcgcacctgtaatcccagctacttaggaggctgaggcaggagaatcgcttgaacccgggaggcagaggttgcagtgagccgagatcacaacactgcactccagcctgggtgacagactccatctcaaaaaataaaaataaataagtaaataaataaataaataggccaggcgcggtggctcatgcctgtaatcccagcattttgggaggccgaggcaggcagatcacgaggttaggaaatcgagaccatcctggctaacacagtgaaaccctgtctctactaaaaacacaaaaaattagctaggtgtggtggcatgcacctcaggggttctgagggatgagtaggagtttcccaggtagatgggtgttggaaggctattccaaggagagggatgaaaaataaagcttcacaaagttgttcaggactggaccaagagtaggagtcaggggagaggtagaagtggctgctgagaaaccaggcagatgtgagatccaaataataaaacccagattcaatagaaaaaaattagctgggcatggtggcatgtgcctatagtcccacctactagggaggctgaggcaggaggatcacttgagcccaggaagtcaaggctgcagtgagctgtgattgcaccactgcactccagcctaggcaagagagcaataaatcttaaataagatttattatcgtacttagcaggaagttcattggtaaggtgggctgcagggttggttaattacacgtgtggtgacatcagtgaggacccagggtccttctctctctccaccctcctggccacagcatctgcagcagccacagttggctgcctgcagcagtcaggcctctgcacttcctccttcatgtcagctggggagagggtggctttctatggctgtctcccaacagcaaggaaactcctaagtaccctccctctactcaacttccagatttttagccatccctgctggggaagtgagggtctccataaatcagtcagatccagagctggagatgaagggagtctgcgtgtccctgaggtgcatggccaggtnnnnnnnnnnnnnnnnnnnngcgcggtggctcatgcctgtaatcccagcattttgggaggccgaggcaggcagatcacgaggttaggaaatcgagaccatcctggctaacacagtgaaaccctgtctctactaaaaacacaaaaaattagctaggtgtggtggcatgcacctcaggggttctgagggatgagtaggagtttcccaggtagatgggtgttggaaggctattccaaggagagggatgaaaaataaagcttcacaaagttgttcaggactggaccaagagtaggagtcaggggagaggtagaagtggctgctgagaaaccaggcagatgtgagatccaaataataaaacccagattcaatagaaaaaaattagctggggccgggcgcggtggctcacgcctgtaatcccagcactttgggaggccgaggcgggcggatcacgaggtcaggagatcgagaccatcccggctaaaacggtgaaaccccgtctctactaaaaatacaaaaaattagccgggcgtagtggcaggcgcctgtagtcccagctacttgggaggctgaggcaggagaatggcgtgaacccgggaggcggagcttgcagtgagccgagatcccgccactgcactccagcctgggcgacagagcgagactccgtctcaaaaaaaaaaaaaaaagaaaaaaattagctgggcatggtggcatgtgcctatagtcccacctactagggaggctgaggcaggaggatcacttgagcccaggaagtcaaggctgcagtgagctgtgattgcaccactgcactccagcctaggcaagagagcaataaatcttaaataagatttattatcgtacttagcaggaagttcattggtaaggtgggctgcagggttggttaattacacgtgtggtgacatcagtgaggacccagggtcct

SEQ ID NO: 95174 - DNA, 14083 bp, Homo sapiens
tcccaggctcaaacaatcctcccacttcacttcccaggctcaagcaatcctcccacctcaccctcttgagtagttgggactacaagtatgcaccactaaacctggctattttttttaaaattgttttgtagagaaggggtctcactatgctgcccaggctagacactaactcctggcctcaagtgatcctcccaccttggcctcccaaagtgctggggttacaggtatgggacttcaaagatataaccaagtttactaggcagctctcttaaaatagggagattatcctggattatctgagtgggcccaatgtaatcacaggagcccttaaaagcaaaagaggggccaggtgccgtggctcacgcctgtaatgctatcacttttggaggccaaggtgggtggatcacctgaagtcaggagttcgagaccagcctggccaatatggtgaagccccatccctactaataataaaaagttagctgggcatggcggcgcatgcctgtaatcccagctactcaggaggctgaagcaggagaatcactggaacctgggaggcagaggtcgcagtgagctgagattgtgccactgcactccagcctgggtgacagagacacagtctcaaaaaaaaaaaaaaaaggccgggcgcggtggctcacgcctgtaatcccatcactttgggaggccgaggcaggcagatgacgaggtcaggagatcaagaccatcctggctaacacggtgaaaccccgtctctactaaaaatacaaaaaaattagctgggcgtggtggcaggcgccggtagtcccagctactcaggaggctgaggcaggataaggtgtgaacccgggaggcagagcttgcagtgagccaagatcacaccactgcactccagcctgggcaacagagcgcaactccatctcaaaaaaaaaaaaaaagcaaaagaggaagacagcaattgggagcaccagaaagatgccaggtgcctctgctggccttgaagatggaaaggtttcaagagaaggaactgaattttgccaacaactggtgagcttggcagaggccccacagccccaggggagaactttgtcttgaacctggtgagaccctgagcagagaatccaacccggccttgtcagacttctgacctacgctctgcgagataacaagtgggtgttgttttaaactactaactttgtggcagtttgctgtacagcaatggaaaacgaagacagaaggttcatgcccatttcctagttttctagagtttctcagaaactctgagcttactcagctgcaaagtgagtggtggggcagatgtttgaacccaagtccatctgttctaaagcccatgctgtagctttcccattcagcctctccagatgaggaaagtgagtcactaggggcgctgccagggtcagctccccaggatctcagcacagaggaggtgggaccaggttgtggccccgtcatgctcccagctcatgtgaggagccccaggagcccccaagtcgccatctgtctgtgtctacctgtgtcagtgcacttggcctgaaccgtcctaaagcccctggagttacagccctgcctcccgacgtcttaggtaaaaggtactgtcctccttggggagcccagtagacctcacccagacatcggcggtggtctgctggccactgaggcccttctcactctaggggactccacttcaagccctaacttctctcattcatgctcagagtcagaggaaactggtgcctcatgagccagagcagacatgaagctcaaatatgtgttcagtttggccaacagtgtttaaacacatacacacacacaccccgatgtttaaaattgtgaagtttcacactgaaagccatattgccaacctctgttggggaatcggaagctctggccatactgggcccatcttcccacttggcatccaaggctaaagccaagtggccaccatgtcccctggtggagggtgagctctggagtgctccagtacccaccaccccctatcaccttgccctgcttacttcacctgcctggccccaaaaaacatctgaactccaatcccttaggattgattctacgaccttaccttctgcctcctgccctgctcagtcccgggggatctcgggcgacagcgcccagcctgtgtgatgctagcagggctatgagaaataggagtgggaccagtaggatggaaactcaggggtctgttccagacctgtttgtgtggagagctgttcccagtgacccagttcagctaagactgtcaggctatctgcgtctgtctgtatcagtctactcagcctgccccctctctgcctggtgggggcctaagtgcaggtgctgatgcccattttctctgccctgatgaggcttcaggttccttggtgcttaatggggcaatggcatttggccaaaacgcacctgagacaggtggaaatgacctcccctgcccattccctcccctgggggctgctgcccacatccacaaggccctttggggaggctcagctccccccaccctctaccaggcccactgcctggagaagaatcaaaacccactctgtcttcagcccccaggcttctaggaaaaagccctagaacagattcggaggcgacactttgctcccttcctggtgagctgagatactggtgccgccatgcaagagacaagaaatgagtagcaaaaaggggagggggtggaaaaattaaattctgcgtcatcagcaaggtttcaaacaatcgctygccaactgaagtgggtgccacgtctataagtcattctgttttatagaccattaggatctccagagagaacctgcatggagaccactgctttttgttgaaattaaaatgtcagagaaaaagaaatagaacaaaacagggaatctgcaattaattaccaggccataaaaattcaataatcaggaagcagagcggccgccggcccagaggtatcagagccagcgtaacaagaatggaatacattaatcttttcaaattagttttttaatctgacggggatagatggtgacatgcctcccctcccsacccgctccccctcaacctccacygctccggcctaaagccaggctgtaggagggagtttcagtgtgagctgggggcctgctgcaacctggacccccgggctgaagggagagagcggtcagcggcaccacctgagcgcagggccctcaggccagctcgagctgggccctcgtcccagcagaggagccaagaaggcctgttccctctgggtcccagggttcaagggagaggtacgcgcgtttcctctgttggctgcagggtctgggcggtggtctctgagctttcctgctctggaaaatgggaacaagatcacagccgcccccggatcctggatgcattgtgcctggtgcccggcaggtcctcaataaaggggccctgctgttactatttttactcctggcagcaaggagcgccaggcagcgccagaactctagtcaagagcatttatttagcgcctgctgtatgctcaggcctgggaaggagagaccagcagcctcagtccttacccgcagaatgagattcacggtcaagttagaggccaagcgggacgtagagggtcaaagagtaaagggcaaggagcttgtcctcgagcagtgctgctagcccggaggcaagtcccaggagggccgaaagggcacgcatgcacggagacagcaggttctgcccccacacagccatgtgcttcgggggctgccggctggttggtcaaagaaccagccccaccctgtctctgattagaggccggcccgtagcctcaccccagagctccgcctcctccttcctcgcttccgctaggcccaaggttcctgcagctcagatcaagaaactgcaagtttctggccttcatcctcagccaagccactctctcattaactactcaacaagctggcctctgggcctcgctcaggttgagcccccgcctgggaagccccccagtggagctcaatgcctagtcagcgttgttaaaatggattcttggccgggtgcggtggctcacgcctgtaatcccagcactttgggaggccgaggcgggcggatcacatggtcaggagttcgagaacagcctggccaatatggtgaaaccccgtctctactaaaagtacaaaaattagccaggcatggtggctggcgcttgtagtcccagctactcaggaggctgaggcaggagaatcgcttgaacctgggaggcggaggttgcagtgagctgagatcgcgccactgggctccagcctggacgacagagcaagactccatctcaaaaaaaaaaaaaaaaaaaaaaaaggctcttacagcctccaccccaggggacatctgcagtgcagcaggaagataaccggctgcccttcggactttgactccttttaaaggtaacatgacagctcactaagtgccaggattttctcatttggtcccctgtgtaagtcctcagcctggattttctcatttggtcccctaggaggttgggactattcataacgccatttcacagaggcagaagtcgtgaagcttaggccacccgccagctgtgtgtgacctgcatctctgaaaccagcttcactaagaataccaaccagaggccaggcacgggggctcacacctgtaatcccagcactttgggaggctgaggcaggaggatcacttaaagccaggagttcgagaccagcctggacaacatagtaagaccccttctctttaaaaaaaaaatttttttttttaaattagctgggcacagtggtgaccgcctgtggtcccagctacttgggaggctgaggcaagaggattgctgagcctgggagctcgatgctgcagtaagcagtaatcttgccactgcacttcagccttgccagagaccttgccaaaaaaaaaaaaaaagaacaccaacgccaggcacaatggctcaggcctgtaatcccagcactttggaaggacgaggcaaacagatcacttgaggccaggagtctgacaccagcctggccaaaatagcaaaacccgtctctacaaaaaatacaaaaattagttgggtgtaggggtgcgtgcctgtagtcccagctactccagagtctgaggcaggagaatcgcttgaatcaggaggtggaggttgcagtgagaccagattgtgccactgcactccagcctgggtgacagagcgagactcagtctcaaaaaaaaaaaaaaaaaggacagcgtcagcgtctttcacctcctccggagtttggcgcatggtaggggttcaatcagtgttctctggacagtgtttcaacagaacaaccttgcaagggagcttcaccggctttctccccaagatgtcttcattccaacctaccaacataacagcagctgccacttatgtattgtgctactgtgtgcgaagctgtgggatctggtgccttttatggtaagattgtaggcctcattttacaggaaggaaactgaggctcagagagactggcaggaccaagattagacactcgtatccatctggcccccaaaagcaggattttaacagctaagaatatggtctcagttccacaggcccaccccagggctcctgaaccccaattcgaggctgcatgccctcaaaccagttccctcactccttcagcctgatgctttggggcatcttgtccaggaggccttccccctttaatctctatctcttgtacttgtgactatcttgtaacttacactggcgccctccatacacaattcacatatgcccccaaggggcctcagaataaatggtggcgaggagaaaaaagcattggcaggaggggaatggaggcaggcacctggactgcgggcacaggcgggaaaattcagatctaggcgcttggcctgctccccgcaggggcgcagttcccggcgcggccaccagatcgcgcccggctctctcgggcggggcttgcagtaaggctgtgtggccgccagatgatgcccgagaccgcggctccgcgggtagtgccccgacaaggtggagcccggcgggcccgcgagtccgagacctgtcccaggagctccagctcacgtgacctgtcactgcctcccgccgcctcctgcccgcgccatgacccagccggtgccccggctctccgtgcccgccgcgctggccctgggctcagccgcactgggcgccgccttcgccactggcctcttcctgggtgagcaggacctggtcccggcgggcgggtgggcgggcgcagagtagggcgcggcgtggctcaggttaatccaacaccctctccccgtcagggaggcggtgccccccatggcgaggccggcgagagcagtgcctgcttccccccgaggacagccgcctgtggcagtatcttctgagccgctccatgcgggagcacccggcgctgcgaagcctgaggctggtcagcagggcgcgggacggaaacgggcgtccctctcgacccctgcgggtcccacgtggctgtgtgaccttgggctgggccctggccctccctgggcttccggcttccctgggccgggtgcggtgggcgttccgaagggccagtcccccaggccacgcccagaaccgcgcccctggggcttgggacccccagggcgaaggtgggtgacctgcatggctggtgccaccctctcctttcacgcagctgaccctggagcagccgcagggggattctatgatgacctgcgagcaggcccagctcttggccaacctggcgcggctcatccaggccaagaaggcgctggaccygggtaggggcacgcggccgggatcccggagggccgaggtttccgggccgacccccactctgggctgagcccgtctgtgtcctggtcccaggcaccttcacgggctactccgccctggccctggccctggcgctgcccgcggacgggcgcgtggtgacctgcgaggtggacgcgcagcccccggagctgggacggcccctgtggaggcaggtgagcgcccgcgcctagctctgcagccccaggcgggggcgcaacggctgacccgctccctccgcaggccgaggcggagcacaagatcgacctccggctgaagcccgccttggagaccctgggtgagcaccgaagcgggaagggctttgaagccattcattgcaaacgaggctgctgtgtggccgagctgtgactgggcctgccgggcaggttaagggcagggccggttgtcacagagcccgggccggcctgggaggggcctcagggccgccggggccgcggactcagccgcacctgccctccctccccccgcaagacgagctgctggcggcgggcgaggccggcaccttcgacgtggccgtggtggatgcggacaaggagaactgctccgcctactacgagcgctgcctgcagctgctgcgacccggaggcatcctcgccgtcctcagagtaagggatccactgcgggggaggagaaagcaccctgtcgggccgggtccccatcttttcccttgactcctcttataccccaaagccccacccagtccagtcacgtaggctacaccccctccggggctccggccccggtacccaggctttcctccgctttggttctgtctccagctctggtcacctcctgcccgggcacctccctccgaggccccgcctcccgcccagacacctccctccgagaccccgccttccgtctgggcacctccctccaagaccccgcctcccgcccgggcacctccctcccagtcccccgccttccgcccgagcacctccctccgaagccccgcctcccacggcccggttggccccgccctcccgcaggtcctgtggcgcgggaaggtgctgcaacctccgaaaggggacgtggcggccgagtgtgtgcgaaacctaaacgaacgcatccggcgggacgtcagggtytacatcagcctcctgcccctgggcgatggactcaccttggccttcaagatctagggctggcccctagtgagtgggctcgagggagggttgcctgggaaccccaggaattgaccctgagttttaaattcgaaaataaagtggggctgggacacacgacctcctgagcctccgtgtgtggcgctggatggggaagggagggaaggcccagcacagacagctcctgccttcagtgaaaggggccttgagattcgtcccctccctggcgccaggtctgtggcccaactgcaggaacctccagctggcaggaggcaggttataaagttttaactggcctggccacgtgtaatggccagagaccccagcacctcgggcttgtctgcctcctacatctctccctcagggcaggcgaagctctggttctgagcagctgggactggtagagagccacgtctggtgtctgacaacatgaaagaggattgcaggggaccacgggtgtcacttgtgtgcttttgtaggtgatgccagttctgctggcggcttgctcatgtcttcacagcacagtcagctccccagcctcacctctccagtggaggccctggtgggggaacatcacctctaagagccaggccagttggcctggacctgaggacctcggggttgacttgagtatcctgccgtggggttgacttgagtatcctgccgtctccttgaaattcttaagtgagggggatcactggccagggaggcgtgaagcagacaagcctataggtacagcagttgttactacactccctagaggatgaagagaacttcaggctttcctgaaccatctgcctatgaggggaggtggagaaggaaccaggcctcatagagcaccttcgacccaggtgctctgcttatttaaatctccccaacctcacagatcttatctccactggcagatggtcaaattctttccactgacactgcctcaggcataagtggcattagcctggaattcaagcagcttttgccactacctggtaagcctcggtggtgggaagtgtccctggagactgatggaagcagagctaaaagagccacatgaggctgggcacagtggctcacgcctgtaatcccagcactttgggaggctgaggcaggtggatcatttgaggtcaggagttcgagaccagcctggtcaacatggtgaaatccggtcgctactaaaaatacagaaattagacaggtgtggtgatacacgcttgtaatcccagctactcgggaggctgaggcagaattgcttgaacccgggagacggaggttgcagtgagccgagaccgcaccactgcactccagcctgagcaacgaagtgagactccgtctcaaaaaaaaaaaaaaaaaaaagccacacgagctcacagctcctgggacaaactttgcattttggacactacgcaagaccacggctggaaacctacccttttctaactcataaaagcatattaggatgcatgtgggtgaataggttcaatttactctaaggaaatccttgacaaaacagttaactcactcgtgccacacctcagtccaaattactgtagccactgcccaataaagggccacccattagctaaggggcagcagtccccatgactagggtttttctctttgaaggaccaccagcagtggttagttgcctgcgggtctacttcacactgctggagttgctttcaggcctagcctgcatggacatcttttcatgtttctcctcttacctgactcaagctggctcaaattctaaccctctgtcacttaagtcatgtctgtctggagagggccttccagagaaccatgattcacatgggccattcaagccagtcccctaggaatagtgggaccagaggggtcttcatgcccccaaccctcctgtgtggagagcttgcttgagctctggtctctcaccagcttcttctcaacctggaagtttgtagcatgtatcatttcttgggtgataagtccttccattttcttacccatttcttatcactcaggttctaccattcttcaggtctattacagatttgttgaacaaatcttctccaacctttaatcatatccaattatcttctcccatcagaaaacgtactcttacctacttttccagccagaaccacctattaatgtctcattcatgcccagatgaaggccaatgccacgcagcctaaaggggttgtctctggtctcctacctatacccacctttcagtgtgtctgcctagaaggaaatgagtaatgacctctcacagtccctcaggttaccctcactgtctacaccttactcctcttctgtatgcttaacaccatctcaccaaaccagggcctactttatgttcctagcagtagctcacaggggtatggtgtgtttgtgtaacttttcagcaccttctctttttcctttcaatgatgcagggcaattctgcacagacttacaaactgtgcatgtaaaagtgtaaaagcatgtatcctcttattgtagtcttaaaaagctcgtggaatctagggacacagaagattctgtggcacagatttaggtacagagcaaaatactcactggaaaaatcaagtattggctagctaccacggggatttgatcctagctggcaaacgtggaactccgcaaatacttggagccattaattatgtatacttgttttattcataatttgtcatgttctgggataccaaaagtaataatggctgaacttaacaaaatttgtaacctcatcttaatatccactgatccwtctcattcaatggtaacagtcaatgttttctaaaggaacataaaaacaaacatgcacacaattgcacagttttcataaaggtctatttcattattggtgggtagcgcatttaacagttaaatrcatttaaataaygtataggtgactgcaggactgcagcawtggtaactagataaccaactagaaaccagctaacaaagaactgtctaaatacttaaaatacagctcttgttgagatcatcctttgttttgatcatcttcttgggggaaaaaagcctgctgctggtcacaatggaaatatattaaggccaaatcttctgatatccattcccaaaggtttctttcagctggattaagcctccaactccagggcgagcccaaccttgtggcctccagcattaatgctcttcccatctaccagagcagagagtgtaagcttcacacctattaagacaaaaaaacacaaaaacaaaaaaccgtgatgtacctggcacgtcactcagtctgggccttctttcacagtcatccccagagcctgcctgtcacttcctcagcctgtcagctgacctactagtgctggccaccagagggcgcttggaagtatctgagacaccagaagaactgggttaccattctagctaaggcaccaagtcacagagaaatgttttaataacaacttcaaagtgttctagaatatactataatgttgagtatactatcccgatgaaaagagactaaagacataatcataattcgatcctagaaaggaaaacctacaataaagacacatttgggaacgggggtaaatctgaatatgtatttggtattacattaatgttagttttcttagatgcgacaatggtattgtgcttataaagaaaaatgtcttactcttaggatacacatgctaggggctgccatgtctgtatgtctgcaaaacatacatttttttaaaagtatgtgaagtttcagacataaaataaatgtagtaaatgttaataattgttaataaattgttaataattggtcaatgcaaggtaaggacatatgatgttcattgtaccattcttccaacttttctttaggtttcaaaatcaccaaaataaactttggggaggaaaatccctatctgaagggggaagtctccagtactttaagcagattccaagatgagtcatgtgcactctgaagttggagaagcgctgttctagacacagcacgcttcaaaatattatataaagtcaacaagactataggcagaaccaaagcaatgagtgaactttgatcaacaaaataaaaattactacaaaacatttcagatacaagcgaggaaactgacaggaagtgggtattaaataataaggaatcactaactttcttaggtgtgatagtattatagttatgcagaaaagaagagacgggccttattctgaagagaagtgtcatgaccaaatggcccagcaaaaaaaaaaaaagcaaagaaaaagaaataaaaaattgtggtaaaaggtaaacacgtatttattgtactcttctttcaactcttctgtgtgcttgaaaggtctgaaaagtaagctgaagaatgaaaactaaattttttaatactatcaaaacaatcctactttatcaagaatacttaccaggcctcagagtctgagtatagcctactscaattaagctagagttgttgacttttgcctaaaataaaatacaaaaacaactgtaagaaaaatatttcaatagagacaaagcccctacatgtttccccatcatgtaatcatgaagtgttcagttttattcacgtgagacaataaaattcaatattatgtattaagccaaacaaaccaggtactatttaattcgtatccattcaactcaaaaatcaaattctcagtaggacacaatactcttgatagccactggaatgtatccaaagaccccaaactgtccatacagcacaaaagcctaagcactctcataaaaatcatctttgttaattctagtctagcacaacaaaccagaccaaaatgtggtacaagtcaggctcactagaggtgacacacagcagccttaaagcacagggtataaagtttaaattcatgacttagttacacacattactacttccaggactcttcctaaagaatcaaaaccatgaatgtttaaaaaaaaaaaaaaaatctccaaacgacaagtaattcctctgaagaatcagatcaaacaatcctttatcctcacattcttacacctctcataaatgccggtgctgctgagttctggctgtatgtaaccactgcgtttgggaggaggtcccagtgaggtatcatgtaccaatccaggcccctgccttccttgcacaatcccaacattttaggacttagttaccgacttcaagggctggaatgaaccctgaagagtaagacatagtaaagagtagattctttctagctccattctctaccacccctaacattatgaagacacaccagaggccaggaacacctgccttcatttccagggcctaggttgcctagacatgcaactttgctttgctttcagcattctgagggctacaatataaaggtaacaaacagactatgtgaccaaaacagatctccaaatgattcgatgtctatactcttataatgtgtaacatccaaagagcccaatccagagaaagaaatgatgtaactatacagacacaaaccacatccaaaacacctgtattcacttggcactacagccaaatattcatgagctaccaatgaccatctaaagaaaaaaacaggcctggcgcagtggctgacaccagtaatccctgcactttgggaggccaaggcgggaggaccacttgagcccaggaattcaacagcctgggcaacacggtgagacccctgtctgtctgtacaaaattttcctagcttggtatgatggtgcacacctacccaactaccagggaagtggggggtgagtggaaggatctcaagcccaggtggctgagggcacagtgagctgtgattgcaccagtgaactacagcctaggcaacaaagctcaaaaaaaaaaaaagaaagaaaaatacctcactaatgaccatcttgtaccctacaaataagagcctcagacagctggatagacattcctattattggccaggcgcagtggctcacgcctgtaatcccagcactttgggaggccgaggcaggcggaccacaaggtcaggaaatcgagaccatcctggctaacacggtgaaaccccgtctctactaaaaatacaaaaaattagccgggcgtggtggtgggcacctatagtcccagctactcgggaggctaaggcaggagaaaggcgtgaacccgggaggcggaggttgcagtgagtg

SEQ ID NO: 95175 - DNA, 69688 bp, Homo sapiens
tttgcaaataaatctgttaacctgcagaatgttaacttatgtgactttgagcaaatgacatgaagttttctactttttatttgtaaaaaagtgaatattaagaaagaaaagccgataggtctaaaatgggttaataagcattttaaacatttataaagttatttgaaacatacaagtcattattgtgttattattattttcctattagtcaaacatactttttctgtcttttggaatgtggtctattttcatcagccagtattctctgagtgactaaacatagtaccaatcccattggaggatttatacattttaacttagcagtaattaccttagatggaaataaaacattttagtcttgatctgcaggaataagtttaactctgtaaagtaaaggttgacagcctctagagcatgaggctagaggagaaagtttgaaaaatgaaatgtgcttgtatgttgtaatatgctcacgtaagtgacttgaaactgacaagaaacgttttaataattttaaataataggaagtttttttcttacagagtgaatagatacagtcatggcagtactatgaaagtgttattacattttagttatatttgtcattattggatcatatgagaacaattctaagtgatactgttgtctacctaaactagtacctaagtagggtaaaattaaaagtctttgtctttgaattttttctgggttttagtttatcagttctgatgatgtagcaatgcagaaaaaagactatgaaggagtgtgtgcctgtgtatgtgtgtatgtgtatgtgtgttttccctttcctggtgtgagtaggtctgatttgtgttctttggttaccttgagcagttctaaatgttcagataaattacaagagaaaaggagcaaagtactaacagctctccaaggtactaaattctgtctcctatattctcaacatgggtcgtgtttttccacctgaaaagattgaaggctataatagaaaacaatacagaaagacatcttgttaggcaatatgcaaattaatctcttggtagtataccctttatgaaaacatactaggaaaataattctccctattgttagaagaaatgggttctatattatgacaaagttgttcagaaagtgaaaggaaaccagtatttattgttctaggcacattattgatatatatctatcagtgtgtgtgtgtacatatgtatatactgatatatatacatatatacacacttatatacattgtgtttatattgaaatgtacatatatacattgtctatatacacacattgtatatataggtatgtacacatataaatgatatatgtatatattgatatgtacacatatataattgatatgtgtacaattatttacacatgatatatatatacacacacagttaccttgttatcaaatatttcccgtttaatatgtgaagaaagggagtatttgaggcaggatccatggtaatccatctagttctaaggaccatattctttgtcctgtatcaagctgtctttgcaggagtgattgggcaggggatctgttatcaatgttaaacattagtttctgagatagtctctattttgtgcagctatgttaacatttttgtctggcttttatagcatgcattaccatatcagatcaagtttgcttcatagatctctgaagttcccctcagtcctcaggtcagcctgctctcaggaagtgacatattgtggctcctatgattgctttggtttagatccctggccttgcctgggtgtagaggggcagcaggcaggaccaactgagtctacttagtatcttttatactaagttacagtgtagctgttgctctacctctctatctttgctccccattccagaggagatttggtttgaacaaaaggctttatctctaaaaatagtttaaaaaacagtgtatcaaatagtccttaagatactttctagttctaattttctgtgaagttaagaaagcagttttaaagaatggatcccactatatttactttgaaacatcatcttttaaatttgctgcaaaatatttttaaattgagaatttcagaatgagcctccaagagcaaaatccatgttaaaaatctatgagtagtttgaaatggtaaagtatgaggcaaacggcatggtttctattttatttggcagaaaatgtataattaactttcagattcatgatcctaatttttaaaaacatgttttctttttattccttctgagataagtgtaagataacattattcacagtcagaagtcactagaatatactttataacagaaaagtactacttctggctgggcacggtggctcatgcctgtaacccaggcttttggggggccatggtgagtggatcacttgaggtcaggagttcgagaccagcctggccaacgtggcgaaaccccgtctctgctaaaaatataaaagctgggtgtggtggtgcacacttgtaatcccagctacttgggaggctgaggcaggagaatcacttgaacctggaaggtggagcttgcagtgagctgaaattgcaccattgcaccccagcctgggtgacagagtgagactctgtctcaaaaaaaaaaaaaaaaaagtactactccttaaagacatcatgaagttcattttccatctgttctttttctcttgaaagtttatcacatccactgacagaacacatctgctgttcctgtttcttttcctccatgacagtttatcagtaaggtgactggatgatagagaaagagaaagaatgtttagctgtaaggtttgctttaatttgagttcattttgccccatattttgggggacatttatttaaaattggtgctcagtatgcaataattgatgcacacattccaacactggtcatttattgatgggctattaataaaggctgtaactaaaagggaccatcactgcatagcagctctgcccaatagaactttctgtgatgatggaaatattctacatctgtgctgagcaatacggagcgcttggtatatgcctagtataattaatccaattttaatgttaattaaattaatttaaacttaatttaccaaatgtggctactggttatcctattggatagtgagaatcaattaaattagaaaaaatcccctatgcttaggaaatgaaagtattcaattgcattttttactattggcacttttatggcctgaaatagattataaagttttgcactttgtaagttttttgtttgtttgcttgcttgcttgtttgtgttttgagacagagtctcgctctgtcatccaggcctcccaaagtgctgggattacaggcaagatccaccactccggctgctttttaaatttttttaattgcaaatctcctcagtgcctagtgtatgaaagagtcaacacatgactagctgctataagataggttcccctcctctgcaccccagatctccccagttcatgcatcctggttaaggtcactgaaaaaattttccccgaagattgtcagagctgtagctctggccttcacagcaatcctggttcttctggaagttaagagttaagcggtatctattttactatgaattctgctgtctattgtctgacttctttatttccatgctcagcacctactcggtcagggctgaggtagcttccagactttcagtctttactccacgatggtctaagccgaggaaccctgaacacttcctacagggcctaaagctgccctagagcccttgaatgtctgtagccatctggttcgctctaccatatgctgatctatgttcagtttgtttcatgcagtgttggctcctaaaatgggtatcaccaagctggactgtgactaatgcgagggatctgaatcatgccaagtgatagttcatagccgacaggactgagaatgcatcacttagaggatgtcattgcacaggcactctttatttaacatacatttatttgtattgtgctaggcaccgggctaagggcttttaatcttcatagcaactgcatgtcctattatttatacattttagaggtgcactttggctcaaaaaaggatgtagtgactttctccacgtcacctagctagggagaagcagcagcagacgtgtgcttcctgtctacactgtggctctgaagcttgcattcttaaccacaaagcaaatcattatagaagagaaaaaatatttttttttttttttgagatggagtttcactcttgttgaccaggctggagtgcaatggcacaattttggctcactgcaacctctgcctcccaggttcagtgattctcctgcctcagcctcccgaggagcagggattacaggcatgcaccaccatgagccactaatttttgtatttttagtagagacggggtttcaccatgttggtcaggctggtctcgaactcctgacatcaggtgatccacccgcctctgcctcccaaatgctgggattacaggtgtgagccacctcacccagcccccaaccgactaatttttgtatttgtagtagagatgggtttcgccatgttggccaagctagtcttgaactcctgacctcaggtaatccacccgcctctgcctcccaaagtgctgggattacaggcatgagccacagtgcccagccagaagaggaataattctttaaaatcagtgcagagggcacatctaaaagaaactggaatttaggagactataaggaagaattttctaataattccagctgttcaccatgaaacatttcattagcagtttgcaagctgaggcttattgcccatggatcaggaaaatagtagaaggcattctcaaataagtgggagctcagaagtggtaaatgagctctgttggcctttccaattcaaatttgtaaaatttactctcttgaggacatttcttatagtcagtttcttctcatatgactttttctttttccattcaattcataaagaccttcttttttggtataaagccagaatgcaacttattcatgactgaaattggcataagcagggtgtcctcagactgtaagcgagcctgtataggaatccacatcatgttttgctgagaaagagagtggcctggatcacggaaattcaaagatgattgaaaaagcattttcagcacttggaaaactttatttcatttaattagatattaatgatcagtgaaagaacacataagggtagaagataaaaatgtcattagattccaagcccagtgccttcaataattgagtgtgtgctattactcttttactatggtccttagtattgtgatgtgccccttaattatttctgatatgctttatatgtgcctttattttccaggtgttaattaatgtgttttttttttaaagaaacgcattttctgcttttagagaaaatgtagtaaatatactaacattccagttttgatatttgcttgcttttttaaaagtatgtctagtttctctaattaaaatataaatagtattgtacatatcattgaggatgactttatgggaaattatgggactagagagtttttcttctctcttatgagccttcgggatttgctttcggaaaaagtaatcaatatttactttcattctgctcacctcacttttctcctcagctactccctattgtaccacctccaccagccctcccactcttccaccaaatcatgtaatttgtgccagtgattggaagacatttgcatacataatcccagggggcctaatatctacagatgcttccatggagatagttgtaaattatgattatggagagagttttcattcttgaaataattatcacgagataagccttagagaggaaataatacataaagatgtggcacatatgaggtgacaattgggctagaataactggaaggattgaatgacaagtacaagggtgatctgtatttcagaagatgagggagacctaggagttgcaatgtgtcaggatattttaggctgggagtctagaaggaaggttccacttgaagtataggtcttaaagaagtctaggagatttctagagaagggaaagaacamaagcagagaagtgaactgaagrgcatgtttggggaacaccaagtagtttcatttacagcagagttcaagaagagaaaaaagttaaggaagaaaagtaagttcagggctataccgtgaagatccttaagtatcagagtaaacagtttgtaatcagcctgtgtggggaaggggtttgaggctccttcctctcaggaggttggtatttttcattaactctgccatgtgtctgtactgtcyctcccctacaggtaaggtcttttgtcacatttattttgatttatagcacgaatgctgaaaattccagatttgtttaatatattggtttttggctatatataaatcactgtgactatatagttccctttacattttatgtactgatgtttatttctggtactatatgtaataaatatttaaaaagtttgcttcatgcattatacatatgtcagtgtgtacatggtttctgtaagctgagttagtttaagagtacatttgcttaaagcaggtaacaagtcttctttctacatatttcaaattcaataaataattaacasgttgccaaatcaggtctcattttttctaatttgaattcagccatgaattcatttcttggaactaaaacaccctcaacaatccatctctttctgttcccttctgctttatcttacagatgaggaaaccagggtcatctcaaagtcacacaatcagttaactggsaacgccagggctaaagctgagttatctggtatctttctaccatacacctcttcttatctgaaagtgactaacaaaaagcaaagcacgtggccaatgcacatgtacaatttaaaaagttaatttcatagaccacatcaaaaggaaccagtgaatgytataatttggatgcagtggttatacttttatttgttaacagcattacattagcaggcatgcaacatttctaacaaatcagttattgttattacaagtggtacccccaagttccccctaacaaaaacctgtggcagtgttgggaacaaagagaaraacacttcacaacgggaacattttctatcctccatatgggtacattatttttatttataattgactgtaaacaccgctccccccacaaaatttctaagctccccccaactgactgattgaacacctccaccaagcggattccaaagaaacttgaaaaactagttcaggccatgctgggaaagggaagtcagacatgcctcattatactttcctctctttggagttcaggcacaactgaccagtattattattaaaacaagagatcttcataccgacataacagactcttcttagcaataagataccaaaattccaacatgactctagtatagcatcacatgaaagatagcaggccctaaatcaaagcattttaccctaaaataaatttctttgacactttttgaaatggccctacacagccatctcttgtggggaaaatctacattctatagagaaagggaaaggttccctttccaggtcttttcctgatccaagagatatttaactaagagtctggcatctttttacacatgataagagacatttgccaattattctctctgaagcctgttacgtatgagacttcgtctacataataagaaccttggtctccaccttatcttaacccagacacattcctttctattgattccaggtctttaggtcacaacttaactctttcaaccaactgccaatcagaaaatctttgaatccacctgtaacctggaatccttcccctttttgagttgtcccatctttatggaccaaactaagtacaccttccatataccagttaatgtccttatgtctccctaaaaccatataatcccaagctgtagcccaaccaccttgggtacatgttgtcaggaccctgtggggttgtgtcatgggtcacggtcctcaccttgtgctcagaataaacctcttcaaacattttacggagtttggcttttttcgtcaacatgagcctctaacagttggttactggatcatcctgaggaatcaaggccatagcacttaaagacmcataaataatcctacatgatattcactgtgtattctatgtaggtgtaatttccragctaaaacataattaaccccactaatagacacaacaaacatcctctgtattatcagcacgcacacagggctttctctgctgcgagtggacttgtgtccttacttataattctggaatcttctctaggrgagaggctggtctaatttctctctattgacccagggcaggcaggaaacaaggcacactgtggaaagaatgtttgartgttcaggcttctaagtgacagaaaagcagcttgtytgaaaaatgatttttttctggcttctaaccagtgttaattcacttggaaaccaaggcagttttctcccctttactgaactctggatttcttttccaatcaaggyccctgacaccaaagaaggaaatggagcgtaaatcaggctacagagtggctgccattcattcgggaagccttattgttttccgtcctttgttcccctctagacccttgccaayccccaggccgcgaggccctctgaagccctgagcctggagcggtaggagacgggggaactgaaacgccgcggaaccagaggctgagggagcggcgcgatggagggaggaggagcgacggaccggcaggcctagctccggggctgcggcggctgaggcgsggggatggagcccctgcgggtgctggagctatacagcggcgtgggcggcatgcaccacgcgctgagaggtgagagtccatctagcacccctctctctattcgctcacgggggytggttggagcacccgcgccgggaaggggcggagcggcgagacgcwaggggcggacrctgtggggcggacactgtggggcggccctcggttgtcctggaaacagctcctgcgcgccgccstgtccacccctccagacgctgactcccttctcctggcgccgagtctggctcgagrggccgcacatggcgcctcaaagggcccagttgggagtcgggattcgcaaggcagtaaatcaacctcaaagggtatcaaaggggcgagaccctcgcctggtgccaagcccccattctaagtgtgcagccaccgagaagcatggagactcggtccttcatcctggggggcttcccagctggggagggagggagtgtcaggggctcccctggtgagagatggatcttggaagggataatagctacaattcaaggtagaagtttgcgaatgctaaataggatggtagaggaagcttgaagaacttggacgtctgatcgttggaaagaaacgtgtcttctgtagttctgcgtttagatgccagagaactgagttccagcttggtggcagtgtgacgttgggctacttcgtgaacagtgatgaacctgtttcctggttttaaaagagaatgattattataaggattaaagtctgtcaagtgcttgttagtgcctgatacattgtaaccactccaaatattatacattattatcactattactttaaaacgacatcacgagatattatcaagcaaactattacttttatgcacgtctttgattttgaggtttttgatttctttcatgctgagttggaactgaaagttttacttttggtgatattcactcaaaattatttattgagctcctattctgtgccagattttgtgctaggagctggggatacagaatgacaaacaggctttgaaggtgcatgtttattcttaaattactaagacaaccaccgaactgaaacttccctgcttccttatttaggaccaagagtaacaagagtaactgtaagatacagacaatatttaatgggtttagcgtataagttttttgagcagatttattgagtttcaattctagactaggttaatgatcattaagtttttagtacttgtttgccggctatctttatttctcattttaaaacttagcagcatcaaagcaaaactctagtactatttactctttgttaattctctaaagtgatataatgtccgcgttttcccatatcttgaaactccttaatgaattgcttagtactttatcataagctgtaattcagccattccttaagtgtcgaatatttagatcattcttcagtttttttgcaagtacagtgtgctacagttacattcttgagcataatgccgattttctctttaagcatgtttactaactgttggaattaattcaacagtaagacttaactgtgtgctagttactaagtgaaaaacagaatttttaaggcttttgagagagaggatagcaaaktgcttttcagagatttttgagtgccttaactacatattcatcagggatatgtattatcaatttttaatccttgctaatttgttaggggaaattgtgtaattttaagtgacagttttgggattaatgaaagagtaaaatattttctctcctattagccaatgcaatgtgaatttgtacacgtttttctattgccagttctactgttgtgaatccaagctattawgttctgtaatttaaattattaacatagcttcccagcttctctccttacttccattctgcctccctactccgttttccttctagcaggcagcatgatcatttgcacartaaaccagatcatgttacttcgttgcttaaatggttgcttttgagattgtaatcacagtcccatcttaacaggcttgtgagttctggcttctgtcttctcttcaattttatctgccactctcccttcagcatcccgcttcaccgtcaacacccaaagctgaaattctaattaaacgattccctgaattctttcctcagcctttcttgtcgaggcttactgtttttctttctctctactcctcaaaccctcgaagttcttcgatgttctggcctttgcttttgctgttgcctcatccagagtgctccctaaccccagactttttcactctagcttcggttcacatttcatgtcttagttcatatattggccttccctggctgaccctgtgatccaaagcaactttcctgcctccctgtacctctctgctctctcatcttttcggtggaaatctgcatattagggatatagactcttaatcatattgatgcaaatatttttccacacttgtttgccttcccatgttcacttatttgatgtactaaagtttaaaatttacctgtaataaaatgcattgctcctttccaggtggtttttaatataataataaagactaataacagcagctaactttagtgtttattagggatcttttaaattcaggtccttttttaagtatgtaataaactagttagcggtagaactggtattttaacctaggtctacctacctgaccttttaactatgctatgttgccgttgttctggttagaactactaacttccttgkatctatacattaaataatataataagcagcacaaaaggaataatattgaacttcatttttgactgatttctagataaggttcataatggaatttttttattgtggtaaaacacaacatgaaatgtatcatttaaactatttttaaatgtatagttcaatggcattaagtacattcacaatgttgtgcaaccatcacccttgttcgtttctaaaactttttaatcatctcaaacagagctctgtacctgttaaacaataactccaaattccctttcccsccagcccctggtaaccttgattctgctttgtctttatgaacttgtctactctgcgtaccacacataagtagaataatacatttgtccttttgtgtctggcttatttcacttagaataatgtcttcaaagttcatttattttgtagcctgtatcaatatctcagttctttttgtggttgaataatattccattgtatagctgtacaattttgtgtatccattcatctgttgatagacacttgagttgtatcaattacctgctgaccattgtgaatagtgctgctttggatattggtatataagtattgtttgagtccttacttttaagttttggggtatagacctagcagtggaattgctggatcatatgataatactgtgtaactcttgaggaaccaccagcctgttttccgcagcagcggcacaattttccattgcatgagcactccgtttcctctacctccatattctccacttgttattccattttttaaaaatagtagccaytctgatggatatgaaatcatatcctattgtggttttgatttgcattttcttaataactaaagatgttgagcatcttttctttttctttctttttttttttgagatggagtttcgctcttcttgcccaggctggagtgcagtggcgcgatctcagttcactgcaacctccgtctcccgggttcaagygatcttcctgcctcagcctcccgagcagctgggattacaagtccctgccaccatgcctggctaattttttgtatttttagtagagatggggtttcaccatgttggccaggctggtctcgaactcctgacctcaggtgatccacccaccttggcctcccaaagtgttgggattacaggtgtgagccactgtgccgggttgttgagggtcttttcatgtgcctgttagtcatttgttttcttcaatacagagaagtgtctgttcaaggcctttgcccattttggaattttctttttgttattgagttgtaggctttatatattctggatcttaatgtcttattggatatatgatttgcaaatatttttccccacattactgaattttcagttataaaaagtatatttaatttctttagcaacatgatagatttgcctcaaacccagtgaacatttaaaaaatatgtcaataaaagtttttcatccttatcagcatatccagtatgctgttgcatttttacagtcactacatagatgcttctgtattttctaaatttcatttaactttatttatatctattttcccatgtatttacatggcttaaatgtaacattctttgctgttcctttctgttcctgtacagcctctagcacagtaccacactctttctagcttactattgaggttactattgaattgataatccttctgctatcgttttatcaaatgatgaaggtttatttagcccagattctttttttgtattatatgtagttcttagttgcaacccacagaatccactctagctaacataatcaggaaaaaaaaaattaaaaacatttggaaactcacagaatctccaggacacccaacaaacaggttaggtgaacaggagcactgcccacactatagtgtgggtatggccacagtgaagctttatcccgacatcacagcttacaccaacagtgctgggttctggaagccagaagtgctgtcgcagttttcccttgagaggtggatgcctcttaccacctcccttgccagaaagatgggtttcctygtttgtttaagttcttccattgctacctctgaattgaagtctctcctcacactgctaactctaaactgaggtcttatcatgtggatgcaggtggttggtagacactagataccacggccagacaagggaagctgagaaggtgagttctggcttctatttggggaaggaaggatccatactgtggcaaattttcaaacacaggaaacataggcaaagattctagatggccacagtataacaatgtctattacatttttaaatacatatttgacctatacagaaactacttatgtgtactttgatatttatgtctgcacagtctacaaagttttggctaatgagaatcttccaagtgaaaatatcttctttcagaaagcagtggaagaagtagtgtcacaggttatatatcagtggagcctgcaaggtcacctgcaaatatatgcaaataagattctgtatttttctcattttaaaatgtagtatcaggagaagagtaaagtgtggtttaaggtggtgaataaaggaaagctctagctggatgactgttttctatwtagtcaaatattggagtcagccttaaaagcaaaaaggcctgtctgccaaatagcttctaaagctcttccaaggagttggctttgagttttaccccataatacttcattgtgtttagtaagaattactcagccttaatattttcttttaaaatgctaagcmtctcatttgtcacgtattaattattcattttctgaatctcttttgtctttgttcctcaacgacttacatgccaacttgggagtctactagaccagcttgtaactgggtgtgtttgtaactgaatcaggcaactacattacgatgaagtgtatttgtatgtagatatgaatgtcacctaaggatatttttatagcatcagttgttaggggctggcctatgaaycgcttaatttttttttcagttatacatacctgtctttgggattataaaattttccttttcatgcctctttccttctagttactcttatatagcaagtcatatttaaagtgaagcaacgtaaaaagttgtcctattaaaataaatttatcatttcttctctggcagctgtggaagttaataaacttgaaatacaaaaaagaaatacgtaagatgaattttgagtattcagtaaaagagaactttaacttcccattagacaattgaattacttatcttttcttgtgaggaataatgtgtgcttacttcactgcaaagtattttttggggttaggggtaaattttttttttttcagcttctagattcaaggggtacatgtgcaagtttgttacttaggtatattgtgtgatgctcagatgtgaggtatcaatgatcccaccacccaggcactgagcatagtacccacagttagttttttaacctttgctgccccccttctctctctagtagtccccggtgtctattgttgccatctttttgtccatgagtatccaatgtttaactcccacttattagtgagaacatgaggtatttggttttctgtttctgtgttaattcactaaggataatggcctccagatgcatccatgttgctacaaaggatatgattttgttcttttttatggctgcgtagtattccaatggtgtatatataccacattttcttaattcagtccgccattgatgggcacgtctttgctattgtgactagtgctgtgatgaacatgcaagtatatgtgtctttttggtagaatgattttgctttcttttgcatgtatactcagtaatgagcttgcsaggttgaatggtagttttgttttaagttctttgagaaatttccaagctgctttccaccatggctgaatttatttacattcccatcaacagtgcataagggttcccttttctccgcagccttgccagcatctgcgtttttttttttttttgacttttttttttttttgagtcggattcttgctttgttgcacaggctggagtgcagtggtgcaatcttggctcactgcaacctctgcctcccgggttcaagctattctcctgcctgagcctccctagtagctgtgattacaggtgcccacgaccacgcttggctaatttttgtatttttagtagagacagggtttcaccatgttgaccaggctggtctggaactcctgatcccaagcaatccacctgcctcgttctcccaaagtgctgggattacaggcatgagccatcacgcctagcyttttattgactttttaatcgtagccattgtgactggtgtgagatgctgtcctattgtggttttgatttgcatttcttgaagattagtgatgatgactattttttttcattttgttgatgggccacttcttttgagaagtatctgttcatgtcctttgcctagtttttaagtggggttgtttgttttttgcttgttcagttgtttaagtttcttttagattctggatactagacctttcccagatgcatagtttgcaaatattttctcccattctgtgagttgtctgtttactctgttgatagtttctttagctgtgccgaaggtctgtagtttaattaggtcccacttgtcaatttttgtttttgttgcaatcgcttatgaagacttagtcataaattcttttccaaggccaatgtccagagtggtgtttcctaggttttcttctagaattcttattgtttgaggtcttacgttcaagtctttaatccatcttgagttaatttttgtatatggtgaaaggtaggggtctagtttcattctcctgcatatggctagccagctatcctagcaccgtttattaaatagtgagtcctttccccattttttttgtctactttgttgaagatcagatgactgtaggtgtgtgcctttatttctgggttatctattctgtttcgtttgtctgatatgtctgttttgtaccagtaccatgctgtcttggttaccgtagtcttatagtatagtttgaagtccattaatgtgatacctctggccttgttctttttgcttaggattgctttggctattcaggcttttatatggttccatatgagttttagaatagtttgttccaattttatgaaaaaatgatgctagtagtttgacaggaatagcactgaatctgtagattgcttcaggcagtactaccattttaacaacattgattttttgaatccataagcatgggatgtttttccatttgtttgtcacctgtatgatgtctcttagcagtattttgtcrttctcyttgcagagatctttcacctccttggttagatgtattcctaggtatttttatatgttttttgtggctgttataaagaagatcacattcttgatttgactctcagtttgaacattatttgtgtatagaaatgcttctaatttttgcacattaatttagtatcctgaagctttgatgaagtcatttattagttccagtagacttttggtggagactttagagtattctaggtataaaataatatcatctgcaaagagagatcgtttgacgtcttctcactctgtcacccagggtggagtgcagtggcttaatcttggctcactgcaacctctgcctcctgggttccagcgattctcctgcctcagcctcctgggtagctgggactacaggcaygcgccaccatgcctggctaattttgtatttttagtagagacggggtttcaccatgttggccaggctggtctcgaactcctgacctcaggtgatcagcccaccccaacctcccaaagtgctgggattacaggtgtgagccactgtgcctggctcctttatttctttctgttgagggattgctctggctagtacttccaatactatgttgaatagagtggtgagaatgggcatccttgtcttgtttcagttcgcaaggggaatgcttccatcatttgcccactcagtatgatgttggctgtgggcttgtcatagatgctcttattattttgaggtatgttcctttgatgcctactttcttgaggggtttttatcatgaggaaatgttggattttattgaaagctttttccacatcttttgagaggatcatatggattttgtttattcagtgtaccttgatgttcaaatacgtttagaaactctccacacaacatctttccttgagaccttctcaagacacgtgaaatgtatcaggttttgagaagtaaagaagctgtttggcttaaaacagtgcttcccatatgtatttatatttgggcaaggaccctgctgctcctgcccctcgcccacccttttgttttgcggggaaggagagcacacctacattgtgaaaacagtgctccttagtgcgtgtttccggaaatgtctgatgggcaacaaaagggcagtgatggagctgagggagatgctggggttgtgaaagaaaagatgcgccaggrctatacatattagccaactatgttcataatttggacgaactttgaaataagcttctctgtaatatttctattaggcaggtattgtcattcttactatctctgttttctcctagaatgcccaaagctgaactactggtctctgatcccttccaaaacttgccactcttgtaacctgcctcaccccaataacaggtggctttgttcttctagttgcccacacctgagccttggagtcatcttgtttcttctttttcacccacatcagccagttctacaggctytaccttcmgactatatttataactctatcatttctctccattttcacctttaccacctgatctataatctctctcctgtcttgtcagacttaatttttgygctgcccggatttgcttggccccacctgcctcctggcctggggctgctggttcagtgtcacaccctgactaatgccaccttgcctcatctgacactgtcagggggtgatggccgagcttgaccctcagaatgattgtcgacccctgtacctggactcargtgaagtgtcaggctgtgggcatgcactctgtctgctcagtagctgtcttgaggagtcagatcacaaaacctgacttgtgtgtgtaggtagcagggaggtggggagtcacgctttggggggacttttgaccaataacagacaggatgagaaaggagccagaagatacactctctccctcctcccgcaatggtgctccttgctcaaatgccagtgagaagatgggaagtgctatttcagacccagtagcgtctctactgcagggcatctcatcatctcccacagcagatacagccctcccctgacagctctgaggtgtggtcatcccatccagcctggctctaccaaatccctcattgccagagcagttggctgggtttctgggaagcattgaccgacgtgctaatgcactccctccttctctgcctcactgccctaactcttgccgcttcggagttttccttccarataaagcatctgcagctaagcttggcctgagctacttttctgggaccctggacaaagcattattgcagtagcctctttactgatcttgcttctgctctggcattgcaagtttgttttcagtagagtggccagagtgatctttaaaaaatatatctgataagttattactgtgattaaaactcctgaggagcttctccgaccactcagaaaccagagtcctgaatgggtccccaggcctgcttgggctagagacactttctctctggggccacatctcctgtggctgtccccttgctcactctactccaggctccctggcctcctggttgttcttcctacaaaaccagcatgttcccatctctgggcctttgctgtgtctcttctctctgtcctagaaagtgcttctccctgatatctgtcaggcccatcccctcatctcttccaggttgctgctaaagagacattctgtaaccgacctacataaaactagaaccactcccttctcccatgctgtcttgctctggtttttagttttctccatagtactttttattgttaggcataatttaaacttgtttgtttattgtctgtctctctcctctagaatgtaggctccatgataggataggctttgtctggaataatccttttatatacttgttgaatgcgtgaatgaacaaatgaaaaaatgaactataggcatgcttgctgtgaaatatctgcagcttgatgtagatatcatccttctgtgataagtttaaacttaagtattaagtctgaatcatgaagagtttttgtaggcatggttgtgtgtgagattttaatagataacaaatatttttctgtaatacatgataaaacatttttgttctttttatttaaaacattttaaatattgtcaaaataatcagggcttttgagaataaattggtctttactcactgtaaaatttaaatcatatgctaacagtgagctatggccaaaataattaagtttaagtggtttttttttttttttgctcttttattcctgtcaagaaatatgaactctttatttttcaaagttgaaaagaagttgatgtatgagagcaaatctacacataattacacggtgattattatcataatgataaataaggtcaaggttacatgtacagtttggtgtctggaacctttttagaatctctgttgccttttgctttcccatggaacattatcagaaatattrgtgaaaagtgctacccaggaatagtgccaaccagctctcctcttgtctaaaagcgtaaaattatatctcatttttagcgactaggtaaagtgtatgttggaattttaaaaattaccgttacttcgcctggaccaatggtttcttttacttatatccactaattattttcattctgagactttaaatcaacacaaacctagccaaacccctttgtgtaaagtaaaacagctctattagagagctgaacattaatattaaatagttcttgtgcatccattactgatttttgttcaaactcaataatgaagttaattaccctctagtactcaatgaatgagactyaagaaacaaatgccagagtcttttagcacaaacaggaccccatagactttggcagatgccttcattagagttgaattttggttcaaaaagaacctataattcaaaggatttgtagtttaaaaattctagttaaattgaaatcatatgttagcatatgattttaaattaactagaatttttaaaactatgctaaactttaatagatcgctaaggtttagatggtaataaagtaccagaataatttctctgcttcttcagaatggatgtttttcttgtgttctcaatttatttttgtgttattgtttgctgagataattgttaaaactatattatttgaatattcagattaaatgatgttctttgttgattgtgacttaatctctagcttgttctccatccagtgagatttcttttcattaattttgaactgtcagaatgttggtaccatggtttgaagaaaaagctgtgaatctaccatttttctaaattttttatggctttgcatatccatatatggcaaaggcactatatttaaaatccaagggtttttcgctatgaagacatcatcttttgcatttccttcatgactgtaaattcaaaacgcttgtgatcccagtattttaactaagaacaaaaacaaaatacaaatatatatacatacactcttatagacatgtttggcataarttcttctatatgagatattcattttacctgaaaaattatacttcagaaagagagtatggccttataatttagtcttctgaaaggaaatctcttcatattactcaattactaaacttttcaaaaatagcaaatcaataaagtactgcttggataaactacattagcctgaagaaacttaatatcatttctagatgyttattgaggtcactcaatggaattggccagaaaccatagaaatgaatttaaagatctagaagtaatttttaggaggatgacctcacaattacaagtgttggatgttattgtaaacaagccttttgaaaattactttataaagcaatacagtaggtgattactwcgcggaaatcacaaatagctactgggtatttgtggtgggcataaaatttccagtgacatcattatacacgaactcaaaaagggctagttctcaagtaactctgactgaaggaaagttggtgtgtccttgaacactgttagatgatttaaaaggtggctctgttgatgatagtgaccctgatttcaaagaggcacatgagaaagtagaataaaatcatttcatgaactttgagtagaaaatatacaatatttccaaatgaacatgctaagatagtgctgtataaaatatgttggaggcttctccttgtgtgaagctctgtgggagcagggattcgttgttttatcatctctgcctggagccagagccagcgtcagtcatgctcaataaatatgtcttgaattcataaatgaacctggttataaactcacaggaaatacttgctgaaaatattttgcagagcatgaataaacacttgacagggttggtaaaaggttttcataagcattgtcccgttcagtagtcaggggataaatcctttctctattttttaaagatattacctggaattatatctttataaattcataacagatcctaaagattacctcagatggcttcttcaagcacatatttattgaatacaagctagccagacctgttaaatgggataaatacccttytcccttcccatgttaacacctaagagctgtaattcttcatgccagttaaaaaaaagttcaaaaaacagagtttgttttactaatgtaaaacattagtaaaattaagtttactaatgtagaacttaattttaatgtaaaaatagtaattaaactgaatataaaaaataaagtatgtttaaattataaattatacaatatgaagtcatttgactattttggctacatccttaaacatttatataatgaaaatggccagaaatctaattttggatattttcatggggaaaataggggattaacgtttattctagttgtcttatgtttgggcacatacagtgggtatgtgtgtaatgtatttgtgtttagacacagaaaaaggtcaggaaagatgcacagtgaactgttctcagtaccaaaacttgtatcctctgccctgcctccctatcctctggcctgttttgtttttcactttaacacttattactgcctatcatattttgtattgtacttgtttatctttaaaattgactgcctcctcttctagaatgtaagctccttgagggtgggatttttttgttgcattttgttctattttgttcaccactgtatccttggatctaaaagcaccattgtatgttggatgctcaacaaatatttgtagaattaatgaataagctatagtacatgaacattttaaaggttgttgatgattgtcaaattatttttttaaaaggacatactagtttatattcagtaacgtctctgtgaccataaatatgccaatataatatgttaacccatataatttactaggtgaaattgttatcttaatttttgattactagtgaagttgaatatttaaaaattattattatgtgcatttcttgttttttatttttagcaatattagtaatacatttgttaaaaaattgggacacactgaaaatattcatttattcagtacataactatggagtgatttttctttgttgcttactgtgttgtatggtgaggatacagcattgaacgagacagtcatgttcctttttccagagattttgctctactgggcaataccaatgctacacaaatagagaagaaaatttaaaaaactcaccaatgatgctaatgcataaacactgacayaacactggtgaagacataaacactggtgaaggcttagattaaaatctttattctaatgtgaccatgaacattaaaataaattatagctttctttctttacttagaatatcttgaatattttcgcttgccattaaatgtagaatttataaacttttaatggttgtatcatactccactttatgaaagtacagtatttgttcgaattaatcatctattctgggacattcagatcattcataaatttgcactattataaataaaatagcatcacttatcctatatataaatattttctttacatctctaattattatctatgtatgagtttcctattgctgttgtaacaaacataaacttagtrgcttaaagcaacacaggtttattatcttataattctggaggtcagaagtcttaaaatcaagttatcaacagggctgcattccttctggaggttctaggggagaattcatttgcttggcttttctggcttctaggggctgcccatagtacgtggctcattatccctttttctatctttgaagccagaagtgtagcatcccaaagccttctctctgacctctactccatctccaaatccccttctctgattttaaccttcctcagtccttcctgtgattatactgggcccacgtgcataattcaggataatctcctcatctcaagtttaatcacatcttcaaaatcctgattcccatgtaaggtaacattttcacaggtttcagggattaagatgtggatatctttggggattattattttgcctatcacaccttaagaaatgtgccaaaacataaaactaaaaaatccaaagtaattttttgggttttaaatgtataccaccaaatattcattgaaatattgactgttaattgatgctcacaactgcattgaccatatttatttatttatttatttatttatttatttatttattatactgtaagttctagggtacatgtgcacaacatgcaggtttgttacataggtatacatgtgccgttggtgtgctgcacctgttaacttgttatttacattaggtatatctcctaatgctatccctccttcctccccgcaccccacaacaggccccggtgtgtgatgttcccaccctgtgtccaagtgttctcattgttcaattcccacctatgagtgagaatgtgtggtgtttggttttctgtccttgcaatagtttgctgagawtgatggtttccagcttcatccatgtccctacaaaggacatgaactcatcctttttatggctgyatagtattccgtggtgtatatgtgccacattttcttaatccagtctatcattgatggacatttgggttggttccaagtctttgctattgtgaatagtgccgcaataaacatacgtgtgcatgtgtctttatggcagcatgatttataatcctttgggtatatgcccagtaatgggatggtatttctagttctagatccctgaggaatcgccacaccaactcccacaatggttgaactagtttacagtcccaccaacagtgtaaaagtgttcctatttctccacatcctctccagcacctgttgtttcctgactttttaatgatcgccattctaactggtgtgagatggtatctcattgtggttttaatttgcatctctctgatggccagtgatgatgagcattttttcatgtgtcttttggctgcataaatgtcttcttttgagaagtgccgcactgacgatttttaaatcacacctggtcctttctagcatttgatattctcatttttaaaaagtctttgcactttcaataataataatggcaaacatttattatatgccagacactaatcaaatagtaatccccaaagatgtccatgtcctattatagttattaactcatttaatcctcagaaaattctatggtgcgggtactttattatcctcttaataggtgaagatactgaggcttaaagacacaaagaaacttgcctaaatcacgcaactggaaatagccaagctaggatttaaatgcagaattctagcagagaaagagagaaagaaatacacaaacagatatccatattctaaatcttcatcaggacgtatgaacacacacacaaaataaaaaattccataagactgtccctaagatagctttgataaaaaataaaataagaatgcctaatgctgaatactgtgtggcttagtggaaaaagatttgtagagaatgatatagttaggaggagacttggaaaggggaaatgagtgaggcagttgaagtgcataggtcttatgacaagcctatactttctggcctagtgcaaaattgtaaaacttaactctccttttagaggtatctgtagcagaaattatactgctagtgttttgcaggataggatttgaaattttattgagtcaataatgatgaaaattagaagctttcaaggagggctaactataaagcaaaggaggctcagaatgggaagacaaatttagagaggattttcttaggctaattttagggatctttgtgagttaattattatatatattatactatatgttataaaatattaaaataattatatttttacaagtctttaaaaaattcagttaactagatatagagtactaatgtttatgtcacttctcattttttcattgacttttccataaatatgtcagaaatgatcacctcataagttatgagaaagcatcagtaaagaggaccgtaaacattttatagtaaggaaccattcatgagtggtcattcactcaaaacaaatgtatgtaaaacaaaatcaaagtctttgttgttcacacctgtaattgactgcatcacatgtgtttctattatttcttgactttttaagtagtttatatcttttgacttctataagcatgtgaataggttactttcagctctacattttttgggcgtatgctagctacttgatgatctttagaagactttcataaggtagtttaatttttagtttttcttttgattattgttgagttagcaggtaaaataatgcactgagttacaattgttgtaattataatgagttataattgtttactggtgtgtatgtgcctgtgacaggtcacagcacaattggcatgccttgagaaaagagccaaacctttcttgtctgaccttgttactttycttttgttgtttctcagggtcaaaaccaagagcagcattgaattctttcgttccaaaataagagtcatttttttgtttgctttttgccaattataaaaatagtacattcttgccaggtgcggtggctcatgcctgtaatcccagcactttgggaggccgaggcaggtggatcatgaggtcaggagttcgagaccagcctggccaatgtggtgaaaccctgtctctttctaaaaatacaaaaattagccgggcgtggtggcacacacctgtagtctcagctactcaggaagctgaagcagaagaatcacttgaacccaggaggtggagattgcagtgagctgagatcatgccacggcactccagcctgggtgacagagcaagagtccatctcaaaaaagtaactaaagatataaataaaataatagtatattctcaatgagaaaaaaatcgaattattcaaaagagtttaaagaaagaagaattacctccaaatctcaccaccaggggatagcctctgttgatattggctgttttctctgtcttaaggtgcacacatacacatacacatacactttataaaacttggatttttactcaagatattctgtaactgctctatgtagtaaataatatggatattgctttgtgacagtaaatatggatgttatctttttaacatctctattttcatacatgtatgtaatgatacactcttatctttacatacttgtttacaattttccttagcgaacatttccagatgtagtataactaggtctaataatcagaagaattatgtcaatttataccacaaatgacatgaaggacagcacattttcttaaatccttgctggcattagacagtgttcatttatccaatctttgccaagctgctaggtaaaactggttaatgtggatttctgtcattattggtgaagtttggcatcttttatatgtttatcgatcatttaaaatttggtatttttgaattgcttgtaatgaaatttctattttaactgttttactttcaggacttgagctttgtaagaattgatgagactgggcaactgaaaatattctgtgctccttaaaagacatgggagctatagtttataagtagctctctctctgtatttgttgtatttagtatccatatatagaaataagtgattgggtattaccataaggaagtcttcactccccaaattgaagactcttgaccttctttcttcaatttagaacagttttatcaagaagaatacttctattttgtagatgtatggttaattaattacttatttacaggacttttgcattcatattgctctgtttgccagtttggaatttgaaatgcttctcctcataggaacaaatggcatattagtttgtgttcacctgawtgccacttagaagtgttatttgcaagtgacagaaacttagctcagactggtttcctaaaagttgtaaatctggactcatttaattgaccaggtccaaatgtaggcccagttaggggtagagtttgaagcaggggctcaaatcatgtcaccagaaaccagtttttttctccatgtatctcagccttgtttcttctaggttgggtgcatttttatatatgttctccccttattgcatcaaaatgcctgtagtagcctctgaacttatctccatccaaggtttaacgtggtaagaaagatcaagctactcttgctattaatagttacacaagaaaaagccaggggtcacctcttattgtgcctaattggcttattttgagttgcatgcccatcctgaaaccggtctggctagtcttactggctcaggcacttgaccgaggcttctagaagctaggagaaggggatttgaggccatctgaaccacttcaacagagcatgagtgaggtaagtttcccccaaagaaaatctgggactattgccagaaaaggaggggccagatgctggtaaaacagaaaacaaatgtccactcattttgtatcctcagtagagtgctcagtacatgataggtaatctcacagatatttacttactgcctgacaatagcactattgggactatatttaagacatttgtaacataaatagaattttgtwggtttcctgggaacttcattgtaggtgtttccaaggtaaaaaatttgacctaaatgtcaaacaattacttaaaaatgagcattgagatagataatcatrtaagttcagacatattaaatactttttaagctagcagtgttctcagaaacaggagaacaaggagggtaatcagtaataatctggagttgattttaggaagtataattcacttattctcttgtatgtattcaattaatagacgtttattgagcgcctattctgtgccaattactgcaatgcctgggtgctgagagtacccatatgaatgagacatggtgtcagcactgagatgattgagtagtctagtgagggagcccctgtcctgggaaaaatgtgacagcagagtgaactggagtgtgatgagagtgcacggatcagccttcatggtccgtcacagcaaacggagctcaagtcattacatctgctttccaaacctccagyggaaaggccagagagcatagggaactaccactctcttcctttatagaacactctctgagagtgtgatgcacttattctgtctcattagtctgactttagtccatggctgcatctagctgtagaggggtggcagatatccttttagcagggtgcattgccacagtgaataaatttgatgtttggttattgaagaggaggaagaaataaatgttgggatatgcaaataatttttgtagagatagtataactagaaatcatatttttgagtcattagtaaaacatattagtaaaatttcattagcaaaatttaatttgatgtaaaatttacttcaaagagactgagcactaaggagaaattgtgaagttccttgagttctgtaataggaaaaatatgttgtttgctatccatctttcatactgtttcttaagtactcatttgcttagtgttcagtttagcattttgctaggtagtttgaaatgggaagagggacaagggaattaaagattgattatcatgaaaaaaagcacggcactatttcacctaaggtgcagctttgtctaggaaatactggtttctctcctaatagacagttataagtagaaggaaaaaattaagcattaatgcaatgttacttcatgttgattcccacaaatcaggttttctctgtaccgaatatggaaagagagttttttttttttttttttgagacagagttccgctcttttgcccaggctggagtgaagtggcgcaatctcggctcactgcaacctccaccttgtgggttcaagcgattcttctgcctcaggccctgagtagctgggattacaggtgcctaccaccatgcctagctgatttttgtatttttagtagagacggggttttgccatgttggccaggctggtctcaaactcctgacctcaggtgatccacccgcctcagcctcccaaagtgctaggattaaaggcatgagccaccacacccggcagaaagagaaaatttatattgtttgtcgtagttcacttactatttttattctttaatagttattttaaacgtagtatctaggaaaggcaaattaatagacaaacataaccataaaagagcatttctcttgtatcagttctttagtttctaaccagtgaattagggtgaaaaggccaagatctttgtcaataatggcaggtagtaaaagatgatctgaagacctatacttcttacttaaatgctcatagagtatcagggctagaaagtgtctttagggattgcttagtgggactatcctcctccaaattggagaaaacaagtaataaatatcctgggaagaaaatttttctgccctgtgttaaaaaaatcctttccccaatacctccgatttctctctttcattctagggtttgatagcaaggtcaggaaagcttttcccatcaatgctagtctcttgggattaaattttagcccgtttctgtttttcctttttttttttttttttattagtagagattggaatcagctagtttttgtcatttgtgaagatctcttcttacattacttgaaactctttcaaaaatatttctcctgcaattcatctcccagatgaacagtatgagtcttaagcttttgtcactggtctaattttctaaccttaattataatgataatgattgttttaattttgatttttaaattttagttaaaataatcattatcattattattttatctatttaatctataatattccagataaatgccaggcagtgaatatgaattttaataattattgagcatttactgtatcctaggcgttcgttayctatattctttttagagaccagtttatgcccttggaaattgaggtccctgcatcctcaggactaagggtaatgctgggctatgtggcctttctgtagcccctgctgaaagtgaatagctaaattgctttttctcttctcttctgccaaggaaagcttcagggctggtgcgaggttgtgggttgaggggctggagaagctgtattagctacctcatgacatcaacatgactttaaatagactttctagagacgttccggaaagattactcatgccttaattttctttctcaaggtcctcctcaaaactccaaattgcattatactacctgacataacatctttattttccattccttgtagattccttcactgtgctcctttttttttacattaatttgccatatttctctcttccaccacttctctggctctggtatgtcttttggtattttgttgaaaaataaattctcctaagatatagtgtcaaggacgtgataatttcatagatctccagcagttcctatccgtattttggctggtggtctcttatatttagtctggtgttagtaacaataataatctaaggtatgtcttgacacaaagtaaattttgtttggacagttagctgactatggaaactttctaaggaaactggatctttgaaaaatatttttaatgtattttttattttattcttggaaataatttatcagcaatttttaaaatgcaagaactttttttttttttttttttccgagacagagtctcaytctgtcatctaggctggagtgcaatggtgcaatctcagctcactgtacccsctgcctccagggttgaagcgattctcctgcttcagcctcctgagtagctgggattacaggcgtgtgccaccatgcctggctwatttttgtatttttagtagagatgaggtttcactattttggccaggctggtctcaaactccgaacctcaaatggtgtgccctccttggcttcccaaagtgctggaattacaggtgtgagccacctcacccagcaaaatacaagaacttttaaaaagaaccaaacaatatactttactaatagtgataaaacatttggcagcaattttaagttcagatccttatrggtctgtacgttctttagtacttttattcctaactaagccagcactttgaatgaaaggacattggatgtattcaactgatctttcatcttacaactagatgtcagtgttaacatacttgattaaatgtctcaggtgtgagtataatgagtaattcagtagttactcacctatatgagatatagattagaaaataaataataaagaaggaatagaattttaaaaatttctttccttatttcaaagtggactggttatgccttaattttctttctcaaggtcctcctcaaaacttcaaactgcattatattatctaacataacgtctttacatttacattttttacatttgcatttacatcttgtaaatattgatttttttcccacattaataactacacaagaacagttaaatttttttatttatttggttaggaaagtcaagaagagtgtgaacttgtaaagcttttcactactaccaacaaaaagttcttccctacagcgtttccagaaagaagaatcatcagaaaaagaaaggaaagtattgctattcaaatgtctgtgtgtgtgtgtgtgtgtgtgtgtgtgtgtgtgtgtttcttgtctatttttgtaagaagcatattgaaagcaagaattatgtatgtatcctcrgtgacatttctaacatcttacctagaagtctctcttgaaataactaaatctaccttttaaatttagtcctcatataaatggaagcgtgatgtccttatgtattcctttcggagccaatctgacaaccttttaaaataatttgtactgtgtttttcagccaagcgtggtggcccacacctgtaatcccagcactttggaaggctgaggcaggcagatcacttgaggttaggagtttgagaccagcctggccaatatggtgaaaccctgtccctactaaaaatatagaaattagctgggtgtggtggcamgtgtctgtagtttctgttactctggagactgaggcaggagaatcaaattgcttgaacctgagaggtggaggttgcagtgagccgagatcatgccactgaactccagcctgggcaacagagtgagacactatctcaaaaaataaataaataaataaataaataaataaataaataaataaataaaataaatgtgtttctctaagtaggatatctcaccttttttttttaaaccaggcttcctgttaataaatatgaaatcctgaataataactgaaatatcatgaataaagtctaggcaaagtaatacatcaaagtactgaaaacacatcctcttcctctgtttcaatgaaaagatactcacgaatccctttcccaaattctgcctcctttttgagaattactactcttggatcactcaagtgatggagctcacataggcaaaattctatagaattatattcactttgacatttttaattatacattttcaaaatctatatatgtaacttaaaagtaaagaattttggagattgtagatttaaactgtatactaagaaatatcaaggcaactagtctttggaattcaagttaagattttgacagaattgacaggtttgctttttaaaacttatctgtaagtttaaccttttccttagaaacaataaccaccccccaattctattttgagaaggcaagttgaattagtgtcagtaatatcttagtacatccatttctcttaatagaaataactttttaagttatgcagtaggtcctaattttataacagtctaaaatatgtgcatcaatccatgcaaacagtgcatttgcttattggctttgaaaatctgttctttcctgagraagaaatttcagttcatcagtttttggatcaccatatgaaatactcatttggcagttgatttttgtcagtttttgtgacctccaggcatataacacaagaacataaaattaattattgattacagtgcagattcagcacatcactgtacattttcattctgcctgaaaaaagatacaagtcctattaaccaatgtcaggcaatcccagtttgcttcatatatggtggaaatacaagcaggctacatcatgctgattacaacatatttaacaaaacagtaaaatagtacaatgaagtttatttaattttcagctctcttacagtgattagtagtagcttaattcttgacttgaattatgatagttttgtgtttgcaaatggatccttatatattaatattttcttttgtttagaagccttcttgatttatgtttcaagatctgatggctttaacagatacaatttataacctcaaatttattttatactaaggccagtaactagttattgcacttcaatgcagaagaggcagctgtctatggcattactgattagaccaccaagtttgcagcacgcaggggatcttacttttcagcaggatacctgctgagtgtcttgagcctagcagccatttagtatcaatccttggagacatttgtgcctttcttttcttcctggcctcatctcttctaggcctcagyggaaggttatgattgttttctgagcgtgtgtgagcctttctccttgccctgtctcctgtggtctgcttttatttccgggtgcctgctgcatgagtcctagttcctcacaccactctttttttttttttttccttttttgatatttggggtaagctaatcagctaactattaatcaactaatggtattaaagaatcggctacttggatctactatgtaatattgtattgctttctctgatgattttctgaagtctcaaatactttcatttttaaaacttcacactttctcctgacttgggtcagggcatgcacataattggttttatacatatttggggaaagagggtggtcattgtaaaatatagctacggctacaattgtggagttccaatttcggctaacattaaagaatatgctagaattctctggatctgaaaacattttgaaaatggttttcttcaccagcaagacagaagggcagtgaaggcattcctttataattatttcccttattcttcttatattctcttctggtctgtcaacatttaaaatgttggtaaatgaaccatttacatttggataccaattaattgttcatctcatttaaaaacttatgtaagctctaattgggtgaattttgtcaaatgtgaattacatctcaataaagctgttactaaaaaaacaattaaagcattttcaatggtactgtgaagcaacattgtattaatgtgagaaggtgcagaacaaatggtagtttatttatataaagttctaaatcatagggcttttagaatatatctcacttttcaatttttagtttgttttaacttaggaaaactttctatttgacttataagtgtgtctcttaatgagggaggaaagcaaatataagaggtaagcactaaaatatttaaatcttctctttagyattggaatgctgtttagagagatgaaccagaagtccatgttcaaatatttcacttcatgcctggcttccccyggcctgaccttccactgacagtctgagatgaggctaataaatgaagaaataaggaaatggattactaaattctgctattttgatttctttctataatgaacttaaggacttttcttttcaagatactccatttatcattacagaaagctgtatacctgcacaagtggtggctgccattgatgtcaacactgtcgctaatgaagtatacaagtataattttcctcacacacagttacttgccaagacrattgaagtgagtaattgtcattgttttaataagtatgtagcaagggaaatgtgattgaaaaacactgcctaatactggtttccgttgtcttaattggaagataaagcatatataaatttaagagttcaggagaaggrgattaacattttatatcctatcagaagatagcatgcttttaaaaaaaagtccagctatagacagggagatcaatattttggtctttcagagaaataattgaaatgtaaggatatgcttgacttctaaatgcttggttctgtggtgatattgaacttcgaaaaagtatttacttttattaaatacttatgcaatatatatagcatgcagtaagaacaagggagaaaatcattggcttttactgaatgcttcttattttagcaaacctgtcaaggttaacctttttcacctgtggtgacttcagcacaagtattgaaacactgatttatgttgagttattttttaaataatgtgaaattggctgggcgcggtggctgacgcctgtaatgccagcactttgggaggccgagacaggtggatcacgaagttatgagttcgagaccagcctggctgacatagcaaaacctggtctctactaaaaatacaaaaattagccaggtgtgttggcacatgcctgtagtcccagctacttgggaggctgaggcaggagaatcgcttgaacccaggaggcggaggttgcagtgagctgagatcgcgccactgcactccagcctggtcgactttgtctcaaaaaaaaaaaaaaaaaaaagaaattgtgttgtttctcctaatttatcatgaaaaattttacaaacaaatttctcatgaaatttctcataatttacatgcaataaatatgtagtttattgtacgtaattttaagtgggcagtytgagtttcgactcaatcatcaactgtgtaactactaccaccacaatcaagacttagaacacttccatcatgctaaattgttcttagtgccacatttctgtcagtctccaaccccaacccaggcgacaatggatctgctttcttttcattatggattaagttttcccttcctagtatatcacaaataaaatcataagagtgtagttcttttgagtggaactgcttttgtttagtgttgatggttttggaattcatcatgttttgttgtatatcaataatttgctcttttttattgttgagtgatattttgtacagtagaatatcatatactacaatatgtgtatgtattcacattattatagacatttaagtagtttctagttttttaccattacaagtaaagttgcaatgaacatatatgtacaaatctgtgtggatcttagttttcatttattgtggataaatacctacatttattaaactttatgagaaaataccaaattttcaaagtttttgaagtgtttttaccattttacattgtcactatttttatttggatttttaaaaaattcattattcttcactaatgtctttttaaagacaattagtcataatatttattcaatgtaaactgaaatttatttttaaatatctaaatatctatatctatctttgttttattttcctgttggattctctagggtttacaagatgcatcttttacttgtggaagcccgccttcaaataacattataccactttatgtttaaattttaacagtattcctccaatttcccctactggtctattttgatattttgtcttgcactttactgctacgaatgttataggcaccaacatacattgttactgttttttggattaaatagtcaaatatctattaaagaacttttaaaaagcacaaagtcttttatatttatctatatacctacaattttcagcactttttatccttgtgttttagatcaaagtttgcatgtgatataatttttcttcttcctgaaaaaccttctttagtgtctcttgttggttatatgtggaaagggacaaattaccttggtgcttttgagtaaaaaagtgttttattttgtcttcactgtgaaatataatttttactcatttttttttcttttttggagaggcagggtctcactatgttgcccaggctggtctcaaactcttgggctcaactggtcctcccatatcagcctctcaaagtgctgggattacaggcatgagccactgtgcctggcccactgaatctttgattgcattcattttgaaagatatttttgtaaaaatctgtttgttttcttttaatactttccagtgttatctgggtttcttaatttctgacttaaggtctgtaataatttctgctttcattcctcttaatatattgtgtctttctttgtctacatttaagattttatctttatcacgtgttttgaaaagttttattttgatgtgctctktatgtttttctttatttgtagtgcttggaccttgtggtgcttttcttatttataattttcatcaaatttggggggtttgaccattattgcttcaaaaataatctctgttctctttcttcactttctccagttacatactgtagagtaaatgatagctaccgaagacagagtgatccgtgataaatatcattaatgcctctgaagaggagaatgactccagtggaacaaaaactcttaataaaaatagataaaaatttttctagaatgaaatttacaatataacatccatgagcccttctggaacagatgactgcatcacttaatctagctgagcaagagakgaatcaaagtagaaaacccaggaatgaagctgccgtgttaggaggaaaactatggttagaaaatagctgaaaatgttgtaaagctttgcagtgtagaaataataatgtaatcggagtgggaagaggcaktgagacacaaaaaatatgtctttgcagataaatgaaactatcaattttttaggacattattcagtgttgttgtcagggtctcagcagagctgggaaagagaaagctcagctgtcaagagcgttaaagtagctgattaaggccacaagccaaaaacaaaagagttaagccttcactcacttacagtggtgttactggcaagaatctaaaagcagagacaatgccactctctcggttccatttacccatggatcagtgtatacgtgagggccctctcactgttgagggaatccttggccttaagggaagggaaagcagggagggctagcagtggaaaagtgctggggactgagtcagaatggcacactctwcaggtgtcatcagtgtcttcagggtttcccacacctccccacacaaggaggccttggcagagaagttctgctcaaggcctcagataaggacacctcggaatgaaggctctgggactaagaatgcaaatgttccaagagcctgactgctggcctggttgcctgagatcttgactacacacacacacacacacacacacacacacatctaaatccagtaacataccaaatggtgaaactttaaaagtattctcattaaaataataaaaagacaaggatgtccaccattagcactatgacttgatatagttgtggatctgttagctaatgtacttacacagagaaatatcatataaatagaaatatttaaaaatgtgattgagtatgccggaaaataccaacaagttaagcaaaaataatatatgaggaacaattagtgctttaataaggacgctggctacaaaaatatgataacctacagcatacaatatacaatatgtctactagaagacataataggagaaagttcctatttttagtaacaacacaagaatctgtataacaagaaatctatataactcacatgggagttaaagagatttgaaaaatgatgaaagcgtactgtggtcttggataggatggctgaatattgtaaaaatattggctctgtttcactataacttcaataaaatagtcaaaagttgttgttttctaatctaccaagttcttcctaaagttcaaatgaaaattcagtttaagaatagccagaaaactttctgagaaaataggcaataaggcaggcagagggacaaatacacctgccagtcaatacaggatgaacagtgttagcccactgacttgatctaatattatctgaaagcaaaagtattttccttaacttgtatagtcatataaggtaaaaaatcaatttcctttggctttaaaatatttagtcattaaaaataacctgtgtatttccatgactactttatttaatccaaatacactttcattgacctagaataccaggttaaataagttgtgaagggttcaatttagtgatgaatttttgcctaactgccttatcagttggcctacactattaaaaaaatcactattttcaagaatctgttaaagctgtaatttttttagtggctagctgtattagagacattgactctgtttacttcctttcgattctagacataggatgcccctggaataattgctatgagagattgttgttttttactttagttgtaggaatttagctgttatcattccacgtccagttgcttatcataatggccctgtatgtacaggctgttgaacttgaatgtgatgtgctaataccctgccccgtgtgttctggcagactgctcagtgtaggattttcagattgctttccttaacactggggagtcgagaagtgctttaggaaattttcaatatctgattttgatttcattttcacagatgtatctttaattatttaaaatcctatgatcaaaaactgatagacaagcacattcaaactgttaatacaatggagacaactgacatgttcccacgttaactcactctttacagaattcagagtaaagcttttcctgctttattcatgtgcttgaacttcttagaagtgggctataattaggaaggttttgattctgggctcatttctttaagtttctagctaaagatgtgcactgagagtgcttaatgtgagttggcaaacccctgacgtgtgcttccctgtgtttgtcttctgagatatagaaaaggagcaacacagcacagttttcagctacttagcccattaggaattcttttgatgcatcttgtcaacagtcatttgaagttcattgcacacaactgcaaaacaaaataattgtggatatctgagaatgaggcccttttccatttgataatatrttaacagatgtatatgaaagggatggtgactggtctgcatatcacatttgctaaataaagaacattattgacaggtaggtatttaaaaatttcctagaccccatctccatgaacgttatcaattataaaataaggttctccacgttttactctagaaaacagcagtgttacacttgaggtgtgatacaggccagatgtgcttaggatccaggaaacaactgttccagctctgggctggtgctgggaccttgggggaagtcacttaatttcttgtagcttcagtttactgccccacttccttcacagtattgctttgagaagttagttaaccaaagttgatttgacaagcattgtattataaactgtttcagtttctgatatatttaattatagttagtattttccctcttccccattctatccatgtttttatgttcttttttccccctaaatgttcattcctcagggcrttacactcgaagagtttgacagattatctttygatatgattttaatgagccctccctgccagccattcacaaggtatgtgtcataaatatttcagtgttgtattggtccattttcatgctgctgataaagacatacctgagactgggcaatttacaaaagaaagaggtttactagacttacagttccatgtggctagggaaacctcacaatcatggcggaaggcaaggaggaacaagtcacgggcagcaggtaaagagagagatgttgtgcagggaaactgccctttatagaaccatctgatctcatgagacttattcactgtcacaagaacagcacagcagagacctgcccccatgattccgttacctcccaccgggtccgtcccacaacacgtggaaattcaagatgagatttggatggggacacagccaaaccatatcaagtgtagagaaagtgcttttgaaggacttactaaatcagatcatactgtagtgtcaaacatggacactctgaagtttattagctgcatttcatagttcggaaattttttcataaatccttctatctacttatgtatgtatttatttatttttaaataataataattattgggacagggtcttgctctgtcacccaggctgcagtgcagtggcatgatcacagctccctgcagcctcaatctcccaggttcaagcaatcctcctgcctcagcctcctgagtagctgggactaaaggtatgtacttccatgcccagctaatttttaaatttttggtagagatggcgtctcactatgttgccacggctggcctaaaagccctgggctcaagctatcctcccacctcgacctcccaaagtgctgggattatacacggagccaccatgcccagcctccattcatatttataattaagcattaatcacaaaggaaatagcagttgctaccagatgagcaaattaatttggtcaaaagtagatatgcaagactgtaggatacctcttttatacttacctaagacacaatgtttatttccagcccaaagtaccttaattcatttaaactaatgagcattcaagaatatctttctaatactgattaagcaaagtgaatttccacaataaatattcaagtcctaaattgcttaattgtacaatttaaaagctagttaagcatgcacttgtgaactttacatttcttaaaattcatatgtacattgaataattctgacttttcatagcaacgttataaactcttcatttaaaaaattatatatatgtgtgtatatatatatttggctatatgtttcaggaaattatatcttcgaccaaatcttgactaattgattttcatttagatatttttaataagagtattttggattattttaaatgaaaatagcagtagtaatcctctaagtgtctgtgtcttatgcagaggatgtcatttaatttaacaagcttatggggtagccattgctgttacaatgattttacagatgagaaactggggcatagaaaggttaactttctcaaggatatacaattaaagaatgtcagagccaagatttgttaatcattttatatattccatgattttaagtagaatatcatatgtaataaccagtctaattcagtgaatgaatattctaatgccaaatttccatctacatttggatttatttaaacaattctctaggaaatgaatttcccaaggatttgtggttcacctacaagccaggcattatttttgatgctgtagttcctgtcctttgggagctcatagtctaatgggaatggctgacaaataattatcttataatgttatcttaaattatcttataagctatataataaaagaatgctgaaagtgtcacaggagtacagaggagaaaagggcttgctgcataccaagagaagggaattctttcagaggtgatgtctgaactgtgtctggaggtagattaggagtatatcagagcaggcagaggccattcyatctcagggtggctctaggcacgtgcaagagtgtggcctgtggagtacagtgagcaggatatacacagcggaatgcagctccagctctgtgaagcctcaggtaatactgcagagggccccgtagctttcctactcccacctcccccttgtcttagcacagctccagctgctgatggcaggagtaactgattctgtagtcctcatgtgaaagtctgacaggaaaggacaaataagaactgaagatttctgagaagtctgttcacatccagtctaatcccayagctgaacctcagatccactgatggttttggtcctgccatcaggtatgaggaaactgaccaatgatgccagctaacttatttaagactctgaagataaatagcatgctttttttttattattatactttaagttttagggtacatgtgcacaacgtgcatgtttgttacatatgtatacgtgtgccatgttggtgtgctgcacccattaactcatcatttacattaggtatatctcctaatgctatccctcctccctccccccaccccacaacaggccccggtgtgtgatgttccccgtcctgtgtccatgtgttctgattgttcaattcccacctatgagtgagaacttgcggtgtttggttttttgtccttgtgatagtttgctgagaatgatggtttccagcttcatccatgtccctacaaaggacatgaactcatcctttttatggctgcatagtattccatggtgtatatgtgccacattttcttaatctagtctatcattgttggacacttgggttggttccaagtctttgctattgtgaatagtgccacaataaacatacgtgtgcatgtgtctttatagcagcacgatttataatcctttgggtatatacccagtaatgggatggcagggtcaaatggtatttctagttctagatccctgaggaatccccacactgacttccacaatggttgaactagtttacagtcccaccaacagtgtaaaagtgttcctatttctccacatcctctccagcacctgttgtttcctgagtttttaatgattgccattctaactggtgtgagatggtatctcattgtagttttgatttgcatttctctgatggccagtgatgatgagcattttttcatgtgtcttttggctgcataaatgtcttcttttgagaagtgtctgttcatatcctttgctcactttttgatggggttttttgtttttttcttgtaaatttgttttgagttcattgtagattctggatattagccctttgtcagatgagtagattgcaaaaattttctcccattctgtaggttgcctgttcattctgatggtagtttcttttgctgtgcagaagctctttagtttaattagatcccatttgtcaattttggcttttgttgccattgcttttggtgttttagacataaagtccttgcccatgcctatgtcctgaatggtattgcctaggttttcttctagggttttatggttttaggtctaacatttaagtctttaatccatcttgaattaattttagtataaggtgtaaggaagggatccagtttcagctttctacatatggctagccagttttgccagcaccatttattaaatagggaatcctttccccatttcttgtttttgtcaggtttgtcaaagatcagatagttgtagataagtggcattatttctgagggctctgttctgttccattgatctatatctctgttttggtaccagtaccatgctgttttggttactgtagccttgtagtatagtttcaagtcaggtagcgtgatgcctccagcttcgttcttttggcttaggattgacttggcaatgtgggctcttttttggttccatatgaactttaaattgkttttttccaattctgtgaagaaaatcattggtagcttgatggggatggcattgaatctataaattaccttgggcaatgtggccattttcacaatattgattcttcctatccctgagcatggaatgttcttccatttgtttgtatcctcttttatgtcattgagcagtgattggtagatcttcttgaagaggtccttcacatcccttgtaagttggattcctaggtattttattctctttgaagcaattgtgaatgggagttcactcatgatttggctctctgtttgtcttttattggtgtataagaatgcttgtgatttttgcacattgattttgtatcctgagactttgctgaagttgcttgtcagcttaaggagattttgggccgagatgatgggtttttctagatatacaatcatgtcatctgcaaacagggacaatttgacttcctcttttcctaactgaatgccctttatttctttctcctgcctgattgccctggccagaacttccaacactatgttgaatagaagtgatgagagagggcatccctgtcttgtgccagttttcaaagggaatgcttccagtttttgcccattcggtatgatattggctgtgggtttgtcatagatagctcttattattttgagatatgtcccatcaatacctaatttattgagagtttttagcatgaagggttgttgagttttgtcaaaggtcttttctgcatttattgagataatcatgtggtttttgtcgttggttctgtttatatgctggattacatttattgatttgcttgtgttgaaccagccttgcatcccagggatgaagcccacttgatcatggtggataagctttttgatgtgctgctggattcggtttgccagtattttattgtggatttttgcatcgatgttcatcagggatattggtctaaaattctcttkttttgttgtgtctctgccaggctttggtatcaggatgatgctggccttataaaatgagttagggaggattccctctttttctattgattggaatagtttcagaaggaatggtaccagcttctctttgtacctctggtagaatttggctgtgaatctgtctggtcctggacttttttttggttggtaagctattaattattgcctcaatttcaaagcctgttgttggtctattcagagattcaacttcttcctggtttagtcttgggagggtgtatgtgtcgaggaatttatccatttcttctagattttctagtttatttgtgtagaggtgtttatagtattctgtgatggtagtttgtatttctgtggggtcggtggtgatatcccctttatcattttttattgcatctatttgattcttctctcttctttattagtcttgctagcggtctatcaattttgttgatcttttcaaaaaaccagctcctggattcattgattttttgaagggttttttgtgtctctatttccttcagttctrctctgatcttagttatttcttgccttctcctagcttttgaatgtgtttgctcttgcttctctagttcttttaattgtgatgttagggtgtaaattttagatctttcctgttttctcttgtgggcttttagtgctataaatttccctctatacacatgcttttgaaccctggtcctctgttcctgctgctcaggctcaattcaagtcttcatttctgcttgatcctctattcctgctgctcgggctcaattcaagtcttcatttctgccttatctttggtcatgttgtgaatctttcttgtaggatctatttgctagcccaagtactgcctgtttacatgacttgttttgaccctggttactctaaccaagttgcacctcctgcttatagaatctagacttcagcttaagtctctcctatttactttggacaaaattgtgttagttttacctactgctttgattggcttagattggccaccagtgccattagcttcgggttgctactccattcagcagttcgttcctctgaactctggttacatcaccaaggggaaagcaaaaagtgtagtcagccagcacatgtgtgtgtgttttcctaaacatagtgattttaagagagcagttggttttattctgcattgacttcttgttcttttttgattaatgtaagtcatttgtcatattgttttataaagataaattttaagtgtacttattagatatgtaaggatttttttcttttaaacctctgccttccaggttcaagtgattcttgtgcctctgcctcctgagtaggtgggattacaggcgtaccccaccacgcccggctgatttttgcatttttaatagagatggagttttgccatgttggccaggctggtctggaactcccgggctcaagtgttctgcccacctcagccttccgaagtgctgggattatagatgtgagccaccacgctcggcctaatttttgtatttttartagagacagggtttcrccatgtcggccaggctggtcccgaactcctggcctcacgtgatccacctgcctcacctcccaaagtgctggaattacaagcgtgagcctctgcgcctggaccccttttttctttataaatgaataaatgtattttcttctctgtaacaacaaagatgaccctattttttgtgaggaccaacttatttttattctccttttgacttaaaaagtgatttgacatctttttatcagattcttaataaactttctgtgtttttttttgttttttttttttttwacccctttaggattggccggcagggtgatatgactgattcaaggacgaatagcttcttayatattctagatattctcccaaggtaaaaacttaggttcctgtacaagyttacctttcatttgaaactccaggtctggaagaatgtgacgtttgtcattttgtagaggatagccatttatacatgctcccttgagatattgggcctgtcatttatcttctcctaccatgactaatagagtaactgcaaatgtttcacaattccatgcttgccaccacrgtgagtgacagggaatcacagcctactagctagatwctgctgcctctgctcatagtgttgatgcagatggtgctaatgttagtgaatgctgttacccatggcctggaaatatgtgcaaacccttaaagccacccttctatgtgagtagccgccctttcagttgacaccacagaggctctgtgtgaacccatgcttgagataaacttcaatggaaatcaacatttcaaatgttaactttatcaagtgtgctgtgtttaagggaaaaatgaataaaatatatgttgtctccagccttataaaattccattttaaaaagagttcagaaaattacttacctcgtatttcccacaagtaatgatttthtttttcttcttagtaatgagatatttagaattccatttgtttatttttttatagattacaaaaattaccaaagtatattcttttggaaaatgttaaaggttttgaagtatcttctacaaggtaaaaaaatgtatttgtcttgcatacatcttagacttggtatatcttatagtaggaactgttgtgaaataaaaatcttaaaaaccagtgcatacattctgacattttatatattaaatgtcttamtcatcagtattgattttactaataatgtattagtaagtattacaataagtattaccaagttttgttcaactgattctcttctattttgatattttctaatttttctagagtaagtggttggtaagaatggcatttctcagttttagtcatttatattggtgcttatttctgtggaagtagaaatgttttcagtaagaattggtcctgttgacaagtattttctgccctacagttggatgcaggaagaatycctgtgtcggggttctttcagatggtggctcagctggagagaaagcatccacccgagtccttgagtcagctgctgtctgtaacagtgctcccatctgactggccaccttgaagataaagttctagttcccatgcagattgatcatcactagattagcaattctgactttcatcagtttggataatttatctggcagctttatttatttgtagtaatgaattatgtatatcttttgaktcartattatttctgaggtgctgaacttwgtaaaaacgtagggtcattatctttctaaacaagtgaagttacagttttcacttaaaatgaggttttgtgggccgggcgcggtggctcacgcctgtaatcccagcactttgggaggccgaggcgggtggatcatgaggtcaggagttctagaccagcctggccaagatggtgaaaccctgtatctactaaaaatacaaaaaaattagccaggcgtggtggtgggtgcctgtaatcccagttactcaggagactgaggcagagaattgcttgaacctgggaggcggaggatgcagtgagccgagattcygccattgcattccagcctgggcaacagagtgagactctgtctcaaaaaaaaccaaaaaaacaagaaaacaaacaaaagaaacccagcttttgtgtacattatttaaataagaactgcctttccaagtaagaattaaagttttttttttttctttttagagacctcttgatacaaacaatagaaaattgtggctttcagtaccaagagtttctattatctccaacctctgtaggtatcacagttataaatgcttatataaattataatttaaaggctttttttcccaaaggaaatttgattcgataagcagaatggctttattttggataatattataggtaaactgaaaatagtttagattatgggtcttccttcccaaagaatttagtgcatgcatataaattcattcatacatattttatgaaaaacaattatatagcttgaaagagagactatatttctcttttagagagcaaaggatagcatattttgaaaatacgtcaagtttggtatttccaaacttggtgttaataatgttaataattaataatgttaatgtttcaaaataatccaaaatagaaaacaatataaacatgtagtaactttctagttactgctttggggacataacattaagttgaaaacactgcttccatttcatggataagaaatttaagtaattgatcatgataagacaagttatttgacagatttgaattttgcaagtgttgctgtcagctttttgttattgttcttgttagtttcttgtcatctttagccatattatattgttctttgcccagaaattaatagaaaacccatttcaaaaaytcaagatacaagctgtggaaattggcaacatatttgatctcttaaaatttatttcrtatttattgccttttagcttgtaaaacatagtgtatcatccttttttaacaaaatgaggtaataaatagccaagaatagctatatttgaatttttaaaktattaatatattatcaataatgaatgtaaaaatatctatactacgtcttagctgggaaatataaaatggaagtgacttgtagatatatttgtcagtttcaatctttaactcattcaaataaaagtacaaagtagcaacttaatagtttaaaatgtactacaatggagtcttctacaaatccgtagcaaattttgctgtggtagaagctaaatgtaggctcgtttgagttttttgttgttgctgtttaacttggtgctaaagttggtaccgctctctttaattttttagagtaactaacygctttgctttgcttacagcttggcattccaaattcaaggctacgatattttcttattgcaaagcttcagtcagagccattaccctttcaagcccctggtcaggtattattattggaattttattatgaatattatggcttatttattataaatatatattagtctgctaatttattttcaagarctactttgtgtagctgtctctgtgtactatagaatctaaagtatagaccatgccctaggtccatcttcaaggctgttttcatcttgccacttttattgttttaaaacaaaacaaaaacaaaacaaaacaatgtttctttttctcattagaaaacaaatgagttaaaaaacttatcattagtattgttatcttcctccttcccccataatttcccttttgaccgttgactattttgcatttatcattttatccttcccatagaagccattggttacttttgataatattttatcttaaaagtggcttacaaatattttaatacatgggttgcattttctttaaagccaatgctatttagcttaattgattaaaatatagtaatgattagtacaagctagaataaaatgcttaattgctacagaaagaatctctaattatgtgagcagttttacatgcttaggtcaaaaaacggggatggataactgagtttcagcatttcggcgaaactctccctaactttcataggtaaggacacaaaagtcatgtctactaataagggattggtagtgtcacctcaatccctttataatatgatactaatattgctccctttccatagtagccaattccaatgtaaagttaatataccttacacattgtattaagttaacagtaactttatacattgacttcaaggacytcatcattaaaaattcctggaatggttttccttttacaaaataggactttatacatggttgtatgttttgcagaaacaagtttttcccataggactcatgagtagaaataacctttcacagtgaaaaccgcttttctttttttaattgctagttttcctttagatcatagctatgttttggtttttcctttttaatgaaggagtatggcaaaacttgattcaaaacatgttttctggaaatgttagtgttgctttctaaacttcttttccaaataagatacaaatatgatttatctatattcagtatatactttctgttagtttattgaatgtttttattaataaatactgtaaacactaatccatgaaataaatcatctgcagcctgatgacaatatagctatatgattaataacgtgtaataacttgtacaaatacaagtaaaccacaatttctatcttttaatggcaaccccataaaggctaatgaggwtgttttcgtaatgttgactggacattgttaatttctcttakttttaatgcaacttttgacaatttgtgtatttttatgtaatgccaggtaytkatggagttccccaaaattgaatctgtacatccacaaaaatatgcaatggatgtagaaaataaaattcaagaaaagaacgttgaaccaaatattagctttgatggcagcatacagtgttctggaaaagatgccattctttttaagcttgaaactgcagaagaaattcacaggaaaaatcaacaagatagtgatctctctgtgaaaatgctaaaagattttcttgaagatgacactgacgtgaaccagtatcttttaccaccaaagtcattgctgcgatatgctcttctgttagacattgttcagcccacttgtagaaggtccgtgtgctttaccaaagggtaggttttaaagatctattsatcctgtatccaaaataaccaggttttttaaagctattgtttctttaagttcttctaaaaacaaggagcattttataaaatgtttttgctagaatgaggtattttcccttaattgcctacttcatgttccagtagaacacaagtaaaaattccgtttggcagaacattatgtgcaccacccacaaaagtgctcataaaagacaatgtcatttgtttggtgaccttcataggagcttaaatacccgtagtggagacatggtttctgtagactattacttgctrattctttagcacttctgtggcacatcatacctcaagtgttcactcttatgatcaatgtataataagaaattaaattttaaactaaagatgtaatattgagtcatctggagaatactagggtaacttttaaatttaaattttattcaggtttttatataagtaatatatgcccaaggtttccaattcaaaagataactaagattgtaagactcccttccatttctgtctcttgaccattcagttcttctccccacatgtgaccaatgatatcagtttactgtataatcttccagaggtattgtatctgaaagtgtatttaagtatccatgtatattttatccccctttataagtaaatggcaggatattatatatatgccccttttttcactgcacaatataaatagaatattatcgcatatcagtacttaaaggactttctgttttcatggtgtaggtatattatataatttactttactggttacctattcatgaacatttagagggcttcctttgggttattacttgaacatttaatacagttctcactaatttttttaaacctagaaaggggaaaattagacctttttaagaaaaattttggccgggcacgctggctcatgcctgtaatcccaacactttgggaggctgaggcaggtagatcacctgaggtcaggagtttgagactagcctggycaacatggtgaaaccctgtctgtacgaagactacaaaaattgaccaggcatggtggtgggtgcctgcattcccagctacttgggagactgaggcaggagaatcgcttgaatctggggggcagaggttgcagtgagccgagatcatatccctgcactccagcctgggcgacagagtgagactctgtctcaaaaaaaaaaaaagaaaaattttgccaaggatctctgtctgtgctttctgaatgctactcaacctcatttggtaggtagttgtatgatttgtcaattcaggctttctgttcttaccttctagctagctattaatatcttgtatgatacactgtaccccagtagaaccataccagagtcattctgaatttattatactctgcccttgtacttcaggggaaagagtttattgctttccrttatcttgaaagacttcactgggctgttgtcaattaccaagttcaataggttctgtttaggactctcataaaataagacttagcaattttgtaataaaaaacaaccttgaaattcttttctaattataaagatggcataaaaggagcctgatggtaaaatttattttggtatagatactgtgtgtatatacacacgtatttatatgtgtaatatatatgaaaaagacagtttgaaaaaaattatttttttcctggtttgactttttccctctaattcttattttaaactgttttctttgtgaaaaagaaataatgctaatatgttgaacagccagcttggcaataatcttagagagagaaatactgctaatgacttgcatttctgaagtgttttatactttctatggagttttttatataatggtctgattgttgtatgaaagtgatcataaaatcatactgtgttaaatgacaagcagacataggatcagtggcactgtgtttgctgtggtgttagagagcagggcggtgggttcctgagaggaaatgatggttcaggcctgataaaaatggcagcaatttcttttcacctgtacaacatttaggttaatgtggcaagggagccaatattgaattatatttgaatataaagtgcatcctttccagtgatgaacattcaagacaagacaattaataaaaagaaatgacaatttatatttcatcattcagtggtgtttactcaactcaaaaaactgtgccatgtttcatttctgagacatttattatttattatcatttttttgagatggagtctcactctgttgcccaggctggagtgcagtggcgtgatcttggctcactgcaacctccgcctcccaggttcaagagattctcctacctcagcctcctgaggtaggcacgcaccaccacgcctggctcattttttwaatatttttagtagagacaggatttcaccatgttggccaggctgacctcgaactcctctgacctcaggtgatccacccgcctgggcctcccaaagtgctgggattatagacattagccactgtgcccggcccattgatgagacgtttaaatgaaactatattatgtcttttacctagtaattttttacctacaaaggatatttatgtgacattattcaagatatttcagaaggatgtaactgtgtagattgattaattcattcaataaatatttaagaaatttagcattaacacatacatcaggtgctgcataattgttgtgttgatttttcagatatggaagctacatagaagggacagggtctgtgttacagactgcagaggatgtgcaggtactrtgcatgttttaaagctaaaacactttaaaacttttaactaaaattgtttaatactttgagaacattagaataattttatgcattcaactggccatgaatatatattttattcattcatatgtatattcatatatataatattttattactgtggaataaatctttttcttgttgctctacatgagtatatgcacaaggaatgttttatgtttttctttttcttatttttaccttctgcttttcttttattccataaatagtagttgaaactcagcctacaatagttaatgttctctaaaatgttgtacaaacatcttaatattggagccctcctttgcagcacacactataaaacttccttttaaggaaaaaaataatcttaacaatgtgctttatgaatacttcagttgttaactcttcatggtgtcatggttgaatacaagtctaatatatagcaagttttatatttttttgaatacttttaaagtgagatcacattatcttttatactgattcaaacttttaactactgataaaatttacccatggtaaaaattctgttataggcaattgaatrtctggatttgagaaattatatttgcttaatatatttartcattttaaggaagtatcttgatgaacctgagtataaaaataaaagttttaatgattctcctgttttattgtaaaattgactttgttgttttgtcaagcttcttttgcatttttcactatatttcttttatattgtcatttattgtttatactcttatgattttaagggctcaaaaatgacagacaccctgaaaaatatcctgatctgttgaatgttaacctttttttcttttcaaagtttacattgcccttattgagccaatatgtagtctattgcacagagccattttgccctgtgcactttgccactgtgtgttacagcagactgtatgtccatcgagtttcaactatctcacagcaggagatcttaaatctagttgcacattacttttttagttatcttgggtattttcttacaggttgagaatatctacaaatcccttaccaatttgtcacaagaagaacagataacaaagctgttaatacttaaactgcgatatttcactcctaaagaaatagcaaatctccttggatttcctccagagttcggtatgtgggatacgtgcagaattcagctttcatgtattaaaactctcaaaaatctttagggacttgtgtgtctaggasttgcctaaacaaatgggctcaagaaacctctttcctttcctgatcatgccatttatggcatctttctgccctctttcccctcataactgcctcattcgrttctctactgactcattctccccctctctaactccagtagtgggtcacagaggttggcatggctagaagggtcacattggcaactccttgcctctttccacagatggctgtgcatagcatcccctttccagcttattttcttttccagaggtcctctcctaatcaccccacactagagcttgtgaaagaatgctttygattggctttttataaattaaaaggcagttgagggattattttcgaagggtgggggtgtattggtatttattctcctcagagatacacctgtgtcagctgtgtgcccctatccttccctacaaggggtaggtggagaaagaggaggtggagaggctgtctaggaaggagctttcataatggaatgaaagggggactcagaagatgaaattgacacaggagatgaattgacacagagttaatgwaagattggggatctacagcaaggaatctcaagaacaaatgggaagatttagttgtagagtgagaaagtcaaaggcctaattccattggcagtccaagaagtccagggattggtgctctgaagagattggacacactgctttggccttctcagagatgccccagcccatctccctgatcccactaccggggccagtgctctcagctctgaggaggctgtgggtttcttaggcctggggtgggcatgctcccagtacctggctgatgggctgggaggaagactcacgtccctcgaatgcttccctggctagagaaggaggaaatgtgcttttgaggactcttgagagtttgaatgcagaaaagtcaaactttgttaagtccaatacttttgtaatattaatatggcactatccctcaaataaataatgggtttaatagatcgtgtttcaaattctaaataatggatttaagctgaggttttggaacacaaccattttgtacatagggaacaaactgccaatataatttgactactctcttggtaattgattctctgagtgtagtcgcagcaaccagktttattttgtactccctgcctctttcttggtgatctcatttttgtcccaaatatcctggggagtgttgtttaagaaaaacacaaactttccttgtagtttatgtcacaaaacgagtgacagcattacaaaacaaatagaagagctgagaattagacttaagaattctcattcctagtctgctttcctagctactatttttttttccttttttcagatgagcaatcagacatactcttgaagacagaaaagagattaactattcaattaaaatgaattcctcagcttttcttcagtgcttttttgttttcaaagggcagtagtcactttggtaatactgaaccttggtaaggagcacagagcccagagtcagactgaatgatttcatatcccagccccaccttaaccgttcccttctttagtttacttctctgtaaaatgaggatgatcataactcctgcttcatagagttattgtgatagttaaatgagtcaatgtttatgaaattcttatctaatatctgagacataatgtaaaatttgttttagctttcatttttagaatgagccatgtatttacttttataatctttatttcataaatatttttctcattttttaaaattttaagttggtgaaatagaatttttcaaagctctttgaatatatatgtataatacttagwaaaacagcctttgaaattactgaacctccttctaaaatacgtgatatgtttttggagttgagcttaccctgatgtcaccactgagcagcaccgtgacacaactgtccctcatgtgtgtttccaacattattgaccctgggtccaaaaatgggcattgtttgagctgtttgtctactggcaatgatggatctgcattgatccttccaaaccctctgtcctggttctgtgactggtggtgtgtattctgcggtagcgggcttttgaagaaaaacactaacctgtcctyacgggtgaaagctgatatcttgaccttgttcatcccatgtttctttgtttttgaggattattattgttatttttaatgtatctaagttttttaaaagttgtcttttaacttaaaaaattatgtcatttttttcacaaattgttagattggtagaaaagtaatttgccatcactttcagtggcaaaaacttcaattacttttgtgccaacctaatagtttagatttaaagaaatatgcacagatgctttactttcagtggcaaaaactgcaatgcttttgcaccaacctaataatttagatttaaagaaatatgcacagatgcacgcacacacacacacatgcacacacacatagatataatttgtacgaatcttacttatttgttttcaaacctttctttccttctgaggtaattgtaatattgcaaaagatcatctctgggatagtctaaaagcctgtttgtaggtacatttgtacctctggctactttgaagtaaataattttagataaataatgtgcttacctaagatattatctttagaatagaaactttatgatcatgtttaattgcaacagtaattgctgttattttattgcagttaataaaatgtcaagtgtcaatgaagcaacttkattgtaactaattctaccttcctgtcctcatgagtatatgaaattttgctattcttaatgctcctaattgtttttcattttcttatctaacttatttttcctttatttccttgctatgctagagtatgctgaatgtggaatcctgccattataactaacattatagtgcacacgcttgtacgtggacagtcttttatgctgatatttgcaaggccttcttccagcatataagggatccatgggcctttttgttttaagaaaggaatgtagcaaatggaagtccaatatgagaaaggcaatttgtggaagcagagtgtaaaaacacccgtggggtacttgtatccagaataggtaaaggactcttaccattcaacaattaaaaaaagagaaatccaattttaaaatgggcaaggatttgagtcaacatttctccaaaaggaatagataaatggccaataagcacattaaaaatatgttagttagttattagggaaatgtaaatcaaatcacaatgtgatattacttcatactcattaggatggctaaaatagaaaagacaagcaataacagtattgatgaagatgtggagatattggaaccctcatacacttttgggtgtgtgaatgtgaaatggtgcagctgctttgaaaaacagtctaatggttcctcaaacattaaacatagagttagtgtgtgacccagcagtttcacccctrtgtatatatccaagagaattgaaaatacgtatctatacaaaaacatacatgaatgttcataacagcattattctcaacagccaaaaaagtagatacaatccaaatgtctatgaacgaatgaatggaaaaataaaatgtgataaatccatacaatagaatattattcaccaccaacaaggaatgaagtattaatacatgctatgacatgaatgaatgtttaaaacatgtttagtgaaagaaaccagacacaaaagacaacatattttatggctccatttatatgaaatataatccagtagacactcctagaaacagaaagtagattaatggttgggggccgggaggtagtagggagtgactgctaataggtacgaaatttttttttgaagaaatgaaaatattctggaattagataatggagatatttgaaaaactcagtgactatactaacaacctcttaattgtacactttaaatgggtgatttttatgctatgcaaattatatccataaaaggattattaaatcaaagaaagaactgtgaaataatagcagccacagcttttttaaaaagtgcactaatacatgcatttctctgagttctgtggatattatatgtgtacatgtgtgtgtgctgagcataacacataatgtgatgtgttactatctcactgtgtaggcaatataatgttatagaatatttttggctccaaattctcttttgttaataaaacttcatggagaccttagtgatttacttatgaaatgaccgctgtgcccttactaaaggatacatcctttcatctctggaaattgtgattacaaatgatttctttaaattgttctttgtctttttaggatttcctgagaagataacagtgaaacagcgttatcgcctacttggaaatagtctcaacgtgcatgtagtagctaaactaatcaaaatcttatatgaataattttgaaataactctgaaagatggtcatatgatattccttcattttcagagagtaattctgaaattctgttttgaactaattctggtgaaatttaactaaattattttaatctgtccttattaagaaatttggattttattaaaaaaatccatgtgtttcatcaaatttatattactgtattttataaaatacgaactattgttatgctttatggagagtatattttcatatgaaactgataaatatatatgtggaatattctttttaaaaacrattttataaacaaatcaaggagcactagagctttagtgtctacatgagtatcttgtgaagtgtcataacaggcataacatatttttatgttaattaaagaagttttttatttctaattttaaaataatgattctaattctagcccattgaatgttttacttaatttccaatcctgtaaatatttctttatttcatctaaacaaatgcatatgatatgtaaaccaaattatcatcattcagtttatacagcagactgaagaatatgtcaggaaaaataatcctaaatgtttgattacctctccatgaagcggccacagaaactgttggtgcacattatctacattttcctcagcctctatctgaaggacaaaactcatttttccttcttcattttgtatgtactttcctttagttgactattatcaaagcttgtttttgtcttctcagcttctgagttgaatttgcctttgcacgctgaggaatgtagcatgacgttaagatttcagggaggaagctgccctctgatcccatgtcatatgacagtactcccctccccccagttgttctttattgtagcaacatacactctcaatgaacttttatgacttttaactttctctgtctctcttcctcagcagacctcttggaattagggtttctaatcaaactaagtcttgcatcataaattctatggtttgtgataaaagcaagtgacaaagagaagagagatgaaaagaaacaagtccagaaatcatattacaagattttaattcaaatttttcttcttaaaaatcagctatttagaggtggataaattggaagtttgtgcattgcttgtgggaacgtaaaatggttcagctgctgttggaaaacgctatggaggttcgtcacaaaattcaacatagaattaccctatgattcagcgattccacctctggctatagatccaaaagaattgaaagcagggacttgaacagatatttgtacaccagygtttataacaccattatttacagtagccaaaaggtagaagcagcccaagtgtcatcccattcacccatgaatggatgcaggaattgtgttccgtgcatgcagtggaatagtaccagccttccgcaggaaggaaattctgacatatgcggtgacatggatgaaccttgagtacattatgcgaagtgaaataagccaccctgtggggatggagaatgggtagttagtgcataatggatacaaagtttctgattggggtgatgagaaagttctggaggtggatggggaggatggttgcacaacagtgtgagtgtacttaatgccactgcaactgtatatttaaaaatagttaaaatgataaattttacattatgtatattttactgcaattgaaaaaatcatactctattaccaatttttcagaactcatagataaatatgaatgtagggaagctgtaagccagcccatatacagaaactatcactatctacatttttcatatgtgttcagacagagcctattacaagtctcataaatttcagtaaacaatcacaaattattttggcacactttcatgtaggttctgttcactgctgaaatattctaaataaaatggtttagagttttactgtaactatgaataattatgctataattatagtatcccacattcggttgagcaacattatacaaaataagtgtcgagttactgtgcaccaactataaatacttgaaaggtctgtagagacatttgcttacaaactggtagacagaatgtagcttagtggaattcttaaattatgggaatgtattcacaggaagacggtgattcttgcccttaattcataattgaaaatatgcagtaacaagcataaaactcacatcttaatgaagatgtatctaccagtgtcattcaattagcagatgtatatgtatgcataattaatttggaaaatgttattttatggaatgtctgctatatgcttttggtaataatgctgtatataaaatttgcactggaaattctgtttcctgatatttggacttgtacatttattcagatgttggaaaacatagcttctcattttcaggagaactatgtgtaattcagtcttcaccataccttacagtaaaccgatttttcgttctccttttcccatcatccctgctcttttaaacggcttgccagataattgtaaggtatttattaccctgcttcatatttttagtatgtcttcaggatccaaaactaattctaagagatgaccaaatcaattaatgtaaacaaaatgagtcatarttggaaaatgatttcgaagaggtgggtagtcattgtaggaggggtcagagcctgacaatcctcagtggcaggcaagaaagaggaatgayggcatcaccttcacagaggaccctggccatggtgttctgtctgtgaaatcagaccttcaccatgggcactgccctatgtctggaaagatgagaaaatacctccaaccttcagccaacttattcttcctcaaaaaggagagccttctaaagaggcaaaaacagtagttgaaattgtgaacagtgagggtccacccagcacttttttagaaatttgagggtaaactgttgcttgaaattatccaacttttcaaagaggtaaagttatttagtagagaggcttttaagttgccctgaaaggctgtattgctaccatgtgggatgtaaaattggatggggttagagatgagtgcaggcaattcaacgcattggtaggggtggaagttctcagcagaaatcaccatctgggtttttgctcccatctcaacctagttgaggtctagagtgattaagctggagacttctgaggagagagaaatgaactaaagataaatacaactgatttaattttagccatagcagaacagaacaaagaagcaaccacatttcatctaatatcaagcacctactaaaggatgcattctgcaggccagctgcatctgcatccaaaccaaagtcactctggttgctcttttgctttgataacttaagagtttagaaacaagcggtttctaaaaaagccaagataacacaataaggaccaaattttaatcccacatagacaaagagattaaagtgggttttcctgaattgcttatgttatgaacaggttaccttgtcataatttggccttcggcttgggattctaactgttttaggccaccagttatgacactgacttactaatagctttggactttgaaactgtgtgagggtcatatagcctcagcagttttcttgtagcctgtgattgcattgagattatataatttttaaagacatggcctttggacctctgtctactagttaatctcttccatctaccattcaaatgtgctatatacaactatcatatcagcttcttagcaagcacttttctggacctctgtcacacccaccaagatgtctagttatgcctttcatttgagagtttccctttgctgttttttttgttttgttttgttttgttttgttttgtttttgagactgagtctcgctctgttgcctaggctggagtgcagtggcgtgatctcggctcactgcaatctccccctcctgggttaaagtgattttcctgcctcagcctccctagtagctgggattacaggcgcatgccaccacacctagctaatttttgtattagtagagatcgggtttcaccatgttggccaggctggtctcgaacacctgacctcaagttaatccacccaccttggcttccctaagtgctgggttttacaggcatgagccaccacgcccagcctccctttgcatgttttttaaaaaggcattaagcatcttgcacatgttctttagtttcagtttgcatgagtcaacctgtgtgcatcattttccctttcactatttcttgtctttgctggtgaaattttaaagcttcagtttaaaaaaaaaaagaaaaagtattttttgttgttgttgtttctagcttccgtttctctctttaggctgtctaggaacattttaaggtactcatgctcttcaaaatcttacacaatcaagatccaaactccatcaccattcatgtcttagcttgtgaatttatttctttttaaatatatttgttcaagaaatatgagcatgtacaatgagctgttttggctttgtattccccaagttctcatatacattggctttatatttaccatagattctgagtcttactttcagccacatccagcacttactgaagtctccctcaagtacaccacacttgactcctaaagcttccaaaatctcatttttcctataaatatgagaccggaaattttcacaaaaattacaagataggaactgagttctcccatagaactcttttctgaataagcctagggttttttcatttctttgcttgtacctagcatggcttcagtgtttacttcaaatatttgctctgtattttgtttgcattttgatttctatttttatcaggacagattgaaattataagagtgtacatagagaacatgtttgtttagctaaattagctctataatcagatgagatcacctagagggtcagaggatgagagtgaaagagagaaagagaaaaagaagagcagaggcttggagctgacttatctgaaggttccgtcctcaggtctctttctacccttcacttttcatgccatttttcttagagattctcaccctttcctacaacttcagccattttgccgatgacacccagatgactctaaatctgctgttttcctaagtcctattctagaatcttcatgctgggacatttttaacttggatatcttgctattcaagttgtatcggatttgcatcaaatttagcatgcttgcaacctaagcacactccattctatagtcagttccactcttgactttaatatttatggtacggttagtctccacatcttccaagttcaagcttcataaccaaagatcatcttcaccttccttctcactctgcattccattggtcagcttctgttaaaatggccttcctaaggcaggcctctgaacgatcatttatttttaggaaaacttataaaaagtcactgagatttaaaaacacccacacatatatttgcaatcatatttgtgtgcttggttaaacatgtcaacatttaacagatttgagccttctaaatttaatccagcatgaatgtcgtttttactaaaatatttgctattttactcacttagctggttccttacacaagtccagttaaatttcacatgtgaaaaaaatgactgaaaacactgaatggaatgtgatactccttgtgtagtagaaatgagttgactttcatatttaagagctgatcctatgaatgagtagacaataagctgaatagctgttacgatctgagttttaaaaatggaaaatgtttcatgttttagagaatgtaaacttccacaagggcagagattgttaatacgttgtccccccagtgacttaaaacagtactggcacatagtaagcactcaataaatagttgttgaatgagtgaatgtaggaaccatactggaatcaatattgaagctacatagaaagcaccacactgtggagttcaaacaatgtctttaagttgttctcttgaaaactatttaatttgtctgttactgccacttcttccatgcccagaggaacagccaaagttactcaagtctggaacacatgatttaaaaaataattctgggataggcttttggcttttggaaagtagcgcaaataaaactttttaaaatactgtattctgacttccggtcttgacaagagagtgtagatttatttctccctgctcctccctgaaaagtgtaattataaactctgggtaagtataattataaaataatgcaagaggaatcagaaggagaattctgaaaggtgggaccaggaagacacactgcggagggaccccaagactagaggaacaacatggttccaagacatctgacccctcacccaacagaggaaggttacccaggcttgatgtttcccgacctacaaccacacaatagaagacagcccagagaggctcgttcctacagaagagggaactgaagtctggtcggtaataccagatgagtctggctctaccagcacgggggtatatcaggaatcccactgacaaacatccagacctgagacttgtcttttgtgctgagagatgagcatccaggggcctctggcaaaaagcatctaacccaggaagattttttattaccctgagcctgagactcccttctcccagagataccatgggacctggcttgggagaaaatccttctttccctaaagtagcatcatgaaggaccattcgggaaccccagcagcaccagataaaccaagcagaccaaaataacactgcaaaggctttaaaaactaaattaccactggactcatagcccacaaaaactaagccagggcttgcatgctaaacacaaatggagtgactgcctactaaaaataaaagattaaaataatagacaaaaggttcaggatacgatgtaaaatagcctgtcataccaagaaccagaaaaatcacaacttgaataagaaatgacagtcaacagatgacaacactgagacaaatcagatgttggaattacttgacaaggattttaagcaactctcataaaaatgcttcaacaggtaattacaagttgtcttgccacaaaaaatagaaaagctcagcaaagaaatagaagttaacaaaagaaccattatggtaggtgcactatatgccaatttttaagaatagaaataaatggcagttatgtaactgaaaaataaccaaaatagaaaacattctgtggtaacagataatttgattagatcctggacattttgtctgttacattaactttattttcagaaatttaattatgatgtgtcttggcatgaatttctttcaaagtggcagatatttcaaagtgaatgtaatatcctgtttggtgttcattcaccttcttgaatctgtacatttatatcttttgctaaacttgagatcagtagtagagaggaaatgacagaagatagaaatcagtgaacctaaggacggatcagtagaatttacctgatctaaatgatagggcaaagataggctgacaaaaaaaattaacagagccttggggacctgtgggacaataacagaagaaccaacatttatatgtttggggtgccagaagtagaggggaaaaaaatggagctgaaagagcatttaaataatggctggaaacatcccaaatttggcaaaaccttaaaagcagctggaggctgggcgcggtggctgacacctgtaatcccagcactttaggaggcgaaggggggcagatcataaggtcaggagatagagaccatcctttccaacatggtgaaaccccgtctctactaaaatcaaaaaaattagccgggcatggtggtgcatgcctgtagtcccagctactcgggaggctgaggcaggggaatggcttgaacccaggagcggagactgcagtgagctgagatcgtgccactgcactccagcctggtgacagagtgagactccgtctcaaaaaaataaataaataaataaaagcagctggagaaaaatgacacgttgccatggggcgggggacacaatttggatgacagtagatgtctcatccaaaaccatgaggaccagaaggaggtggcattgtcaactatgaattctatatctagccaaactatccttcaagagatctctgttttatctatatatgtatcgatacacatatacctctatgcagctctttacaattattagggcgagcaggtagttaacatggaattaggcttatctgatatgtgaaataatcaaagatgaaaggaagacacctaacgtatagctaatgattataactgtgaaattattcatctaaaaatagattggaataaaataatgatagcagttatgttagagtaatagcattttaatttttcttgtttatatttttcaattgaatgtgatcttttt

SEQ ID NO: 95176 - DNA, 21452 bp, Homo sapiens
cctccagccttattattttaagagccagattctagaaatatcagtcgctcttggcaagttctggctctgttgggggctctctgcaaactctgctttcaaaatgcgtgatgctttaggttttttgaacaaaacaaaaaagtacagtaagacaactacgattctcatcactgcctgcccagttgacagcttctcacctgacttcctatgatatatcttttgtttgaaagttccctgtaatctaatggcagctgcttttggttctttgaattcacttattttccttgtatgatgagttatcatggctatagcttaggaggacttgctaagctctcagatctcattcttggtaacttttcctttaattctacatcaagtaaggtcatacggattgaacattctatgtatggcaggtataaagtgtcacatccatacttgagatttcatccttttcttgactgatatagttagaattttggaccaacatgaagccatacgttgtacattgagtcttctgtaatgtgctggtaaccatctccatttagcggttcaataatttttgacaatacacctgccaagctagctttccaacttgccttctatagagagtttcgtgttgaaaattccctagagatgtggctatgacttaggtgtctttcagagtgactgctcttctggttcatgtacaaagtggggccgggctcagtggctcactcttgtaatcccaacacttagggaggccaaggcagttggataatttgaggccaggagttcgagaccagactgggcaacattgtgaaaccctgtctctacttaaaaaaaaatttatatatatatacaaaaattagctggtatggggtgcatgcctgtaatcccagctatttaggagactgaggcatgagaatcccttgaacctgggaggcagaggttgcagtgagccgagatcatgctactgcactccatcctgagtgatggagtgggaccctgtctcaaaaaaaaaaaaaaaaacaaaaaaaaaccaactcccaaaacaacaaacaaacaacaaaacaaagcagccctctctggcatgtttgcttttttgagaattgttatccacagaaacagttcctgaatatcgacctcaataatttttaagtacatttgcaacttgttgacttgcggaattcctagaggacaaaaagcatgtgttaatacatcctactaggtcttacatctgaaaacttgggctatcaaagcacaatgaattcaaatgaccttgatataaaactttgtcttcttactttggagaagagtcatgtgatccttgttttgagttttgagttttgttttgcttgatattacaggagagtacaccttggcaactctcctggagaattttggtgttcccctcagttttatctaagtctaacatacttaccgttcattttatgccatttgtcttaagtcaggccctttggtttcagcttcctttactaagccttgcattcttccattcaattcataggcatacactactcattagtcctacaatatactaagttgatagttggcagttattaggctcttattataaattgggtaccattgtaattatatgcattaactcacttactcttcacaacaaccctataatttaggtattagtgttatttccactttacagaaatggaaattgagcctctgggagattaagaaactttcacagctcctaaatgaggaagctagtattcaaattaagacccatctgattccaaagccataagratatacggcttccctacataactccaggcagactctttctggttagaaatgtacagttcttcagtcaaaggagtatatgttctgaaatgaaatttggagacyrcaaaattaaagataaatagcagatctagkcccaatttttttttgtattttttatgtctgattctctagacagtccttgggtttgttaatttattattattttttcctgttctaagaaatgctatttctgcttaagtgctgctggatttggaaatcattttcatgactaaatatttgtctgcctggtgagagcccagcgtagggctgtgctgtccgtagatactcaatactgattaatggatggccgtgcatgtctgtgtgggagtcgtgtgcttaggatctgctcagctctcygaaagcaacagaaatggtgtggggaagaagaaaatcacaggattgtgatccaaccatgatcacggctttctggattggacttcatcttctggagggtccacaaggtccaggtacaggtgcaatgggagtagggagcctggtgttttcttgagagatggttgggagatgctgcagaaatgagagtccagggcccacttccaagattcttatcgaatatgagagaaaacttggttctctaatgaggactgaagaaaatcaaatatttttttaattgacacgttttctattattatatatatgaagatgatgagtaatatgccatatcagatggtttatccaaactgtcagaacaagagctgaagcgtgagtaactttgcagagaaccttctgggaaattcaagcagtagaaagtctcagtaaccagccataagttcgtttactaccaagtcatccttgaaaattgtgggggaaccaaaaggttcccccaaagtgcacagtgagatacttctggaggagaggaaggagaccaagaatttaaatttgcttcactacagagccaaatatccatgtgttgcccaggcttgtgcagttaatagaaagtctggggtcagccacgtggcctgggagggagtgacttcatgatgaatgatgactgctgagtgcctttctaaatctcagcagagctttaaaatgtgagggcactcacttgcaaaatcaaatttgctttggcgtcagagaaagtaggaggaaagcctcagttactagaactagtatggccagtctcgggctgggatgggatatatccatattgtgtagaggggagtacagcagcaagctcattgaatggcattgatcctcctggaagctctctgtttcggtctcatcatctgcatgaacagagagtccatttcaactcttaatattttataagcattgatgagcattttatgagcatttgactccaatatatcttaagcgttagtcaatgggaaaactccacatagcttgaggttttgatgagaacttctctatacatctctaccttttaaaaactccttttgtgtcacctacagaactcttcatagcaatagagaggccttatgaaatttgataatctggtgcatcagagttttattaatatcctacccccccagtgctggcagcaaacctcaccattttgtcctccaaaaggaaggtgacttttaagaagcaatccagaaggtgtgttaggaaagtaagtattatggccaggagacaacttattatgtgtttgctccttaaaaatatgaaaataaggcagctcatgtgaacaaaaatattatggaactatgtgtataattatgcccaagcaataggcgcgcatttataaaaccactaccctaaaataaaagttaagggcttgagaagtgggaagccctattttccaataccaggagcagtgtggctctctcagtagccaggaggtggagacccccaccccgctgagccacacagcacagcttttagggttgattctcccagccaaggcctgaaggagctactgacatttctcttaaaagaatcattcagtctttgtttccttctgtctgctcgtttgaccttattttgttttgaaacagagaagaaagaaagaaagaaagaactaaattggtggggtggactggagtaggctggggggyggggagattgaggcacagggaggaaaggagaagtccatgctgtgacacccgcagacaagatcacaggctgctgatcgtcacccaggatgttactgtttgcttgctgtagtcttatttgttcctgcttttctcatttcagattctcaccctgatgtaataagtcaccgtcttcccagccatcatcctsgtattgacaagcaaatgtcacccacgtttgattgacatctgttgctcctgaatgcaaaagtatgatttaggattcaattctacttatttatttaaagccattcttgtgtgtcttatgtatttgttggtggggtaacttgcctgatatctaccctggaggccttccagtaatatgataaaccatgctgttccttctgcagctcacccactgagaatgggggctcttctttcttgtatttctcctacttctcccctccctcaatgtatattcgggaaatctgctatggagcttatagaactctttccatatgctaggaaaagaccttgcccagcacttgtgcaaaagcttcttgcttgatcttttgacgccattttgacaagtggttatttcttgtacatttagcgactttaagtaaacgcaacttcagggccattggcggtatcccccgaaagactgctagaactgtaagactgtaagcacagtacgtatgtatgcactcaccacggtgcagcatttgtaaaaaggaccaaccccctcctcccccagaggcggtggacatgttcatttaaaatcattcacaaatgttctttggcttttcaacatacctcactgttcttggggcaacatcttattcatttacaaggcagaggaggaaaaccatcaggttaaaagaaaatcacatctaccatctggaaaattctaaaaggccctccttctgttaacagtggcattttgaaaacacctgaagcactgattgtagaggagctagcaaagaaactgtcaactcagccaccctcctttcaaccttcacctccaccctccaactggggctgctggcagtggggaaatcggggatttaggtgtgacccttgagctctgaaagctgtcgcacagctgtctcccttccccaggtgggtccagcaggacctgccatcgcttggttcagcaagggagtattcagaatctcactgttcatccatgtgcagagagagaaaaaaagagaggccgaaaaaaaaaaaaaaatcccacattgtcagagtaatgccaaactctctctgagtgggatgagcagagcagatgctgcaatgagatgccaaagcggctccccttcctctgtgccttgggtgcctataaattgctccggcgcgcgtttgtcagcctcctcttctcctggcaggtggtacccaggcagaattctgccttcagtctctctctcgctccgctcccggccgtgaggcgctcgccgctgctcgctcgctcctccgccccagctctgagcctcgccgtgccgaccgtgcccgccgccgccgccgctgggcgcacccgggggacgcccgggcccacgcggggctttggggtgcgcgtctattcgagttgtggtggtggcaaaggaggaagagagaaaggaggcaataaaaaaaaaaggcagcggacgggcgaactgagcgagcgaaagaagaggaggaggaggcagaaaaaggcaacttcagacggaaagttggtgcgaacaggcgcagtctgcaaaaacggaaaagtcgatcgcaggcggcggcggcataaaagtgtgagctgcccgggcgagctcaggaggcggcggctggctctgccctcccggtggccgcgccggcgccggctgcagccacaggtgcgaaggagctcgcggggggcgagggcgccccgcgcacccctcccccggcccccaccccgggctcgggacttcggctcaagtcactgggcgcccgcgctccctccccagccgcagcctccgcggggggagcaggagtcggcagcagcggccggcgcacgcacgcccaggggagttggggttcgcagggggttgttttcggctctgaagaggtccccgcccaaccttcaaaattctgtccaaaagcagacaagaggatcgccccgcgctgagccggctggtgggcagcaggaggcgcctgatcgccgccggggcgctgggggtggtgatggtgctgctgctggtgatcctcatcccggtgctggtgagctcggccggcacgtcggcgcactackagatgctgggcacctgccgcatggtctgcgacccctacgggggcaccaaggcgcccagcaccgctgccacgcccgaccgcggcctcatgcagtccctgcccaccttcatccagggccccaaaggcgaggccggcaggcccgggaaggcgggtccgcgcgggccccccggagagcccgggccacccggccccatggggcccccgggcgagaagggcgagccgggccgccaaggcctgccgggcccgcccggggcgcccggcctgaacgcggccggggccatcagcgccgccacctacagcacggtgcccaagatcgccttctacgccggcctcaagcggcagcatgaaggctacgaggtgctcaagttcgacgacgtggtcaccaacctcggaaaccactacgaccccaccaccggcaagttcacctgctccatcccgggcatctacttcttcacctaccacgtcctgatgcgcggaggggacggcaccagcatgtgggctgatctctgcaaaaacaaccaggtgagcgcgggcgggcggcggggagggcggggagggagcgcgggaaggtgcgggcgagagggaggagaccccggaaatgggggtgggagcccgcggaggaagggcgcggcggccgggctccctggagcgacggcaaggggggacgccgtcccaccctggagaggcgggggtcgtgcgcgcaggagggcgccccgcggcctggagagggcagttccggagtctgggaccctcgatcggtgcgcgcccctgcgagcgcgaccctcgargggcgggaagccgggagctgggtcccggggacagctcgtgcgctggggagtcccggcgcgggaagcgacccctggccgtgggatcctccgcaacagagggtagcttacgggctttctggggagtggagaggcctgggggagtccggaatgggcgtggcagggtgaccgactcgggggtggtagacaaaggccggagggagaaacaagggccccgaaggaatgagtccaagcagggctcagccacagcggaggagcgaccgtggggctcgccgtcgccgagtccttgcggtgtcccaggccgtgaaactcacatatagtcaatttcaaggcgcaaactccagtttcgtcttcagccaaaaaatagcggaggggagaggcaaggagtgctgataacaaaaagaatagttgagattcgggggttcatgcggtgaaacacagcgcgcagccagactcagaacccaaactctctatggagtcggaggacgctcaggcaggtggcctggggggcgaccggttcgagcccagccccgggtctatcggcctctggaccagccggccaagaggatttgattccctgagccggtcggcgccgctacamgggctacgcatgggtctgcagtattctgctggggccactttactgtggagaaattcgaggtcattgcaaaaccgaagcttgtttgatctcttagtcaaaggaggaaaataatatttgtaactacctaaaagtgtaatgggaccttctgtgcacgctgaatcagtagccactgaggcgaggccttgcagcctgcagcctgcggtgtgggctgagtttctcggttttaactttgcttattgagtggcataggggatggcccgcgaccctggcatcgccatcaagagacctcctctcctgcagcaactttgacttaacgaggtctattgggctttaggtaactcgacccctggacattcagagattcttagctataacccaggtttctgttaagcaccattcaagcaggattcggaagacctacttcagtgtcagaattctttcaaaagtgaaagaccaaaaaaaaaaaaaaaaaagtcctaaatgcgtaagagagaaaaaagacaaaaaacgtcctattctctaccctatcctacaaatagcttaagggaccctcaggacacatataacaaaaagaggaaaaatggccaccaggaggcactgacagggttgtttattatagttattatgcatgaaaataatattaagataaataaaaattattcacagaacagtaaaacagttataggcaaatggctaaaacgggcaggactcactgtaccagaatggagctattgaatcaccctcacaaaaaggcttatgaacagtccctcagcaggcagccatgagacacccctttatttgcaaattggctctcttctgactcaaaggtcaggtctggaaaatacaatcgggctgaagagatgatttttagaggtatcaattaaaatgaaatgattccaattttatcagcaaatgtgtaaaaatgctcacatctttaaatatctggaaattgcaattgcatgaaaaaagaagggattaatacatttaaattagtttaaatgttgatgtctagactgctgagcctgtgtatattacactgatttgaagaaaataacaccatgtaggtgttctatgtgcgttttgtttttaaaattatttcactgtttggggtgtaaaatcttcctttgtatcacactagcacacacattccatgaggatcaggaaaaatagtaaggtaaaacagctgaccttataatgtataagtcttttcattggtaatattaagctgctacttctgcaaaaggtatgcaacaggtaattcagaaaaataaatctatagtggtaaacatttttttttagttcagtgtggactattttggaaaatggttactacactactacagttaaggaattttatctctagattagaactattttgtcaagtccagtctgcaggcagttacaaatgagaaatcttttaaaatctttttattaattttaaataatacttcactcttgcttttcaattatattctggtctgatcacttcttagaatggcaggttccctctctgagctgacttaatttttcataaaacagaaactcagagatccatgtcagtgtaatgttctatggattaagtggattttgagaagcacaaaaattaaactaaaaatgcagttccctctaagagagagaaatgcttctggactgtaaccatatgagagccattttatttatactttgtgtagaatgtaagatcacagatggaaacatcaaagaccagtaaattaacctgatgtgccacttaaccttttgtttatgattccacagaagtacaatgaaaatgaaattacgagaacatcagtagcaattaattaaattacaaatgtcaccataaatatgatctctaatgatagatcctcactaataagataatgctaaaactatgaaacctattgcagacacagaaacatatccctaaaatgaccgcagctctcatactccccatgaagccatcaacctaaatttaatcctaccatttgttgaaagcccatgacagtgcatattaaaggtaaaagttcaactcaaatagctttacatttggaaagaggaaatctctttaatgttgataatccttttagcagaaaacatgaagaaaaattgctatttgaatacaatcactctaatgccactataataaataagccactcgaatgaaaactaatactgtttcaggattaaaagcataaaataattaaagaccagttggtactcttaaaaatttattagttatggcaccgatgcccatgaaatatttttaaaaggatgagtggtttgtgggttggtattcgcttattagagagatcaatgacatgtcaaattcataatctttttagggttaaagaaatacggactaaacataaagcagaatctaaatagttatcttgtaataagaaaagatattagagtaaattcaggtagaaatcggttgattgcgctgaaggaaggatggatcttattcccagacagaatgctgaaatcactgtacatttaggaatctggaaacagcctccagggtgaacacattgccttcctcaatagtttgatggcttgaaagaattgttgaagtcactgagctgaatactagagcttgaaatttcaagtcctgttatatctttagagtakgatcaggtgagcagccataccaaaatcatgccaggtacactggagtatggcaattatttaattgggacagtcttacggtacagtataggttaaaatcttacagaattacattcattaaaaagcaaccacactggcttgatccaacaaaggtggtagaaactgtgagggtaacctttcagtctgtggaatcactctaatgcattcgcaggaatttgtggttacgcctactgaataaaaatggtgacgttcactcggttttgtggttacaccctggagaataaaaatggcattatatttttaaaaggattaktgtgtctaaatcaagtaattttagtatgtcctgtttctccaayaccttcatgtagaaaaccatgttaaagcccagtaaccatagmacatgtcctaaatacccaaagcactgaataaaatatgtctggttattagtaatagctgaggagtatattatgggttgataactaatgtattactaatatagctcatgaatattttgtttttaatttttttcmccattaaaaatccaaagatgagaaaaaracacragtcataatagcaatatccttcttgtagatttgtttccctgggaattaatggctagatgaaattaatgaatcaaagcattcaactcctacaaactcatgattaatctttagaaaatattatgaagtcaaastgcrtcattatttaatggtcaaaacggaccactttactaaattggcatatatattggagtcagtgcttccaagcataattacatggtatattgctttcattatattagtgcctgttagtacagcgttaagcaattctaaatcctttaagccattttctccttttgctatgtgatacccagaaagacactttaaagatactactcaaatgactttacaagttcagcagtgttaaagagtcttctttttttaacatttcagcattaacgtgagactatatcacaagaaaatttaattggaaaactcatcatttaaattttgaaagaaatgcatggaaattcttgacttctgtctcatttctctcattttgccaagtgataaaatccagcatattgtaccccaaatcatgcattattacatagtgcagstttacaaaaccactaaatcacttgctatgttattcagggaaatatcattatagtggaatagaaatgaaacaagccacaaagtagaagatgttttactgaaataaatcaaatctaagtctgcctgttgaaagattttccaaggcagaatcacaatatatctaaatgaatatgaagcctaatttgagctaaggatctgacagaatgtccacaatgcatgagatgataggcaatttgactgtttgtaaatgtctatcaactcactaatgagatcacaggcttaccatgggcagattataagcagcctctgycctcaaatcaagccacatatttagaatctcctaagtgtaagtggatattcaacgaaatcattcaaaaattcttgaaacttgagaggcctcagagcatgaaaatttagtcctttctttaacttttagatatgttgaggttaaattcttgatttaaatgcacatgtcatagttaagtaataaaaagacacgatggaaaaaagaactctgaaaactcaggtgatataatcaaagatgtataaatgagctaagcttctgaagcagcctggtaaagggggctttacatgaattagatttggaaagccctaaatcaaaagactttttcttttttttttttttctttgtaagtagtagaggagttggtattttcctgggtatttttagctattacatacctcaattttctaataattgtggtgaacagctgaacttagacttgaacttctgtactcataaacagctgattagaatattgctatctggcttaaattaaaatgcaaaaaatactattagtttcatttcaaaatgtgattgggcatagggatcgaaggagttagaaaaacgagtgatacaggaagataataaattgtatgcatagtttagaatgtgtagttagataagactgccagaatggtccccactgaagcactattttgtccctttctgtcctccttctcactaacgtagcggaaactgccacagcactatcctcataaagctctgaggtcaacatggactttgctatgctaaattctgtactatggcagcaagtcagcttgtgatgctacatgaatggcaaaaaagaaaacttgagaattctcatttacgcatcctaattcttgtctgtttcacrtaggtgcgtgctagtgcaattgcccaagatgctgatcagaattacgactatgccagtaacagtgtggttcttcatttggagccgggagatgaagtctatatcaaattagatggcgggaaagcccatggaggaaacaacaacaaatacagcacgttttctggatttattatttatgctgactgataatgcagaaactaarcttattattctgagtttgaacactggattcgtatggctaacgtcagtgaatcaaggatcccaggggatgccaatggcagggcacctcagttgtgtatatgtggggaaatcaaatgctacctgactcacatctgtatcactcagaaacattatgtaaaaaatatcaaagcaagataagcagatgtgtgatccactaccgccaaagcaaatactccttatcgttagtgtccatgtgaatgaagtcctatatagatcacaaatttttatagacaaatctaagacattgaattatttcttctatatatatgatactttggtgtactgtgatcttgctgcttttatccatatgtcagctttggttcttgtgagtttacctgcttattatgatacttggagtccattcatagtgtggggaagaatgatttttgccctgcaggagaaggtctaattgaaataatgctgcttgtccccaaagaaattgtttgccttgtactcttgttaaccttagagctagacctgggaatgattcaacttcaagccttaacctggaattttctggatttgagggaattcccaagcctatgatctttttcacattttctttttcttatatgaattttcttttctctcttttctggtgatagtctttaaaaatagagattgacagtgtatcataggattaccctctaagtgtgaaaatgtgtaattatgtacggtatttaraaaaagcccttatgtgtccattttgtcaactgaatacatttagattcactgggaaagtcagagaaatttattctttagtatcaaatcaaaccgaggcttttgccatctttggaagaaaagattattcataacccaatgcacaaaggtttaatttgagctgctgcatacgtcaccaaggggacactaggtgaggccttcaaatgattactacaagtctgtggcctgaggttattttaaaattaacaatttcgcatatagccwatatgacaacagagtgtttatattttatacaaatatctgctaaacatgcacacatatactcacrcacacatatatatattagatgaaatgttttatwtatgtataaaacatatacatataaaacatttatatatatggctttattccacagggcacagtggctgtatagcctcaaaattttaatataaaaaagtgtatgcatatatacacacacaaacatgcacaaattatttaacttattttgggttaaaatatattttgaatgacaatatatggagtagcaaaaacagttaaaatgacttctctttaagagttatccagaaaattaattgtattaggtcaaaatgccctttatttcacaggtctgtaagttaaggctatggttgctctattaccatatgccaatcaatactttaactgcattctgtgacagactgttaatatgaggactgcagacaccaagtggctctcctttgcagtgtttatgaattacatgcatttgagctatcaatttttttttcttttttctcaggtggagtgaagctgacagtacagtagatttggagagtaatacaaatcctttctttctggttagaacacactgccaaaagccatctctttcatctaaggaaaagattaaaaatgcatgttgatatctcctaactatcacacaacttccactattacaatgaaaaatctgttcccctttcattgcctctgaaaactctttgacgagtagatttcaaaaacagagattttaaaaatttgcttgctttactggtgaaggacatttgcattttttttwtttatttatttaaaggaattagtttgttctcctggctcattcctctttgttactttctgttccaatacacagaaagcttgrtcatctttgatcagcagaaatatcttttatttagcaaagctcaacttcccaagagttatgcatggtgtgcctatctgaaggtggtgttagctctgttgaaatgcctgggtctgagtaactgtcatgatttttatgattaaaaacagactcttcatcaagaataatgactaattctaattggtctttgtgatatgtaagataactcataaatgaattgcaatggattttatttcgaattaactatatatttatcaaagaggaactggcagcaagggtttggagaatatttttaggtaccaaatagcatagtgaggattcaaccaaaagatgaatttataagcagcagtgcccatcacctaagtgttttaactaacaggttttaaaaacattttatttacacaaaatatcagggctggataccttttaaagaggaggctcaagtatcgggctgtcatttccaatagatctgaccttttcttcagatacataagcattattttctctgtttaggtccaaggaaaaacaaaaggtaaaggaaataaagggaatatacataaggcaaacatttctctttttttttttgcattatatcttaccaattaattaaattgtggcctttgttattataaatgtaatgattcattaaactatattatgtaatatattttgacttttatgattgartttttataattcagtagtgttatgtgttcttatacaaactttgcaaaacagcaaaatgtatggcaaaaatagataccggaaagccaaagatatcaaaatcatttcagtagaagaatatatagataggtggacagtataaaattaacctttcaaaatatttttatcattgtgaattggtaattgtattacagtcagtatcctttggggaaaaaagtctcaaaatttaacttcccttgttgmagaagctattttacagtgccatattattcattaagcattaattaaagaacagcaggataattagtaggatcatcaatattacaagaaacattagatcgctcaagaaggaaataatttaactagaaacactttaaattttctcaagtagtgcagctgatagattagggagaaaaacaacaactccgcttaggggatatagactttaaatcattgtttagaaataggtacttctgtatttattttgttaagttaaaataatagggctcaattaggctgagtaactccctagaggcacagttgtaatagctggtctcagagaaggcaaaccctcctagttctcatcagaaggaaatgatctgtcattagtcctaggtaactgattaatatctcacagtggactggaaatcgctgaatgttctctgcaagttttatactcaaggtgtgaattcataagcaaccatcctatttgaaagttagccattgcttagggttctctattagaatcttatcaagcacattctcagttatgcctctcagcaacattttaggaacaacattggtgagtatatgagaatagccgtgacctccatatttcatcagccgggttttcgtatgtatgtcatgtgctaccagaattcgatcttcacagccctcttccaccaggagacgcaccctgtgaaaaatgttaactcattagatgtcatttgtctttcattttcgcttttcaggatgctttcaactttttactcattaacctattgtgcttgtcgtaaagatactgacttctactgtggcgtgtgtactgagagacctttaataaatattgtgtggtgacgataaaaatattgctgcatcctagcaggaacatatccttattccatgcatacagaaatttctaacctgtgacatttatgaccatgcctggcaataccgcattaaagatagcttctaataggatgtgccagtttggatgaatgaccattttggcatttcactaaataactttgttctggatttgtattcagcaatcctctctcaaatgcctctccctgtgggcccatttttcagatctcattcttgctctctccttttatctggccaaaaaatatcaaggactgtttgcgattaaaatagggaaacaaaaggaatctcactacaagtaaaatattctgagagcaaaatcagttggtctgcaagtgaggggcatttgataagctacaaagccactgaaaaaaggttggtcagcattttaaccatttgcccctttgaagtctatggcaattttgatttagttgtagcctctgagcattggattaaactgaccaatacaaatatattctgtcttctttccatgtcagcaagattgctaaaataataagctgttcctttaaatttatagtcagtggactaaagaacagcttcctgactattctctaaaaatgaaatcctctttgctttgttaaatgctggaatctgtagtgtgagtcacctcctgacagccaccatctgtacgtgtctggactctgggcagtgtctgtcgtgacttccatgggtctttgatggtagaagatgccactcacagacaatggctcttctatgggattctctgaatagtttttttggcgtctagattctaaagtggatctagacggacggacagtgccttcctccagaggctgattatttgaaaggtatcttttttgtttcaaaagcatttcttggtgtcctagtacatgagtcatatttaataactactacagtgagcaaaacgtggggtactacacacacaaaaaaaactcaagcacaaagccctgccctctgagaacacatattttaaaataaattataatggaagaatagactttgtatctgcaggtcaaaggaatgcaagcactagcagagaagaaccatgcctgtcctataagtgcatgtaatgacttttgtgccactatgattttttgcctcattgaaatttgtatactatcctgaagttctgatctgcagttacttttggaacacactcagtttaggggaattatctaagataagttatattatcacataaaaagacaaagatttgacagaatgcacacacaatactgaagcttagggtgacaaaccttgatccacaactgcaaagaagtatcacggtataggaggttttaggaaacactttctccctgatattttctgggcattttccaaaatttttgcctatgtttcttatctgataaatataatttctcacactataaaggcagatcatgtggataaacaaattcctttaagatgtcctttgtcagaccttgaaacacaatgttatcaaatcatgaagtagaatgaaagagtatagaggacaagatactcatacttaaaaccgggaatccttagaacccattaagtcaagaatctggagactacttatgagaaagataacgttatggctctggacacacaatcatatcctgactatgaagaaaacctgccccgtcctgcttacactaaaagatcatctctcctgttgtgccattatatggaagaacaggagttacagagatgctgccagaaaagggggagccactacagacgagaagacaaaaaatcacggtaattatagaaatacaaatgagttagtgtttgcaaacaaatattagagagagactacaaagtgtgaaaaggcagagatataataagatttgagaaatggagcagaagattgaaaacaggtgttagacacagaatttctggtgctgaacaccagaggtaggcagaagcgtgcttctgtgttcatgcacttcaaggtttaagactacgatggctcagaaaaggaccctgtggtcctttcatgcatgatgaaaatcaagtgtgcaagacagtgggtactggagcacacgcaacccaaaagggcattcagtgcttaacatgggctgtccttgggtcaagcgagaatgcatggtttaatttaaggaagattaagcacacacacatacacgtacgtatggaatagcacacaggtattttatatatatatacacagatttatattataataatttttattatttccatacatccagaatagctatatttagcacagtaaagggtaaacaaatggctaaaaggagctaagaaggaatgctgggggagccatcggtcatctgacccttctatctccttcacagatgcccctttacggatcttctttctcttgttctagaaggtctgggagcctcatgcgagacacaggtgtgcaaaagatgcacctcactaccacaaaggggcttcggaaaaggaagccgatccagagtgcaaagttcccatttccaagatgatttagaaaacatgtgttgaggccgggcgcggtggctcacacatgtaatcccagcactttaggaggccgaggcgggcggatcacgaggtcaggagatcaagaccatcctggctaacacggtgaaaccccgtctctactaaaaatacaaaaaattagccgggcgtggtggcgggtgcctgtagtcccagctactcgggaggctgaggtaggagaatggcgtgaacctgggaggcagagcttgcagtgaggtgagattgcgccactgcgctcctgcctgggcgacagagcaagtctccatctcaaaaaaaaaaaaaaaagaaaaagaaaaaaagaaaaaagaaataaaacatatgttgagggcattgatcaggaaatcatgtttttgagattgtgaaagatgagaatgactgaatgcactgcactattttaaattccagatgcccttaggcaaggaatagtctcctctgagtataaactaactactagggctttaggggaacaggttcacctgtattgaatcgggttcctgggcaagtaaattaaaataataaaacaaaaataaacaaagaaacaatacatctacttgtcaaataactgatctgagtattaaaagacagaacttcattggtcaagacaggtgaagtcatttgctcatgtagagttgagagttgccatcttacttaactaatgcaacactgattaactagctttccctaatgatactaaacttgaagcatagtactattaatgaggtgatcaaggcagaatgccagtacttggagacagcagaaggcatacagacgtaaatgtgacttcccagggaaagatcctcaggatgtcccaactatgaccactggctcaagatcttcccctcaacccagtgtgccttattcaactagcaatacttgaatctcatggttcctggacatcacttctcaattccagctttgctacttccactgcaaacacttttctgttctcataattatattctagttcttgttatcatagggaactactgctccccctctgaaatctccatcttcagtttcccactccgatcatgttacatttttctactttttccactcacttcttctactgtgtatatatatacacacacacatatatatatacacatacacatacagtatatatatttgaacatatatatatatatatatatgctccacccacttcattaaagcctgcagtccacttatttgccctgctatgcttttcctgtctatctgaccattcctctctatgctttcttccctccaacttggatcccatgaccctcatctcaactcctccattgttatccatctctttcagatagaatcccaaccctcaatctcttgaactgttcccattttctgcttgtacgcacacaacttctctggttccactaccaaaacgcaaaacagttttgctttggaaaataatcaccaaatcgtgtgcattggtgccaatacacaggcatgcaatcatgatttctagactcaactaggtctcgcacataacacatccatgtcaagatctctctcattgacctgacagccattcctagcctttctcctgctctacacagtgctgccctaaatccactctttttttctcaggagataaccatgtccacctcacagagacactagaggacatgtggccatgtgtcctcagtctcctgtttccctcactaagacttctgtttgcattcaccccatcgctgtgtcatgccctctcatttccatggagaaagcatcctttcaaccgactttctatttgttccccagattccatctatttgttgccttaggaaccttgctctatatttcttatctatccagagtttttaaagtcaacatctattgaacacttccatattctgcaccagacactcagacaaaaacttggaaaacattatttcatgtcaattctatagtaaccctgtggaatgggcaccacttccctggactcattctctctggctctgtctctgcttttgctcttaagtcacataaacattgctcaactcttactagaagcttcccttgatcctttattgacttgtaactccagacccatctccttgcttccctccactgccacgcttcttgaaagagtcacctcaacatcctctctcctcttcctcacggcccacccatttctcaagccttttccactgagattgcactctgtttataaaatgtgagcctcctaattgtgaaatccaatggatgcttttcagtctttatttcccttgatatttgtcacttattaccggcattcaagcccttctgccctgagacttcctctctactgacttccataagaatatatatctctcatgttatcactttgaaaacttctcctcgacctttccttgagcaacggttcctactccattccttaaatgtctctgtccccaggtctctgtcctcatcttcttctctgagtgatgtcattcattcccacggttcaactatcacatacaaaccatatcttagggcttcactgggtagcaacacttagatattcccaaacgaaagtcttccttgtcaatctccaatttatttctcctcctaggtattctaacttggttcattcaatcttcttatcaccatgtgaccaagaccaaactaggtagctatcattgacgcctaaaattttctacttgattacaaagaatgactcctacaattatctgccagcatcacacattatacagttttggaaggttgcattcattttacataatatttagtctttaga

SEQ ID NO: 95177 - DNA, 89101 bp, Homo sapiens
  misc_feature (1)...(89101): n = A,T,C or G
tcctgggttccagtgattctcctgcctcagcctcccaggtagctgggattacaggggcccgccatcacacctggctaattttttgtattttcggtagagatgggatttcaccacgttggccagactggtcttgaactcctgacctcaggtgatccacccacctcagcctcccaaagtgctaggattacrcgcatgagccaccgcgcctggcccagaattttattcttttttaaggttaaataatattctattgtgcctatatgcccccttttcttaataatctgctcatctgttggacatttgggttgcttccacctttttggttattgtgaataatgctataaaagactgtttgagctcctgcgtttacttctttggtagaattccactaagaagtggaattgctggatcacatggcaattatgatggattttttttgaggaattgcctgcccattatccacagcagctataaagtcaaaatattttttaagacaaacttgtagttggcttctacaaaaggttgtaaaaacgtactgatgaagacatagtcctggatgaaaggctcactcagtatcggggttgtgtgttctcaatctggctctttaagatctagaatgaggttaggcgccgtggctcacgcctataatcacagcactttgggaggctgaggcaggcggatcatgaggtcaagagatcgagaccatcctggcccacatggtgaaacccccgtctctactaaaaatacaaaaattagctgggcatggtggtgcatgcctgtagtcccagctactcaggaggctgagcaggaaaatcacttgaacccgggaggcggaggttgcagtgagccgatactgccctccagcctggcgacagagagagactccatctcaaaaaaaaaaaaaaaaagatctagaatgatttaaatttcacttttcctttgcttctaagtgaagtaataatatacattgaatacttagttgtattttctggggggtacaaagaataggaatttgatagaaaacgatctgtgtgttcaaagttctgttctagttctcttgtgacattagtatctaataggtgtcctataaatgataggaatggcttatcacaccatgactcaaaattaaaccaagaaaatctctgcagcactgtaaatttcagcttccaattaacaattaaaacctaacagcaacatcattgatagaattgacatcataggtcctgcttttttttcctgctgcttatctgataattatctggattattttctattttgccctccccagattgtttctgtagactacttttgtgtaaatatttaaaacaactaactagggtgatgaaaacctgggtgttttctagaattttaacccaaatagcaggggctttggatgtttgcttttgatttcgttctttttgccaatttagtgttcccgggtacaggtactgtcaaaattcaaagatactatgaaaaggaaaagcaagtactgtagaaatgagagtgcatttgaactaaacctttaactgagagatcgatttggaaactcggttccttaataatgtgattttcaactttgctacttcatcacagacatacgacagtacattgatattcttggtttcaaaaattatttccaagttaagcttctctaggaagaaagactgaaaaataaagttgggcacaagcttgatgccagattatcatgtttaacagcagaacatcctcaagaacccttttcacccattcttgtctgcctatcccagggctagtagattttgagtccggtagtgaagaatgtttattttactttctaaaagattcagtagcatttagtgtttaactaacaacagtgcttagtgaaataggattacagtatgtacacaggtgctatatgctaaaaagttttccattcttgtgcattggatttacatgattttctccactgttctttgtttgtttgtgtttgtttgtttttgtttttgctttttgagatggagtctcgctgtacctcccaggctggagtgcagtggcacgatctcggctcactgcaatctccacctcccaggtttaatctattttcctgcctcagcctcctgagtagctgagactacaggtgcacggcatgacctttggctaatttttgttttgttttgttttgttttttgagatggagtttcgctctgttgcccagcctggagtgcagtggcgtgatcttggcgcaatacatcctctgcctcccgggtttaagcaattctctgccttagcctcccgagtagctgggattacaggcacccaccaccacacctagctagttttgtgtgtgtgggtgtgtgtgtgtatgttttttagtagagacagggtttcaccatcttggccaggctgatctggaactcctgaccttgtgatgcacccgtctcggcctcccaaaatgctgggattacaggcatgagccactgcacctggcctgttttttttgtttgtttgtttttttagggaagataggttttcaccatgttggccaggctggtctcaaactcctggcctcaagggatctgctaccctggcctcccaaattgttgggattacagacgtgagccacaacacctggcctctgcctttctttgaacacacctgtaggcaatagtttgagaaagttcctgaaataaatctcctgcatattaatttgaaatttctttgtagctgcttctttcaaaaaagaaataaaatctctttactagtatctttttaaggagtaaagccacagaaataagagcgtgcatttgaaatccatcacaaatcttgctcagtggatttactgtgggcagtggagaatttagtaacttccataaagaaaaactaaagtttacttttcaattttttttttttttgagacagggtctctctctgtcactaggttgaagtgcagtggcatgatctcagctcactgcaatctccacctcccaggttcaagcaattctcatgcctcagcctcctgagtggctgggactacgggcatgcaccaccacacccggctaatttttgtatttttagtagagatggggttttaccatgttggccaggctggtctccaattcctggcctcaagtgatctgcccaccttggcctcccaaagtggtgggactacaggcgtgagccactgcgcctggcctgaagtcattttttaacaaggacctcatgtatcatttaacatctagcagcatagactactaaaatacgtaacattataaataatggactttcgagcctctccttaccacccactgtcgggtacacatttatatggctccatgcttgtagcacacacaaagtgggagccagcactgaaatcactccagaagcctccctggatccatctcctcattacagaatctcagtgtgagcccgtcattgctactaatatccaactgtcccagcactcatgcctctgcagttcttaacccctacagttattcttgtctttcctactcttgggccctatttttatcccttttctgtttctaggatttacccagccaccctccttaagaaccaattttttcctcagtatcttctccctgactgtcccttaccaaccaaccccttttctaaatgacttcttgtacttttacccttaaaaaacaaaaaacagagaacgagacctgtatatccttttctcctcctttttttctgatttaaatgaattaatttatttctattaatctcctatcaaagcaccccattctctcctggtgcggtggctcacgcctgtaatcccagcactttgggaggtcaaggcaggtggatcagttgaggtcaggagttcgagaccaacctggccagcatggcaaaacctcatctctactaaaattacacaaaattagctgagcatggtggggcgtgcctgtaatcccagctactcaggaggctgaggcaggagaatcccttgaaaccaggaggtggaggctgcagtgaggtgagattgcaccactgcactccagcctgggcaacagagcaagactctgtctcaaaaacaaacaaacaaacaaaccaaaaaaattccccattctttactaagaaggcaagtgtagtgactgatatcaactaatctgggtccctagtcctatccttgaacaaggtgcttgtctaagtttgttttcttgtctgtaattggagggaaatagctcctgccacatgcaggttgctcaaaatcttaaacaaaataacatacacccattacaaaacctggtagagttggccccgataaacatcatctattaatattattattaaaactctactttcctttgaaatgacatctgtagcttctgcccgtctgcatacctattctcttttttctcagaattcaggataaaattaattgactaggccttgtgctgtggcttatgcatgtagtcctaacactttgggaggctgaggtgggaggatcctttgagcttaggagtttgagaccaggctgggcatcatagcgagacctccatctctacaaaaattacaaatattagctgagtgtggtggtgcacacctgtagtcccagctgctcaggaggctgaggcaggaggatccctcgagcccaggagttcaaggctgcagtgagctatgactgcaccactgwaatccaycctgggcaacagagccatttcaaaataataataataataattgatgacagtgtaatatggttggggttcagaaaatgataccccaaaatgaaggccttagaagcagctctctctaacctcatgtcctcctgcctctggcccctcattctagaaactggaatccctcttccccaaggtgattcacagaagccagaacccctcatccccaaagccaagcataaaacctaaaagtttgactctgcgtgtcccctgcctttctgtgtcaaaactggcggtaaagaaattctctgccctgctttgtttgactgtaggtcataagacccccattccagaaaggatcctgctctatacccagaaggaaggaacactgcacagaaaagccaaaaagaatctaaacagacagggcttgctcacttagtctattggcattagctcagaccctttttatgccatcgtagtatctcttaggttggtgcagaagtaattgcggtttttgccattaaaaaccgcaattacttttgcaccagctgaatacatggcggtccatactttattgaacctaagcgaaaaaatggaccgtttcccctgcatctttgggttttcattctgaaggctcccggatcacataaagttacgatctagtatatttgtatgccttttctactgtgaaactgccttttgtcagttgattttcagcaaaccttcagaggacgaaggagaggtttgcccttggccccctacaatacctaaaggtatgactctttactgtggcagctgctccaagcatcatgttttgccaacagactcacacatactaagtttatttcagtcacagcaagtaccagggccagttcaagtgctctagcacggcactctaattctaaagagaaggaaacgcggcaccggggcaggaaacagtgacaagtgggaacacaaaaaccaaagttctccgtatgcagcatgaggatccagaacccactgtgacatcaaattgccagagcaccacctccgatttattcttggggaaaaccaaaagagctacggaatgctcccttgttccagactgttctatggagaactgggatctggggaaaatgcaacagtttctttccgtttggggatctagccccgaatttttttcattcagccaaactaccgacagtcagacagcgcctgcaggagggtgtggccaggcaaaaacgcggggaacggccccggaccagggtggggcgtggcaagggtttgaagggcgtgtcctacgaagaggtagggcttggcaaggacccacggggcgtgtcctaggactcggtgagggcgtgacctcgggccaggggcggggagagaaccagagggcgaagtgggagggcacaggggagactaaaaaggccagggaagttggcctgscggaagttcccagggagaaggcagcgcgttgtacccgaggtaaggcttcttggagtcagagcaggagccggaactgtgggcccagtaggaagagtggggcccgacggcggaggccgcgcggccagggttcgctgcagagctccacgcgagggtcctgccggaaggaaggattttctagccgctgcgcttgggccctgccgcctctccttaagtgcttgagggacgttgcaaagagcgccagtcscgtgyggcgccagctccctgtggctcgacagcaatgcccgggggcgtcatcgggtagctgtgctaagcctcctttaataagcttttttttttttttttttttagattcagggtctggctctgcttcccaggctagagtgcatttggcgcgatcacagctcactgcagcctcgacctcctgagctcaagcgaacttcctgcctcagcctcctgagcttcctgagtagctgcgactacaggcacgtgccaccatgtccggttatttttgtattttttgtagagagtgtctcgccatgttgcccaggctggtttcgaactcctgggctcaatcagtctgctgcctcggcctcccaaagtgctggcattacaggtctatattttttgacagtttataaaagcyaattaccagcggtcatatgtctgagtcctgtgcactcttgcttaatccactctgcagccctgtgaaggattctagtgataacgacaaagctaaggtacagaaaaattaggccacactgctggaaagtttagagatggaaacaaagtttagaggtggagtctttctgactccacagccagtgtgctgttactctcttagactacctcattctttgtacatcccaagtcaacaggaactaaaggtatacccttacataggcagtaagaggggttgctgatttaaagaactttggacccagaaagagtagagccctattctagttctggttccagctcagtgactttctacaagttggttttcttttgctttttttaaagacagagtctcgcccttgcccaggctggagtgcagtggtgcgatctcggctcactgcaacctccgcctcccgggatcaagcgattctcttgcctcagccttctgagtggctgggactacaggcgcgctccaccacacacagctaattttttatttttagtagagacggggtttcaccatactggccaggctgatctcgaactcctgaccttgtgattcacccacctcggcctcctaaagtgctgggattacaggcgtaagccaccgcgcccggcctcttgctttttaagactaggtctcattatttcaccaaagctggagtgcagtggtgctatcacagctcactgcaaccttcacttcccccgttcaagtgatcctcccagctcagtctcccacaggtgcacaccaccacgcccggctagtttttattttctgttttttggtttttttttttgtatttttggtagagacggggttttgccattttgtccaggttggtgtcaaactcctgggctcaaatgatctggctgcctcggcctcccaaagtgctaggattacaggcgtgagccactgcgcctggcctgcctgttttctagacacattaaggtgagtggtctcaggccaggcgcggtggctcacacctgtaatcccggcactttgggaggctgaggcaggtggatcacttgaggccaggagttcgagaccagcctggccaacatgtgaaacctcttttcttcaaaaaattagctgggcatggtggtgggcatgcctgtaatcccagctactggagaggctgaggcacgagaattgcttgaacctgggaggcagaggcggctgtgagctgagatcacaccactgcactccagcctgggtgtcagagcaagactctgtctcaaaaaaaaaaaaaaaaaaggtaagtggtctctaggtcgctagtggatgtaataatctatggatttatgaggataagatcctgattttaccatttaatgatattttgggccagtttttttcctttttaattgggcagccctcaaaccagaatagattgagagggtcttccagttttgggtcatatttgctgctgaaattacaaggtagtcaggaagggtctgtttattcaatcaaagatcaataaatgtgtattttggaggtcagtagcggagtatccagccagaaggtggctagtgagacaggaggaaaatcaggacagtggcttttctggagggacttagggaaagatcagtttcactgggcaaatttccccttccctgtgaaggacagaaaataccttcaatatggctaaagtgagaagcatttctgaaaaaaaatgcwatttaatatcctttgaagtgtcagtaaattttgagccaaatagaagcagagagtaagagaacacaaaaatagatcatttagaatctggagaagtacatgaccgtgtactcagtgccaggacttggccataggatccctgtgactattttaagttgagtaagcagccctgatgcaagaattttagagattgtctcagttttaagcttaaagacaaaatgatgaactgtatagcatgagaggagcttggtaaatgtccacctttgcttccatgtgcaaagtgttcatacaggacatacatacatacaggacccattcatacaggaggaatgtttatccttaaatatcttctttttaaaatatttattagtttatttatttttgtagagatggggggtcttgttttgttgcccaggctggtcttaaactcctgggctcaagtgatcttcccacctcggcctcccaaactgttgagattacaggcgtgagccacggcagccagccaacttcaaatctattaaatgccctagtaagccatatagtaataatattgagaatttctgatcaagctcgagtctgctcagtatccctatgaacttgactgaggtagttgttgaatatattttcatacatcaaatgtggctttgttctgttttctttagctgttgtttctagtgtattttcagtggtccaggttttcctaacaagattttttttttttttttgtggcagggtctcactctattgcccagactggagtgcagtggccctatcttgactcactgcaacctctgcctcccaggtttaagtgattctcctgcatcagcctcccaactagctggaaatataggcatgcaccaccacgcccagctaatttttttgtatttttggtagagacggggtttcatcatgttgatcaggctgctcttgaactcctgacctcaggtgatccacctgcctcagcctcccggcatgagccaccacgcccggcccttaataacacttttataacaaaaggcttctcattcatagacatcatctcttaaaaaaaagaaaaagaaaaaagaataagaaaaataaaatatctggttccatttggcataaactggctctgtggttgtacstattttgtcaaaacaataaccacctgagtacaaatacctctgtgcctgctcagcgtgagagctgtgaatgttagccatttccctgtctccttccaggcaggtatgtccacgtgacttgtttggctaacgaaacgcaagtggagtgacctgtgtcacttccaggtaaaactgtgttaaaagccagtgaaagatttgtcacaatcactttccctctgccgcagtgaccatccagatagaggcagtggtctcagcctgggtcatagaggacagtgagcggagccccctgccttcctgtgttagacgtattcgatgagctagaaataaacttttgttgtggtcagaccctgagattcggggatttgagtgttactgtggcctagcctggtcaagcctgcgtaatgaatattatcagataagctgcatgtatgcggggatttctggctctggtttaccagataccttgggagctgtggggagggccctgaaagaggcttgtcctatgaatcatgctccttttactgtgtgggagatggcaggtgtgctgttcccatcatgctccagtctgctttgtgattttaatcaagagtggcaaaaatggcrtttagatgtttaattgcattctgtaagggcagaccatgttaaagtgtaaaataggtaaaggctgtatgcctggaagggataagaatcaaggctttcatttttactttgaaaaacacaatttatatatttttaacaattttcagtgcacttccaagttttccaatacagaggaatgttcgtgggtgagttgtgaaaagatgattcttcccaaatgcagttatcagtggatacatttcagaaattattttgtcactgaaggacatttgaaatgaatcatccgtacttaccattgactaataygttttttttcaggcagcttcaaagagtattttaaatatgatttcctggctatctgatttcggatctaagagtatcagacttaggttttgctgttaatgtcctaggggcagtgtgttcactcttttattctgagttaaacagaaggcaagccgggagcattgtgctttggacagagctgtgctgcattcttaggggacactggctataaatccagtctccctagaggttaacaatcaaagttctccccttattatagtcaggcgagtgatatgatgatgataaattgcttggacgtgactggcccaagcactagtgtgatgaattatgttgttcggggcatgaccgaagatcttctattgtcagctggcaatgctaagtattggcagtattcataaatagccttttgccaatggtggtctctgctttacatattaaattctctgttttcacaggttgtggttcttagtcatctgtgtcctccactgaattcacttacataatcagcctttttttttttcctgttccctacttattaaacgggtgggatgtgctcacttgtgtatggtaaacactgagttctttcttcacagaaactgttaaaagagtaattattagttctttttactaaatccagagtaatagcaacttatcttgcagtggyttaattgggtaattatttggtgtgtgaagagcactttgaagagaatattggtaaatattgttaatttcgtgctcttttatgtaactgaaagcccattgcgaccacaaaatccttggtgttactgtgtacccacaaaatttctttcctgatgtggcttactattttccaaattatttgtttgttgatttttaaaaacattttttaaattttcataaattctcaaagttatctcatgtttatgccttgacaattcgacatgtctcatctcctacattcttgcatatctgaaaggttagatgttatcagtcttgctctctaacagtttggaggacagataaagcccgaccatgtaattgagaaattgaaataaagatttatttggtcagagcccatgccctgagctgtcatctgattgccatcagaatttgtttaaaagtgttaggttggccatgcacggtggctcatgctgtaatcccggcactttgggaggccaaggcgggaggattgcttgagctcaggagttcaagaccagcctgggcaacagtgagactcccatctctattaaataagtaaataagaattaggttgacttgcatgtgcctggccagctcttttgacagattttcttctcactttataaattcagagcctgcaggccaggcgtggtgtctcatgcctgtaatcctagcactttgggagaccaaggcaggcggaccacttgaggtcaagagttcgataccagcctggccaacatggcgaaaccccatctctactaaaaatacaaaaattagccaggcatacgtctgtaagtccagctactcaggaggttgaggcaggagaatcgcytgaacccgggaggcgaaggttgcagtgagccaagattgtgccactgcataccagcctgggtgacagagtgatactctgtctcaaaaacaataaaaataagatgaaataaaatgtagagcccccaggtgtaattaagggccatttctgtagcttagattagatgaccttgattactcactatgtttgtcttcctagggctgccatcacaaaataccacaaactgggtggctttaacaacagacatttattttctcacagctctggcagctggaagtcccagatcaaggtgtcagcagtgttggcctcttctgaggtmtctctctttggcttgtggatggccgtcttcccttttatgcatgtctgggtattgatcttttatagggacaccagtcctattggattgagacctaccctaacaacccccttttaacttaattacttctgtaaagactatctgcaaatacaaccacatcctaaggtgctgagggttcgggctgcaacagacaaattttgcagggagatacaactgagcccaaaatgctccactgcaatagtaatggtctgtttggaagctactgtttttggagttattttctttgattgttaaatttgaccttccaagtgatgactacacatctttggagaatctcctcagttcaggaacttctttttaactaacattacttggaggagagcttaatgctcgtgactttaaacatttatgtaattaggtaaaaagggaagcaacattattaaatgacttggatagagttcatcaagcagttaagaaaaaaatgtacataatcaagcktaccttgcagtctgaatgacaaacatccaaatatttgctgtaacaactcgcacatatttttaccaaaaatttcctctccgaatcagaaacttactatgatgagtccatgtacttacgtgtaccatcaaaaagggccagaggatcgctagagtatgctgtggtcctatctgctctttctataaagtggtatcttgtgctcatcttgcttaaatatgttgtgtcttacaattatcacgatactatcaactgaaaacagaaaggtctgtgagaaaagatgtgagcctaggaagctaaaaactytttcttttttttttttttttgagatggagtctcgctctgttgccatgctggagtgcattggcgcgatctcggctgactgcaacctctgcctcccgaattcaagcgattctcctgcctcagcctcccgagtagctggaactatagrcacgtgccaccatgcccagctaacttttatatttttagtatattttcagcatgttggccgggatggtctcaatctcttgactcgtgatctacccgcctcggcctcccaaagtgctgggattacaggcatgaaccaccgcaccyggcctcttttcttttttttgagacggtgtcttgctctgtcacccaggccggagtgtggtggtgatcatagctcacttgagcttctgggctaaagcgatcctcctgagtagctggattacaggtgctcaatacctcaataccacgcctggttttttttttttggacagaggacctactgggaactttattctcgtgcttttgtcttcactggggcactacccctcgggaagaccaggttggctcctggcacagggatgcacctggttaatttaaaaacatttttttttagagatggggtctcactctgttgcccaggttcgtctccaactccaaggctcaagtgatcctcccacctcggcctcccaaaatgctaggatcacaggcatgagccaccacamccagctagcaaagctcttatattcaaagaaatattggggaatgtgaaggcacagaaggcctcagtttgacattatctgtccatatmtataatgcatactatctttgcttctgacgagcttttacaatgttccctcagaatagaataatagggttttttttaatccttaaaagaatcttacgtagtaaattggtagtcagaaatattagagggttgttacatgggtatgtaagagtatataagtaaaacttggggttttgaatgggctgtaaaacacttttctctttaaaactgttttaagtggaaatgtattattgaagctgtgtgatggatgagtaggggttcactacactgcactctctacattagcgaatttttgagaatgtccatattaaaaagtttaaataaaagttattttttaaaaaggagaataaatgagtgaaatatatggcctcctgtgaggcaaaattcgatacctatataagggacacattaaatgaggtatgcatgcctatgttagacaatattaagtcgagtatggttttaactaccaatcgctctgtagaaaagtgttgttgaggctgagcgtggtggctcctgcctgtaatcacagctactcaggaggctgaggcaggagaatggcttgaacctgggaggcgaaggttgcagtgagcctagatcgtgccactgcactctagcctgggcgacagagtgagtgagattccatctcaaaaacaaaaaagaaaattattattgaaacccttatccaagagtagctggaagagtatctttcctagttttggcctagattatttgagacattttttatttatgcttctctggcatatgacatgtctattacttccatgagtcagtgcctttctcccagttagcatttcccaggctctcaggctgcagtgtctccaagctcagtctttgatttcagagcctattagccatggcacaaatccggtgaacacagaaacttacaaagaggccacttgtctccgatgcactgatgcaccatgcgtggctagtgccttctgcccaatgtcttctctgaaaacattccctgctgttgtaggaaggatcctacaggctgacaccaaggaagccatgctgtctcctgggtggtcttcagaggacactgcctcctgaggggctgacatggccaaagcccatccaagtcctctcagcctccatatctaggatgagaagttgtcctgggcctgtgagtctcgctcacatttctgcataagtgtcaggcctggcatagatgattcccttttgctttggtgctgctttgagcttgccccgttatcatttagtaaagtgcatcttcaagagtgtttctctttctcctgtgtgccagatatttcggagcagctcagtgcataagtggtaaagaatttgctatttccaatactgacattactgagactttgacttgcaaccatagttgatcttgaatgttcgggggtggggagaaggctcttacaaatagaggtgcaatgcacgccaccccacccccaacatttttttttttttttgagatagagttggtctgtcgcccaggctggagtgtagcagtgtgatcttggctaactgcaacctccaccacctcccgggttcaagtgattcttgtgcctcagcttcttgagtagctgagattaaaggcgtgcaccacaatgcctggctaattttttgtatttttactagagacgtgtttccaccatgttgatcaggctggtgcagtgccccttgttgatgatcattcctctcaagtgttatcttttcactctttgcctgttagtgtagttagatagagagatcaaactatttcaagttagaagttcaagtttaaaatgttctccatgaagactctacatagtcccatttgtgtattgaatttaattgttagatttgttatatatattaaagaacatatgcagtttcttagcattagaaacatttcatggactgttgctactcgttattgttgccatggtgaggtcaaaasgcttaatttcttaattctttcttttctattttgatagaccaccaagattgtaagacatttttgtttgtttgtttgtttgttttgttttgttttgtttttttgagacagggtctccctctgttgactcggcgagagtgcattggtgcaatctcggcttgctgcaacctctgcctcctgggttcaagcaattctcatgcctcagcctcccaaggagctgggattacaggcgtgcgctaccatgcccagctaatttttgtatttttagtagagacagggttttgccatgttagccaggttggtcttgaactcctgacttcaggcgatctgcctcccttggcttcccaaagtgctggaattacaggtatgagatarcatacccggcctttttttcttttctttytttttttttttttgagtcagagtcttgctctcttgcccaggctggagtgcagtggtgccatcatagctcactgcagccttgaactattgggctcaagcgatcctcccacctcagcctctcaaatagctgagacgacaggcacatgccacacctaatttttttttttttacttttgtagagataaggtgtcactgtgttgctcaggtcaatgtcttgaactcttggcctcaagtgatcctccagccgcaacctcccaaagtgctaagattacaggtgtgaaccactgcactaagcctgtaaaatattttttatgtggaattttcgtaatgcattatgtagtgacaccagtttttttgttaacctgttttcacttctctgtttttatttttgtgttagtaataacttggtcaaaataggtttacattcattattactatataacataacaatttcacattagcattaaggacaattttttataagttgtttctatacaaagaatgatgtattaaattttagaccttttatctataaatatgcgaaagctttgtaagtggctatactatctctgactataaggtcttggtccatattctttacaccatacatcgtatttatatatatgcctgcatatattcatgcstgcatattgtgcagaaccacctgtgaaccagatcctagtcttctcttcctctgtcaactgatcatagggaactccccatgataccattggtgcaggctggggagagaaggcagggtggcaggattggagaccatgggcatttgagccacttcctcacataacttacttgtgtcttcaggacccgttcgagcccaatcacttatataccacttccatttgatgatggaatgctgctgtgtacaccctactttctggttggatgggtcagaaagcactgagttcatgataagcagttcaggtcacatggtgacttgatgacccatagttaaacgttcagtttctaccaaagcccagtaactggccaagagctgtctctcaaaaggacactagttatctgcagaagatggcagggccttgctccaaaatcccagaagcctctgctgtgattcccctatgggagcctgccaagggctccaaacagcatccctgtctgccactgacaacttgggcaccattggatctgctgggtcatatggtccaagtggcagaggagcttgcatagtagcctggacctgttgcagagccttcttctgttctggaccccactcaaaactggcagcctttcaggtcacttgataaatgggtgggagtaacacacgcaaatgaggaacgtgttacctccaacagtctaaataggcccactaagcattgtgcctctttcttggttgtaggaggggccaaatgcagcgacttgtccttcatcttaaaaggaatatctcgacaggccccacaccrctggacccctggacattttactgaggtggaaggcccctgaattttagtcggatttatttcccatcccctggcatgtaaatatctcaccaataagtctggtgtgtttgttacttctcattcactgggtacaatcagcataatgtcatcaatgtaatggaccagtgtgataagtcatggaaggaaaaagcgatcggggtccctctgaacaagattatgacacaaagccagagagatgatatacccttaaggtaggacagtaaaggtatattgctggccttgccatctgaagacaaattgcttctggtgtgccttatggataggaatggagaaaaaggcattcgccaagtcagtggctgcattctaggtaccaggagatttattaattttcacaagcaatgaaaccacatctggtacagcagctgcaattggagtcaccacttggttaagcttacaataatccactgtcattctctaagatccgtctgtcttctgcacaggccaaataggagagttgaacagggatgtggtgggaatcaccacccctgcgtctttcacgtccttgatggtggcactaatctctgcagtccctccagggatgcaatattgtttttgatttaccatttttctaggtagaggcagctctaatggcttctatttggcctttcccagcatagtagccctcactctaccattcagggagccactgtggggattctgccaggtgctaagtatgtctaagccaattctgcattctggtactagggaaattaccacatggtgagtccagggacccactggacccactgtatttcagacctgagctaaaactctattaaaagatgttcttccagctactcttggataagggtttcaacaataattttctttttttttttttttttttttgagacggagtctcactcactccgtcgcccagggtacagtgcagtggtgcagtctcggctcactgcaacctccgcctctttgcttctgctgtccattacagtaacaatgcccaccttgtctttgatggttgagtgttgccacttgccctctgccactttaggatccagttattcccactgcatttaaattttgtagttgagtgactggtgttcccactgtaagatctggcatacaaagaagagcaatcacagagctcttcaaggatgcaggtgctcctctcacaaatctatttcacaaggtattggtgaaggacatatcttctgggccctcccagctgggatgggtaggtctaaagtgactaatccactctagcatcttaatctccctaagcccttggatcccttcctctaccttaaaccaagggaaatcaggcatttctagctcacacacagtgggtcatcttttgattcacatttcagctaaccaaacaaataaactcttagaaccttttctaacaccctgagttgcaacattaaatgcagaatccctgcwtagtgggcccaaatcagtaagttcaggctgatccaactttatgttccatccaccattatctcacacccttaatatccattcccatgcctgttctccagatttctgcctatataagtcagaaaagtaaagcaattcttctggaatgtagcgcaccccctcatgggtcatactctgaacctcatctctaggggcctactgggactttagtctagttacatatctagaagcaaacgggtattgggagtgggtcctgaggagaattgacattgtcttgcctggcaactgcctcaggagaggccatcactgttgcctcaggtagtgcatggttaatctcctcagacaaaggtggaaaggctgatggcagtatgggtggaagaggggatgttgccatcactggggatggggaagctgtttcctctggttaaagaaaataaaaaggctcataagagtttataagctcggtgtccccagtttcatctgggtcatcccacatgtccccattccaagttgcagggtcccattcttttccagtcaatgccctcactttgacaggagacatctgatgagactgagcatccacctttcattgcagatcagccactcacatgataaaagcttgtgtctgattttccacaatttcagccctttgtctacaggagataagactctccttcagggcaatcttagaagaggctcagtatgtgcttctggagctggacgttagaatccctgaactcatcctttgctttcattaccttgtccagcgaactaagtagcaaccaaccaactttattgtattccttggttctccacatatggtcaaaggtattatgtacagagtcactaaaccccttgcccctcatgagtggtgaatcaggagtatcaaatgcatctattttgcataactctttaaacagtttgcactaaggactatcagcgttctccatactattagaagtagagtacttagcatttttggatgtcgttagattaagcagtcaactccagaaaccccaaaacgcactaaagaactccatccttaaaattctgtctgtgaccaaaggcccaagagcccctggtaaaccgctggtgtaagtacaagagtccgaaagctgaagaacttggagtctaatgtttgagggtagaaagcctccagcatgggagaaagatgaagtccagaaggctcagcaagcctgctctgtcatcttctcctgcctgctttactctagctgcactggcagctgattagatggtgcccacccagaatgaaggtgggtctgccactccccgtccactgactcaaatgttaatctttgccaacaccctcacagacatactcaggaactatactttgcatccttcagtccatcaagttgacactcaatattaaccatcacaaggtttgagagttaaaattggctaatatgctgggcgtggtggctcacgcctgtagtcctagcattttgagaggccaaggtgggtggatcacttgagatcaggagtttgagaccagcctggccaacattactaaaccctgtctctactaaaaatacaaaagaaagtagctgggtgtggtggtgcactcctgtaatcccagctactcaggaggctgaggcaggagaatcacttgaacccgggaggcagaggttgcagtgagccaagattgtgccactgcactccagcctgcacaacagagtgagactccatctcaaaagtaaataaataaataaaataaaattggacagtagttttctctgcctaattagaagtcagtctatatatctgatgtgttgggagggttattaccccccagaaaaggatttctttcatagatgaaataaaatgaattcgttacaagacattgtggagatgttgctaagccctttaatttttggaaactcagtataattttcatcagttcttgtgaaacttgatttatgctcgtatcatcttccagagtgttggctatgcctgtgtactacctttaccactaattacttaatagtttttctttaaaccaatccactttttttactttagctccatcctaaacaataatatctatgaaatcacaggcttgcaatgttgattactttcttttttctaaaacacattaaaataaataacaacttgtttaaaaaagttttaaatgcccatatatcacctaaaatcagtttgaaccaccagtgggatacacacacacacacacacacacacacatatatatacatatacatatatataatatcacagtttttgaaagcactgaaaaaagccaagcagattattgactttttttgtttttttttttttgagattgagtctcactctgtcacccaggctggagtgcagtggcatgatctcggctcattgcaacctgcatctctcaggctcaagcagtgctcttgcctcagcctcccaagtagctaggactataggtgtgcatgaccacgctcagctcagctaatttttgtatttttagtagagatggggttttactatgttggtcaggctggtcttgaactcctgacctcaagcactccatctgtctaagcctcccaaagtgctgagatttacaggcatgaactactgcgcccagctgtgactttttgttttctctcctcctcctcctccttcttcctcttcttcttctcctgctgctgctgmtgatgatgattctccttctccttctccttctccttccttttcctcttcctcttcttcttctacttctacttcttcctcatttattattattgttattattttgagacagtgtcttgctctgtcacccaggctggagtgcagtggcatgatcttggctcactgcaacctccaccacccaggttcaagtgattctcctgcctcagcctcccaagtgggtgggattacaggcatgccctcacacccggctaatttttgtacttttttagagacggagtttcaccatgttgcccaggctggtctcaaactcctgacctcaagtgatctgcctgcctcagcctcccaaattactgggattacaggcgtgagccactgcgtccagccatttcttcttattttttaatataatagagatggggtctcaatatgttgtccaggtggggtctcactgtgttgcccaggctgatcttgaattcctgggctcaagtgattcttckgcctcagccttccaaagtgctgggattataggcatgagccactgcacctggccaggttattgattttttttaacacttatttcaccatctactaaagaataaaattattcttggttaagttggcacaaaattttcagagtagtttctgtagttgtgttgtgattattggaaactaaaaattgtgcatatatacagacacacatatatacatatatataatacatatatgcctagatagtggattatatgaacttttatttgggatatagccagccgttttcagttgcttaggcagtcagcatcacgtatttgarggctactataaagacaccattattgtatacttgcgcctctattcttactcacaagcagtatgaagaatgataataaataattaacaatctggaacttctgggttgtgaagtatttttatttcatgcatctgttagtaataatctgttgtttatactaagtttatagtaaagtaaatactggaatatggttcatttaagtatggtttgcctaatgggacatcagaaaaaattcatataaagaaagatatcaatggttttcacattccttgtaacaaaatggtctgtctgattttctactatacatatatccctgttcatgtaatatttaaacagatgtgaacaaatggagaagcttctggagaggtcatttagagcccatgtaacatctytccacatagactcatagaacttgtatctggaaggaagcttagaaatcactttgttccactcccttgttttattaatgagaaaactgaggtcctcagactaagtgatttgcccaaatatgtgcttctggcatatcagctgtgtcacatttatgcagttggtaaagttttagcttttcttcctcttggggaaatagtgatatgttcagaaagcattatgtcatcccgtctgtgtctatttttttgtgagggagacaattttttggagtacagtgaaatagcatccacttttattttaaattacagaaattccatggtcaaccaactccacttctaatccatttttgaaatacagtaagttaacattaatttttggtggcacagaasatactttataactactattattcgtataaatacaaaattaacctgccaggcacggtggctcacgcctgtaatcccaacactttgggaggctgaggtgggtggattgcttgaggctaggagttcaagaccagcctgggcaacatggcaaaactccatctctactaaaaatacaaaaaattagccaggcgtggtggtgcacacctgtaatcccagatacttaggaggctgagacatgagaattgcttgaacccgggaggcagaggttgcaatgagccaagatcacgccactgcactccagcctggataacagaatgagactctcaaaaaaaaaaaattaacctattgaattagagaattagcctattgaatcaggaattatttgtgtttctaatatacgtgaacaagagagaaaaacatatttttctaagcaatgtcaagactatataatataatttccatttttatggcaagtaagtatatgtacatttaaacattccaagttcttgatttttaatctacaattatgtctaataacaataaataatagaacaataaatactaatatataataataaactgataataagtactatatagtaatgaaataataaaagctgataatcaaatgtaataaaagaacattttcatattaatgcataatgaaaactgtaygaaataagttacctaaagactaaactggccaggtgcagtggctcatgcctgtgatcccagcactttgaggagctgaggaaggtggatcacttaagcccaggagttgaagaccagcctgggggacatggtgaaaccctgtctctacaaaacatacacaaattacctgggcatggtggtatacacctgtagtcccagctattagggaggctgcagtgggaggatcacttgagcctgggagtcagaggttgcagtgagctataatcatgccactttactccagtctggatgacagagagagaccctgtctcaaaacaaaacaaaaaaaaaatgaataagcagagctgttctcctgaagcatcagaccaagggccagaaaaaagagaaacttctgagcagaaaagtactgccctggccccaatagtttccttggtttgctttccatatttgcaaccgtggcataaaatgattatcacgtgtcagtgacaaattaacaggtgcagtgactcatgcctataatcctaacactttgggagaccgagtcaggaggatcrtttgagcccaggagtttgagaccagcctgggcaacatatcaatacctcgtctctattaaaaataaaaaaattagtgaagtgagatggcatatttctgtggtcccagctactcaggaggctgagcgaggtggatcacttgtacctgggaggctgaagctgcagtgagccacgatcatgccactgcactctagcctgggcaacagagcgagaccctctcaaaaaataaaaagagcaagccaagaggtaaaggtttaacttcatctgatacctaaacaagaactcaagaataaaatagcaagtgccatagagactttacctatgaagtgaaaaataatttcaaaggaaggacagctaattttgtgtttgtaataggtttatactggattgctccacagcttgttggtaaaagtaactttgagcacttagagaacacatctttatacttagtgtgttccaatttaaaaagtgttattactttttttttggaaaccgagcatctaagtaattctgagttctcccaggccaacagaaactgagacagggaaaatgaacaaccatcatccccggaatgctgtgatttgccataaccaagaaggcaagtgagttttcacagtgcaaaagacgttgccagttgttcattcttctgttaatgctaccagagagtacatattctaaatctgttcacctgtgttttgagactcaaagcagctctaaaatacgtacattctttccagtcaagttcacttatccatccatccataaacatttacagaatcctgctatgggccatccattgtactaaatgctgtctgtgatcctgttctcacttaaacattgagcagagatgattctttaagagttatgataatccttctgtagttctcctgtggtgtccccagagaatgccaggagattagaggcccctcaaatgaacacaatatcctgccagtctccgcagtgtgcatcatttgtcattgacatagggtagtcattttgcactgttgttgcaactatgaaaagcaaacaaggagactcttggaagctgggcaatgctgttctgcataggagtttcctttttttctggctcttggtctcaggcttcagaagaatagctctgcttgttcttctcttagcaataaagaacaaggtcccaccttccattctctccactgaaagcagtagaggtacccgcaggggagaagaattttgcgcattacctgttcttgctctcttcttggatagggctgtggctgtgtccattgctagtgtctttggtggctgatatggtttggctgtgtccccatccaaatctcatcttgaattgtagctctcataattcctacatgttgtgggagggacctggtgggaggtaactgaaccatggggaaggtgggggggggttccgccatgctgttctcgtggtagtgaataagtctcacaagatctgatgattttataaggggtttccactttcacttggctctctcattctctcttgcctgctgccatgattgtgaggcttctctagccacgtgcaactgtgagtccattaaacctttttttaaataaattacccagtctcggttatgtctttatcagcagcatgaaaacacccttctttcttcccagagtgaattagtgaatacaaaggcttcagcgagttacatgcgcttcatttctgcctcatagtcattaacgctttaatacgtttaaccctttagttgttttgtttgtttgtttgtttgtttgtttgttttttgagatggagtctcactctgttgcccaggctggagtgcagtggcgcgatctcggctcactgcaagctccgcctcccgggttcacgccattctcctgcctcagcctcccgagtagctgggactacaggcgcccgccaccacgcccagctaattttttgtattttttagtagagacggggtttcaccgtgttagccacgatggtctcgatctcctgtcctcgtgatccgcccgtctcggcctcccaaagtgctggaattacaggcatgagccactgtgcccggcccctttagttgattattaagcatttcttctttaggaaagccgtgtttagttactctcaccgctatgtaatgccagttacttcaaagtactttgtttttgtttttttgagaaagagtctcactctgtcacccaggctggagtgcagtggcctgatcttggctcactgcaacckctgcctcccaggttcaagtgattctcctgccttagccttcccagaaactggcactacaggtgcgtgccaccacacctgtagtgtggtggctaatttttgtatttttagtagagacgggatttcaccatgttggccgcgctagtctcaactcccagcctcaggtgatctacctgccttggcctcccaaagtgctgagattacaggcatctgccaccatgcggggccctcaaagtattttgtttatcataagtgtattcattccatttacctacatgctgtataaaatttgttataaacctgattaaattgcaaactccttgaagacaggcaccatgtctgctttttctgtctctaaggtagagagggtctgacccaatttattagtgttgtatgaactgtcagcaaacagaaagaaaaacaaaacaaaagaaaccctattatcttgtggaaagaccttatattcaattaaagattgtaggaagacctgactgcaaaatgggttgaacttttgagaagtgaaatgttttgctgctbcccagcactttttttttttaagctctcatatcacaacttggctccatcacaattaatcttatgtggtaatgcagtgacaatgagatgatttctctggagaatctatgctaatactattaaaatgctcttacaatgtcaaagtgattgcagtgtatgcatggggggactgtgcttatgcgattatgatattatagtgatgggcgattaccataggaaactactaattcaaccctgcagggacttgcattatgaagccattagaacaggagattataatgacacaataacttagatgcacattcatgatgtgaaaaccaaaagctaattggaatgcaagtcatatttccgttaaattgtaattaaacactgaaagcaatgcttgtttaaatttgagacagagacgtgcaatccaggaatgaaagttgtggggaaggagtgcatggcgagtgtaagcttagaagtatctagaaaccatttgcaactctgccctttagtatttactgggtgtgaaagctgtcactgaagctgcttctccagatttgctccctctctgctggtcctctaaagcaaccaaaaacagtaccaagacacaagaagcgtgagtccaatttccattcctatcacaaccactaacattgacagcctttttgtttcatttttgaagtgagcataaagcaccttacctccctcaatacaagagactaaagcacaattttttccatgaataataaccttttatatatacaacaaaattagtccatattcaaaatcagacagaacagataagtgcaaagggaaaaaagatttttaaaaagcyttaaaaattctacccccagagatgacctatattagcatctctgggtattttctttcagactattctccatgcatagtatcaatgtatttttcttcaaaaatttgcattctacaacacttttaaaacccacttagtgattcttctcaccccttccagtcgcaagatctatttcttatccaagagattccagttgataagttttgtttgttttttaaaggtcagctgaagctggacgattttacgtgtcacttgggcaagtatattttactattagagaatcatacttgcaaaggtttatactctgcatatatcagttacagggtgggtctatagtaaattcttcagattctaccagcagtgctgtagctactccacatttgtctctgtttaaggaatcaatggggcctttgagaaatcatagggctctaatttgttctcaaactgataattattgtacggtttagataaatatcgattatttttaaaaaactaggaacatttaggaactacaggacttgttagatacacccctgcatctgctagttcagatgttttgaggtcacacagcagctcgtatgtattccctcctaattatgactcaaactagttcttgctccttggtctaaatatagttgagtttttgttagtaagtatttgctttgcacttagatatgctgtatatttcagagttatttatttatttatttatttatttatttayttacttatttgagaccaagttttgctctccttactcaggctggggtgcaatgcaccatcttggctcaccacaacctccgcctcccgggttcaaccgagtctcctgcctcagcctcctgagtggctgggattacaggcatgcgccaccatgcctgggtaattttgtatttttagtagggatggggttttttccacgttggtcaggctgatctcgaactcccgacctcaggtgatctgcccgcctcggcctcccacagtgctgggattacaggcaggggctgctgcacccagcccagggttatatttattaccccttcttgcaatgaccaaatgaagaagacaatttaaattactagagtcttatttttctaattaggaaaaggaaagcacactgcagttaaagggcttgtttcgtgtcattcagtgaacagtggaattgagattaggtcttctggtcctgggttagcatagcctcttttttaggctaagatgtgatgttaccttgggttaatacttctttattaacagagacaagaataactaattttgatgttcatagtaaatacctacatagttagtaaaacaaacattggacaagttgagagactgggttctagtttaggctatctgaccttcaaaagattaaggattccattttagcatctaaaaatgaagtcatcaaattaaatgatctccatagtttattccagctcaaaaattctaaagtcaaatagtatttaacattaattgaaatgcaaatatttttattttaagcattatacattttaatacttaataatatattttacctactttaaaaaccattaatctcaatttaaaaccagtccttacttggatgacatttaataatttgacattttttagcagtagatttgtaatttgacttaaactttctttttttatttaagaaatgtattaaaattattaaagttgcagatataagtctaatcaaaaagagatgaaaattacagtctttttttttaaatagagtctcactctgttgcccaggcatcctactgcaacctctacctcccgggttcaagagattctcctgcctcagcctcccaattagcggggattacaggcacccgccaccacgtctggctaattttggtaattttgatagagacggggtttcaccatgttggccaggctggtctcgaactcctgacctcaggtgatccacctgcttcagcctcccaaagtgctgggattataggcatgagccaccgcacctggccaaaaattacagtcatttgatatatcggcaatattgttaaattacagttaaaactacagtgaaaggagatttttcacttgcataattatataagtatatagataaatcattgtstcaaataatattttaaatatgtgattttctgtgaattcttaggaagcaggtgatagcaatgattgaggtgctcaattaagctatggtactagaggaacctttctaaatattttactgcagcttatttttatggggaaaatatataagcaaattaaattttagcaaattaaatataattaaattcctttatatttaattacatatataattatatatacatatgagttaattaaaatttgttatttgatagtggagattttttctatttttgtgagactttttcgctagagaatttagaattcagttagagtattttctcagccatctcaaagaccaggaaagagtgattattgctctatgacacatgtagtcattacagatttgcccttgaccccattgtagtaaatcagctttcaggagttgaaattagctgtttgttaccttacttttagtacatcagatactagtctttccccaaaacacttctctctgtcaggtgccacactctcttaggaccagacaaaatttgttactttgagttctttcctagaccattaataaaggcgacctctagagcaatttttctcaaacttggagttccacaaactctcaacaaaattttgattttgtcttttcatttttgtaatcatcaaaccattttaagcatattctgaatcaatatacctattttataaccatatattgccctagggtttcattatatgcatttccattactttttaagacttgagtgataccaaatcattacctaaaataacaacatttatctttttcatgactttttttttcaaactggggtctctgttttactggaagccatgaccgtatttcctaggatttttttttttttttgagacgaagtcttgctcttgtcacccaggctggagtgtgatggcatgatctcagctcgctgcaacctctgcctcccgggttcaagcaattctcctgcctcagccccccaagtacctggaattacaggcgcctgccactacgcctggctaatttttgtatttttagtacagatggggtttccccatgaaggccaggctggtcctgaactcctgacctcaagcaatccacccgcctcggcctcccaaagtgctggrattacaggtgtgagccaccacgcccagccttttcctaggactttatgagaggtggttggattgagagagcagtggataatctgtcaaagtggtttacttcctttatttatttcctttataagaagtacagttggtttacaaattaaatcatatatgatggtggcgtttgtgtttgtttttctgagtctgactttagggtttgtttatagcagtatcctaagggtagaaccaagagttaagacttgttgtgagttttctcgtctttgcaatttttccagccctgcgatttgtgctgtgtcttccacataatctacttttttttttttttttttgagacagagtctcgctctgttgaccaggctggagtgcagtgatgcaatcttagcgctctgtagactccggctcccaggttaaagtgattctcctgcctcagcctcctgagtagctgggattacaagcatgtactaccatgcctggctaatttttgtatttttagtagagacggggtttcaccatgtaggccaggctggtctcaaactcctggcctcaagtgatccacccgcctcagcctcccaaagtgctgggattacaggcatgagccaccatgcccggccacataatctactcttaacattacctccttaagattgatggctgccgggcgtggtgagtcacgcctgtaaccccagcactttggaggccgaggagtgcaaatcacaaggtcaggagatggagaccatcctggctaacatggtgaaaccccgtctgtactaaaaatacaaaaaattagtcgggcttgacggcaggcacctgtagtctcagctactcgggagactgaggcagcagaatcgcttgaacccgggaggcggaggttgcagtgagccaagattgttccactgcactccatactccagcctgggcgacagagcgagactctgtctaaaaaaaaaaaaaaaaaaaaaaaatactgtttctcactcatctgtctagctgagggaaacttggagacagagggaagaactcagccaagctcctgataaaccacttaattaaagctaagagattatcatgataaatgttaattgggattatcatgataaattgggattcttgtcctgtgttcttttataagaaacaggtgatgcatattttcttttttttgttgttttttgagaccaagtctcgctcttatcacccaggctggagtgccatggcaggcgcgatcttggctaactgcaacctctgccttccgggttcaagcaattctcctgcctcagcctcccgattagccgggattacaggcgggtgccaccatgcccggctaatttttgtatttttagtagagacacrgtttcaccgtgttggccaggctggtctcgaactcctgacctcaggtgatccgctcayctcggcttcccaaactgctgggattacaggcgtgagccaccatgcccggccaaygcatattttctttggcccacattttaggtgtttattaataagtgttggtcgacgcccaaaggagaaatctcagaggtcatggttgttatactatttttaaaggtctcccacaggatgcttaaggaacctatagcagtggattctgcctttagtgaaagtggaatacagctcatcatccttgtctcaataataaccccatttcctcattggtgaaatgggaacaataataataaaagtggatttcgtctcaaagtacatccgacggtccggtcttccactgtttttgatgactcaccttctgttgatcccttgcctacttcaccggtacattaggagatttaattaaagtgtgtagaggatctaagctcttcagagaaacacacagcattattatggcagataacacttctgatcttccataatctcttgaaggtaatgaaaccagcaatatagaaagctgagggtttaatatagtcagagttttatgaagacacatccatacaatactttattaatagtggtcatcattgtggccttgagagttcagaattcaattcctaggaactttctaattgttctcagcattttgatttaacttttttcctgtcaataaacacaatcgagagatcagttaagtattcaggtcatgctggttttactcaactttgaaggctttcctattttgttttcaaactatgattattacaatacttttgtaagttggagcaggggggaaaacagtatttatttaggcttgtgtttcctgactcgtctcctggtctcyggtttctccagctttcaacctgtattccaactgcctacttaatgatcgcccttatgtagttctcatcctctgggccaagcccttgtgtcagtatttttcactgtaagctaatgtacaacctacaatcagcctttacgggatgctttaaagtctggaaacatgctcctcattgctcatatcatcagaatgtctctgtgacaagccacctcctccaggaagccttctcattcctccagtatcagtgaatgttgtccacaccgatctcacagggcacttgctttgtacctgtatccatccattttcatgctccagataaagacatacctgagactgggtaatttataaagaaaggaggtttaattgactcactgttccacatggctggggaggcctcacaatcatggtgggaagggaaggatgagcaaagtcacatcttacatggcaacagggaagagagaactcgtgcaggggaattcctctttataaaaccatcagatctcgtgagacttaaacactatcacgagaatagcatgagaaagacccacccccatgattcaaatacctcccactgggtccctccatgacatatgggaattgtgggagctacaattcaagataagatttgggtggggacacagccaaaccatatcagtacctctctcctgacatttactgcactctgctttgtatcgtaagtatcctatgaatatataaaaacgatgmgtgactcattgaatgcttaccatatatgtgctaaggtaggcactgtgttggtggctcctctcctagggccaggattgtttctttttcatcttcgtttccctgcatatcttcagttgaagttagtagatcctcaggaaacatttgcaacattaaattgaaatgtrtgcaggtgaaattagcacgtttggaaagctgatttccttgaattcccttcctatgccctgagaacttaagaccgaagttgccccctcagatctgtaaatcaaagcagtttttcttaatatttcaggaagcataaagatcattggtcacaagcctataaagaggacataatgccaacgaaaacatangtttgcttgtggctgaaattacattccatcagtatggaaytgaagggtggatagaacasaaatatttgctcattggttgagcasacatttattgatcatctgcctctgtgcaattgctgtttgtattagttcattctcacactgctataaagatactacccaagtctgggtaatttataatggaaagaggtttaattgactcatagttctgcctggctggggaggcctcakgaaacgtaaaattgtggtggaaggggaatcacgcatgtcttacatggcagcaggagagagagggcaagtgagagcagggaaaactgcctcataaaaccataagatctcatgagaacccactaactatcatgagaacagcatggggaaaactgtcgccatgctctaatcacctcccatctgttccctccctcaatatgtagggattatggggattacaatttgagatgagatttgggtrgggacgtgragccaaaccatatcactgttatagcttagagttgtacctagtgttccaagtatgggaatggagttagttatcaaaacaaaatctagttacaagtacaactctccttttcatcaattatggtgttgastttcccaggcaggtgtccaggcaggcagcagaccasagcaaggcaagggctagagtcagaatggaaaagtctctgagctccctgctagtggctgtcagacctttttytgttataactaccttttttttttttttacaccaaacaggctaggttagaccatctaaaaacaggtatctgcactgattgtttgtttgagacagaattttgccctgtcacccaggttgcagtgcagtggcaccatctcagctcactgcaacctccgcctccccaattcaagtgattctcatgactcagcctcccaagtaactgggattacaggcatgggccaccacgcccagctaatttttgtattattagtagagatggggtcttgccatgttggccaggctggtctcaaactcctggcctcaagtgatccgcctgtctctgcctcccaaagtgctgggcttacaggcatgagccactgcacctggcctgattcttttcaactctggattaacaaaacrtrgtagccaaaatcaagacttttcttggagagtctaccgtgtgatcttcaaaggacctggggagacttgtgtgggaaataccttttagatatactgtattgttatttgtgcaactgaatcatacagcctttctgtgattcaaagtttatttaaaaattaaacggccttagcaagaaattcctgaggatggtctatacatttaaaacatttacctaagagccattatccagttttacttcttataaaggaagacctatggccatgagtcacttgcagtaactttactaagtatttttagttttctgattttcagttgacttccaccaatgcagataggaaatgtctttggagatgaagtcacttgctgttatttttttatatgctcaagattctggctcttacactactgtccccttatccatggttttgctttttgtggtttcagttacctgtagtcaaccacagtctgaaaatattaaggtattttaagacagaaagagagagaggagagaaaccgcattcaygtaagttttattccagcataktgttataattcttctattttattattagttattgttgctaatcttttactgtgcctaaattataaattaaactttatcataagtatgtatatatgggacaaaaacatagtatctacagggttaggtactatttgcggtttcacacatccactggggsccctggaacagattttctttggataagagggcactactgtggatagtaagggaaagttaaaaaaacaaaaacaamacataaaaaggctatgtattcctatgtagttgggtacagaataataatctaaaatagcacatttrctgccgggctcagtgamtcatgcctgtaatcccaacactttgggaggttgaggtgggtggatcacctgaggtcaggagttcgagaccagtctggcctacatggtgaaacgcagtctctactaaaaatacaaaaattagccasgtgtggtagtgggtgcctgtaatcctagctactcgggaggctgaygcaggagaattgcttgaacctggaagatggaggttgcagtgtgcaattgcactccagcctgggttacatgagtaaaattatgtctcaaaaaataataatagtaaaataaaatagtatatttgctgccttctgagaacttggagtgtgaagatacaggaaagttgaaaaagcaaacctggcttcaaaatccagagcccaaacactttsggaaaaacattttccatgctttttaataatttttagctcttcmgatttgggaaaataatgtcatattccgtaaaagggctgtgctgtgatctcagaattatctattgtcagaaatatattaaataaagattccaagaaaatggccaggcatggtggctcatgactgtaatcccagcactttgggaggctgaggcaggcggatcactttaggtcaggagtttgagaccagcctggccaacatggcgaaaccccgtctctactaaaaatacaaaaattagccgagtgtggtggcagacacctgtaatcctagctactcggaaggccgaggcaggagaatcacttgaaccagggaggcagaggttgcagtgagccgagatcaaaccaccgtactccagcctgggkgacagagcaaaactccatctcaaaacaaaaaacttccaggaaaatgtttagctcttttttttttttagtgacttttaacctctattaactacacatttttgttgttcttttctagtgctaattccacttctatttataattctttgcttctgctttaatttttgttttcttactttattgtatgattcctttgtgcgagtctcctcaaaccctttgtggataaagcgggactaaaacaagcaagcatctagatgttcgctraatacatactgtgtaccaggcactgcagggaactgaggactgagaggcaaagatgtgactcaccgcaacgagctcaaagtctgatggaaaagacataaaacagaagaaggtagctaggtgcaatggctcatgcctataatcccattactttgggggccaaggtgggaggatcccttgagtccaggagttcaaaaccagcctgggcaacacagggagacccctttctctatagaaaataaaaaaaataattgggtgtggcaacgtgcacttgtagtcccaactactcaggaggctgaggtgggaggatctcttgagcccaggagtttgaggctgcaatgagctacgatcatacccctgtaccccagcctgggtgacagagtgagaccctgtctcttaaaaaaaaaagccaaaaaacaaaaatcagaagaagtgcattattaaggtgaaattgaggtgctatgagagtacctagaattgacatcttacctgtattgcttgagcaacaaggaggaaccacaggacaatcttctagttaggaagagtgctgaaggccgagtagaagttggccaggactgggaaagggttagggaggcagagtgggagtgggctggatttgcaagctgagagcaaagaggcagaaacctgctcagagaccttgcgacaggggagaagataaaaagtccaggaaagggcaggtgagtgcagagtgggttcatagggtactatcaggctctatgttcagatttgttttttaagattagaagaagactcagggagagacacattcttgtctgcgatttagaaagagcgctgtataggcttcctaaggtggattgcaaagccagagagacttctgagaagcttttactggaatccatctgtgagatgatggtggttcctactaagatcgtgactgtgagaatgaaggggaaarggaatcaaagagctattaaagtggtggaatttacgggatttagaaactgagtgggtgtgggtgaggcaggagtcttggatgaaatctgagttcattctgttgtttgtttgtttgtttctgagagcatgaacttggctcatagcctcgagtccaggctcaagtgatccttctgcctcagcctcctgtgtagstgggaccacaggtgcatgycaccatggctgactaattttgggatttgtttttctagagatgaggtctcactttgttgcccaagctgattgcgaactcctgggctcaagcagtcctcctgcctcagcctcccaaagtggtgctggggttatagcatgagccaccgtgcctggctgttttttttgtktgtttttttgtttttttttttaatttaaataagagcatttgtagatgttgcatcagagagaatgtgaaaaatatagaaatgtcatgtaaattaccgagtgctgggcttggcacatggtaattttacaataaggttgctatctattgttattgtcggctaaactagtctaattaatcttagcagaactgtgtatgaagtgctgttcatagtcaatatttggcattctctaagcagacttaggttggaattgcagcctttcagtccaggggcaagtttcttaacttttcttggccttactttcctcatagaatatcaagccagcaatgcattcgtgaaaatttgagataagagatgtaaagtgctttaagcaacacatagtagaagcttagtcaatgaacaaaaggcattattgttggttcccagcctccaagtgaggccacaggactcttatctatctttgtatctcccatagaccttacctgcctcgaataacatcttacacttattaactgcttaatacatatttatcaaatccatagtaactttttatttcatcctgttgaggcttttcgccctccattaaaagggtttcttgggagggagcggtggctcacgcctgtaatcccagcactttgggagatcgaggcaggcagatcacttgaggtcaggagttcaagaccagcctggccaacagagtgaaaccccatgtctactaaaaatacaaaacttagctgggtgtggtggcgggtgcccgtaatcccagctacttgggaggctgaggcaggagaatcacttgaatctggaaggtggaggttgcagtgagccaagattgtgccactccactccagcctgggtgacagagcaaggctccatctcaaaaaaaacaaaaaaaattcttcttatggttctgttctttaaaaaggtttctttctatggttctatttttatggtttatctttacttacaatttatwgtkcttgattcttttttttttaacttaaaaatgatgactgacacttcctaatttatgattaagaacttcccttcacaacacccccgcctccatttccgctgctaacccctcatatgagtgtgttcagatgagatcttgttcctggtctggcttaactgtgatacgaattattcaggccatggagctttttctagaattgtcactgggcttcaagacttccaccaaagtcaaaatcagtcggcgatggactacctcaaacagcttgaattgaattaaaatgaaccatagcactagaaaggcatgtaatttgatctgaaatattgcgcaggaacaatatcaagtctcaggcaagacaggcaattagcaactttgtgataataaagaatttgaaatagctcttgagttcataactcgttgcctgcctgtgtgttttggttgggggattcaaaatgtatatgttactattttacctgtgacattacwataagcatctgatggatttacactagtaacattgatcttttcccattttactcccttttactgattataaatgttataaacattaaaaactggaaaatacattaaattgtaatgaaggaaaaaaaatggtcgatcttcactcctcctgctcaaagatgagcttcacattttagtgtctctggctgttaagtcctatttatgtgtagatacatacactccgtataaatttttatcgtatttaaaatacttaaactagttttgtgttttgctttttcaggtaataagagcatttttctttattttcctcatttttttcttcacatcaaagagcatacagaatataagagcatttttctatgtcattaaatattctttgcaaatataattgaatggttgcataatgttccatcctgtttatatgtaaacattcctatgttataagacattttgttgccatctatataatgccataatggactctttgagtataaatcttttttacacatgtctaaatattctcttaagacagattctcaccagcagagcaacatttttaagacttgggatacttactgctaaattacttttcagacaagttgggcaaatttgcacttttgccagcgtgtggctaggaggttgtcatacctccacgctcactacaatcttcctattttcacaaatgagtcaatgaacgggctggatttgttgtaactgtctctcaagtgatgctttctattggattcccacaatatgactactgctaacttttaaggactaagttaccattttaaatggaaagatttcatcttgaatgtgaagctggatatctataaataaaaaattgcagttggttatttggtgtttctcgtattgctagtataagttccttaaatattatatagatattatttttatgatttagcatttatcccatgataaaactggaatcatgtatgcctcatacggattgactgtgtccccacccacatctcaccttgaattgtaataatccccatgtgtcaagggtggggccaggtggagataattgaatcacgggggcggtttcccccatactgttctcctggtaatgaataaatctcatgagatccgctggttttataaatgggagttcccctgtgcaagctctcttgcctgctgccatgtaagtcatggctttgttcctcatttgccgtccgccatgattgagagtcctccccagccatatggaattgtgagtccattaaacccctttcctttataaattacccagtctcagttatatctttattagcagcctgagaacagactaatacagtccttctcccccaccatgttttggggtttatctgaggataataattcctaataaatactttacttctttggcatttggacctctggacagctttttgaaatttgaacagttttctattatgttgtgccatctggaatttatacaaataaaatacactgtgcttcaggtttagtttgtagaagtgagaattttatgtatgtagcttctattctcttcatttctaagaagtcaacatttaaaccagacttcatgttgtctggacataaaagataaagtatttgtagagtaatttaatcgagtaggtcttagggcatagctctccatattacatacccaatttccttgcaaacttcaaccaaaaaaaaaaaaaggaaaaaactttattggaattttagagttagagcacattgtactttattcactttggaataaaccgtttggctctttcattctttaattaaggtataaactagttgtgatactttccttctctttattcggctcaaatgagtctcactgatgcaaaataaacactagatactatgtaactaytgggaataaaggaggccttctgcccaccccacctctaacctgacgaagcccctgwtgaagtcaaaggaagataaatccacgcagtgctggaatatactgtggaacctcatgatatattcattatgagtcctcctctccagcacaccccagttagtaagttccttagataaaccaaatctatgcacaaatgaactcactattaaaaattagttctcctagcgcttgaacccgggaggcggaggttgcagtgagccgaaatcgcaccactgcactccagcctgggtgatagagtgagactccatccgaaaaaaaaaaaaaaaaaaaaaaaaaaaacagttagttctcctgtaagcattcctrtgtccttaatatcactttctgttcctgccttgcatctccgcatctttttcttcgtctctggccgaatgctgtaaacgctcataaatatcaagtaataagatgcaaagagattgcaaactaaaactgaaaaccttaaagatgcagtttgtcatgaagctgctgaaagagatattggagaaatgccaaaatacctccaaagccaaagtctggctgtgtgactgtggagcatttaaaagcttctcatgacttagtttcctcacttgaaaactggaataatatctgcctgattaaccacatgaaatttgaaataaaaagcaagtaaaatgatacctaaaagcactacttaaataataaagtacctggccgggcaccgtggctcaggcctgtaatcccagcactttgggaggcctaggtgggcagatcacgaggtcaggagttcgagaccagcctggccaacacagtgaaacgtcatctctactaaaaatacaaaaaattagccagttgtggtggcatgtgcctgtaatcccagctacttgagaggctgaggcaggaaagttgtttgaacctgggagttagacccttaacagcccaagaggagaaattggtaggaatggtatcaagacargtgcttcagaatagaagttgcataacaaccagttaatagaggaccttggttaaaaaagaaaatgatagtcttcaaaaatatttttgcaaaacttttttcatcactggggtacaaaagtcaagaaaagaatgtcatctcacataattttgtcagaaaaatgatcttccctccccaccaaatctaacactcaaataattctttgttctaaccattagggcatatttataatgatgacttattttgattttttttagtgtaaaatcttaagccctttaaaaatgacatattattcggcgttagtctctatattttgaatacctactgctgtgtaacaaaccacctacccatttggggtgctctaacagaataacatagcctgggtggcttaccaaaaaaaaagaaatttggtcaggcttcgtgggtgacaactgtaatcccagcagtttgagaggccgaggcaggtggatcatgaggtcaggagttcgagaccagcctggccagcatggtgaaactccgtctcygctaaaaatacaaaaaattagctgggcatggtggcgtgcacctgtaatcccagctactcaggaggctgaggcaggagaatcgcttgaacccaggaagcagaggttgcagtgagccgagatcgcaccactgcactccagcctgggtgacaaagtgagactccatctcaaaaaacaaaacaaaacaaatttatttctcatcattctgaaggctgagaagtctaagattgaagccctggcakatttggtgtctgggagggcctatgtcctggtttgcagatggtcatcttgctgtgtgttcacatggtggaaggaaggaggaagctctttggggtcttttttataaagggactaattccatttatgaagcctttaccttcatcagttgatcacctctcaaaggccccacctgctaatactgttactggggattaggatttcaacataggaattttggagggacacacacatttatagcaccatccctaagccagaggttacaaacaaccaccattttattgtccctcatcattctgtgggttggtcagattctgccagttgcatttagctgggcctgacatcatttgggatcttggctggactagaatgtccagggtaactcacttatctgctaccttcacagggacggcctcaaggctgaaatgaytgggggccctgggatggctggagactctctttctctccatattgtctcagggcctcttctccatgtaggaaggtagccagattcttacattgcaactcggggttttgcaaggcacaaaagcagaagctgcttccaatgatatgggtcccaaactggctttgcatcactttattcacattctgttggttaaagtgattcaccgaccagctctggtacagggtagaagggggctacacaaggatttgagtattggaatgcactgaaggtcatcatggagactaacccactgtaggaagcacattcatcgaaaacgtcatttccagtactgcttatccatggataatgaggacctcctgtagctgtagtcactttggtgcatcgtttccaaaaacctaatgagytgtgatgtcaattgcagctgtcaatctacttttaatcacaggcctcaaatgaagaaattcatttagaggataagcaaattacagcttcagttttgttcataaacttaagccccttattgctaatttttttgaaagaacaagtttatgctgatttgtccaaggatactcagcaaatatttggaaaatagttcaaagtttaatgtataatcataatcctattgcttcttggccttttggcaaagatcaagtgtagtgtctgttcttatcagtttaataatcataatcctgaacatttatatattattattattattttgagatggagcctcgctctgttgcccaggctggagtgcaatggtacggccttggctcactacaacctctgcctcccgggttcaaacgattctcctgcctcagcctcctgactagctgggactacagacgcgtgccaccacacctggctaatttttgtatttttagtagacagggtttcactgtgatggccaggctggtctcgaactcctgacctcgtgatctgcccacctcggcctcccaaagtgctgggattacaggcctgagccaccatgcccgacctcatactttcttatttaagtggtgcttttaggtatcgttttacttgctttttatttcaaatcttatgtggttaatcaggcagatattccagttttcaagtgaggaaactaagtcatgagaagcttttaaatgctccacagtcacacagccagaaaacactggagccaagactccaagttttgggttcttcttttttatttttttaagacagggttttactttgttggcyaggttggagtgcagtggtgtgatcaaggctcactgcagcctcagcctcaacctcgcaggttcaagtgatcctcccacctcagcctccagagtagcttggaccacaggagtgccccaccatgcccagctaayttttgtagagacaaggtgttgctatgtttcccaggctggtctcaaacttctagactcaagcaattgtcccacctcagcctctcaaagtcctggaattacaggcttgagctgctgtgcctggcattggggttttattcaaaccacccctccatcctagaattcttttttttttttttttttttttgagacagggtctcactctgtcacccagattggagtgtagtggtgtgatttgggctcactgcagcctctggcttccaggctcaagcaatactcccacctcagcctctcaagtagctgggactataggcacacatcaccatgcctggctaatttktgtgtttttagtagagatgggctggccatattgcacaggctggtatcaaacccttgagctcaagcagtctgcctgccttggcctcccagagtgctgggattacaggcatgtgccaccatgctgggcctagagttttcttttaaactttgaaggatgtgaactggaaattcattctgtctttcgatagatagatagatagatagatagatagatagatggatgtctgtctgtctgcacatgcatgtaaaatacacattttattttattttttttttagagatggggtttcaccatgttggccaggctagtattgaactcctgacctcaaatgattcacccacctcggccttccaaagtgctgggactacaggcgtgagctactgtgcccagcctaaaatatacatttaaaaatccattgtgcaagtatagctttcattgtttgttagtgatctataggtggtcagtaatatccatttcaagctaaaggaatcacygatgcatggatgccatctggaagttatctggtcaaccccttcatttcacagatgggaaaaacaggtgtggagtggttaaccaagttgcccaaacccacacagctatttagtgaagagccatggattcttacctctgaacccatcattttaccaactagaccacaccacctcaagaatagccttccrgatgaaactatgagaggaatatagatattttacatgtttaaaacatttgtctgtagtttgccaggacttaaaagtaatacaaattttaagtgctttactgatcaaatacagctaaagaccagttgtgcagctggctcaaagtatcactrtttctgggaggcaacctatgactagggtttcatgggacagaaaatcccctgtagaaaaagcagaggacagacttcaacgtggagagttcttcatgaagaaaagcaggtgataaccattgtattcaaataacttggtgtatgtttcactctcaggaatatatgttgctagtaaaatcaagaattttacatcaaacattctcaaggcattgagtgtggaaccttctgagaatgaaaagggcagagatgagatctcgtttttcaaattaagtaaaatttaaaggtcagttattccgacagtgtcttgacaataatrttgcacttgtcccaactctaggatgttactatagtgagtaatgttgcacttcgatctgggttgaaatactgttttcttcctccctctcccttttcctccctcrtttccgtttttttttttttttggagttggagtgttgctcttgttgcccaggctggagtgcaatggcacgattttggctcactgcaacctccgcctcccgggttcaagcgattatcctgcctcaggcttctgagtagctggtattacaggtgcctgccaccacagctgactaatttttgtatttttagtggagacggggttttactatgttggccaggctagtctcgaacacctgacctcaggtgatttgcctgcctcagcctcccaaagtgctgggattacaggcttgagccaccgtgcccagccccatttaaaaaaaaaaaaaatgttttcagttggccactaaacagagaaatttgggaagccactggtaccagttacaagtttgtagaccacagtctacacaaaggccatctgctcaaccctggtgacttgaggttgactggcccaagttaaaytgaagagttaatgaagccacaagccgattttttttattcaaggagtctgatgtgttttctgggttttcaaatggcttcaatggatttacttaccagtttaagatgaacacctcacatcaaggaatgcaggatggcaaaagcctgagctgacccagaggaggagacctttcccaggctgacctgtctgcaaaggccttttcccagcactgtcacttcctgggtgcgtcactgccatagtcctcgtaattgtttagaatttgcacatttcctcaggttttcttcttacattcttagtcaatttgaaaaaaaaaaaggaaagcttgggaatgaaacccaacattttcctccaacgacaagctgctcatttgtgtctctgagcagttttgctttatttatgtcacagtttaaagaacttgctgggtcccattattgctctgtatccttaagtggtgggatttctttcttttcattcaggcatggttactgattcttttgacagtgtttaatattaaaagttataaatgcacatgcagtagggccattacaccataaatagctgagagagtagaagcatgatgactgtgtccaaggagggactcctggtgtcaccgttggtcagtgtccaggcccaggctgcttcaaagaagatatattgcaggtctgaacctgtatgcacaatggaagtattcaaacaagctttaaaaaaaaaaaggatgcatttaaaaaatatttttgtgacaaatcaaatgtcagtgttaagtgcagtgtttctagagtgcagccgcgctctgtgatgtaacacttcaaaaaatagaagtgctgatctatttgggccagacagcacttttttcttagaagkccatttatttggaggatacttttatagtaccagcaagtccagttagaaagttccatctgctctgcctcttactgcttctggtttcttgccatctacactggtgtcatctcagacaagacactacctgattttttctggataatagcgacatcctatggggctccctgcaggtacaaygggccccctcccttcatccattcgtacacggctgccaggctcttcacttcatattgtctgcaaaaaaccctgagatgcsttcccgtttttttgtcagttagggtttcttcagagccaccaaactattaggttggtgcaaaaataattctggtttttaccatcacttcattttactcatagtattaggttggtgcaaatgtaatcacggtcatggcaaagaccgtgattacatttgcaccaacctaatactatgagtagaatgaaacaagggatgtatgataagaattagacctttcatggttgggggaggagttgggaaagtcaactgaaaactgatccaccaaaactcagttttgtaatttgactatagcattttttttttttttgagatagagtctcgctctgttgtccaggctagagtgcagtggcgcaatcttgactcactgcaccctccacctcccaggttcaagcaattctcctgcctcagcctcccgagtagcctcccgagtgatgacagrcatgtgccaccaggcccagctaatttttgtattttttatagagacagggtttcatcatgctggccaggctggtctcgaactcctggccttaagtgatctgcctgcctcaacctcccaaagtgttgggattacaggtgtgagccactgtgcctgacctaatttgaccattgcatttaaaattgttagacgagtaccttcaaccaggtcaagggctgggtataacagagtcmggggtgggagaagagcctatgtttatgaaataaggacagtgtatttcagttaagagaagctctcctcattcacaggtaaaatagagtyctggaaagtcctaccctctgcaattcaaaatgccactgaaaaatatattcaatctacatagacggaatcatcttaagtataatggccagggtgaaatagctgtgaggaactctcagtgaaactaaactaaaatygcccccaaactaccgtcctgcacaccaaatcttcaacaattaggtgaattgtctaartattttgtagaagttgatttatgcatatggttttagaatacacatattttaaacatgcgtattttaaataagacaaatcctatttatcgtttctggctttcagctgtgctggaggactgtcctctgattctcttctcttatcccttttattttttgtctttaaaccctctgtgctttttcagttctagatgcatcagaattagaaatgttgttccccttggctaggctgtaatagtaattgcagtctatcctcagtcctcagattgttcaaatttcacatttgaagtgcaacagaacttttgacccatgtgtttgtagctctggctacccactttctcactakcttctgtgccggtgtatgtgagtgatgcttaagcctctcaggcatactctggaaaatgccagaagcctgctttgtttgttggtaaccagtcctgtttgcaccattgggtatagctgctctcatcgttccttaccttcttccttgttctgtgaactctcttctctatgggggaaggccatgaatarcctcttgcctgtatgttgagaagagagcaacctccaagctgaatgcagagggaaaagggctccctccctgcacaggaagcgtgtattctagatacacactccaccccactcaaagacattccagcttagagcaatgttggctacagtttgttctttaatcgtttcttatcctttgagtggaggttacattgtgtgtgatcataggaagtgccagccagttctgcctgagagcattagaggaatctcccagaagggatgacatttcttaagtgatttttttttcagraagactcacagcttgtgagcttgaaacgtaccaacattgctctttcaaatatgcatcaattgaatatgcagtttggtacttttctagcaaaagtggtagcattttatcaatttagctcagtttctgcccctctgtgactctctggaacacgtctgtaagatggtcagccagaaggaaagaaacggcaaattaacccatatggaagcttgcatctattattaatgrtactgtgatttcatcaacggaaggcatgaactacacactccttgctctcagtagcaaggaataagacactgaacagtaaattcctatccatcatcattggaaaatattgccctgtatagtgcctggcagctgtgtggtgrttctctgaagagacactgcctgcttttctcttagccaccatttgaattgcctagctgatagaagtttggcttccagaaaggcactatcaaacaaaatcaatggccatgttagccacaagtcctaagttctgtccaaaagtctaaatccrtcatttatgccttataagccaatatatcgcaaacacctgagttccagataattgcagtggcttgctataaattggcstacaattctgtcaccctctgacctctgaygttgttttcaccttgtcttacgtgtgtactatacccttcacaaattttcccctttgttcccccaaatcatctcccctctcatcagccactttctctgaaaagaaataatctaggatatacgtgaatagttcctagaattcgcaaaacaaagctactatttgttgaatatggtctgcgtgccaaatgcatctacaggtatttttacctgtggtatctaatttatttttacgacagtctatgaaatgtgcttcgttattttaatttacagatgacaaaaatggaagtcaaagaaggctttcaagggatatgggggaaatgatgacttcagaacactatttgaaggaacagtttgagagcttggaaacacgtgatgctccttttcttcagttcccagagtctgggactcgagtcctgattttgctcttggccatgcaggagtttgtcctcactattttcagtagctcttgttcctttataaacccttcatttaggaaatgtacttaaaatttttttttttgagacataatctcgctctgtttcccaggctggagtgcagtggcgcgatctcggctcactgcaacctccgcctcctgggttcaagcaattcttctgcctcagcctcccaagtagctaggattacaggcacgctccaccacacttggcaaatttttgtatttttagtagagacgggttttcaccatgttggccaggctggtctcaaactcctggccttatgtgatcttcccacctcagcctcccaaaagtgctgggattataggcatgagccactgcacctggccatttaatttttaatttaaacaaattttttaaaaggaaatgtacttttaaaggaaagtactggaattggagttcttggtatcactgatagacattggtgaacacttaatttgtgctacaaatgaaagcaaatcgaggatagagagggctttgctctttttagagatagccgatttcagtttcaataaatcacaatcgctttcattatggctaagaatctttgcttttcagtatttttgaagtgtgtttctgtgtgccctagacaatcaagcattcaacctgaagaggttcgtttcttgttgttatttcattattcaaccgagtgtgctcctcagttgttttggggaggggcatattctatgaagtcgtgtgagtcagagatcttgtcttttgtttctttatggctctaatttctgacacatcatggaccttcaacagaaatttgtttgcttgggtagtggaggaacagtagaaagatcagttgtggccacgagtgatggttcacacctgtaatccaggcactttgggaggccgaggcaggcagatcacctgaggtcaggagttcaagaccagcctggccaacatagggaaaccccatctcctaaaaatgcaaaaattagccaggcttggtgacacatgcgtgtagtcccagctactcaggaggctggggcaggaaaatcccttgaacccaggaggcggaggcggaagttgcagtgagctgagatcgtaccactgcactctaacctgggcaacagagcaagactctccctcaaaaagaaaaaaaaggaggaaagatcagttgcttcaggatatttaatttagctaaaaagtgacaaatgaaacagtactgatacatggttagtttggatgtaagttattgattctgaatacttttttttaattacaattactgttgatttatccaagaatgcatagctatgattaagagatacaattaagttaaagaaaagtgaactgaatatcaaagaatatttccagtagataaggttaggactaactcaggcagaggactcccagtagaaggggtgggaggcaattaacaccacgcacgtcacttagatctgcagtggggatagattctgaagtcggcaggattgtgagatcgtatctctagttttattgatttgccttcttacatgggtatatgttcacagcctcccaccccttacggacaagagtttatgtgtgtgttaaatattctgattgtagttgtttgtttgtttgtttgtttttagaaaaaagaaatcctctttttagaacatctcttggtggtaccatcagaaatgtcttccttaagtggaaaagtccaaaccgttttgggccttgtagagccaagcaaactgggccgtaccctgacccatgaacacctggccatgacctttgactgctgttactgtccacctcccccgtgccaggaagctatttccaaagaacctatcgtgatgaaaaatttrtattggattcagaaaaacgcctattcccataaagaaaaccttcaattaaatcaggagacagaagccataaaggaagaactgttgtattttaaagctaatggtggaggggctttggtggraaacacaaccactgggattagccgagacacacagacgttgaagaggcttgcagaagagactggcgtccatatcatatctggagccgggttttatgtggatgcaactcactcctcagagaccagggccatgtcagtggagcaggtaaaaagcctaagttctttgacartatttgttcataaattcagaacagccagaaccttggaaatgccctgggttcagaggtagctgggcatgctacggaaatttgctagctagcaaagacatctgccagttggggccccagttagtaacactgtatttcataaagaaagtgccaattttgcaagcaagccttgtggtaaagaaaaaagaaaataataataataagtgtcaaggaaagagatcttagtgcactggtcattgcaaaatccaacgtgataatagttagatttgtgtgtatcgtatctgtcctcagtattggcaccacagtctatttgtaaacctcacttttccatcttmagttatgctacctcgattttttttcaccctggattttataataaccagcaatgaagattcactgtagggtgaaacttggcagtcaaagacttggcacatttgtgaatatgtttcagtttcctttcacaaaacaggagaggtggaagaaaattcattcccctgtgttttgtcataatatggtcttaagaatgggcagaaggaagtaaattgtttagggacaaaaagaataaggtgcaaaaccttttttgcacgtgtatgtgttctctttctaaacacacatgtatctatttatacatgtttacacatatatgtatatattcgtatgtatcttccattgcctgcatgacaggcatagggtgtcagctcattctttgcaaaagatcacttactctctggagtattttgtatttcaaaattttttctgcattattttccaaccaggactttatttttttaatgtatttttgttgtttaaagactatgctgatgatgaggattatatattcttccaaccactyttagtggtaactatacatatgaacccaaaagtctaatagtagtatagtgtgctgtgaattttctatgctgtctatgataaaagactggaataaataggagagaattaaagcatttcttgatgccttgtgcggtgatgcaagcgtgtagtcctagctacatgggagcctgaaatgggaggttcacttgatctcaggagttscaagtccagcctgagtaacatggtgagacctctgcttctttaaaaaaaacaaagaagaaagaaaaagaatgacttgatacacgggacatagattcaattcattggcggtctttctatattctagatgctgctccccaggttaagttacagatttttttttgcttcatcctgaatgtactctcattaagtcactttgtccccctccagcttcctaaagctataaatttcttgttaaataatcatggtatgatattatcgaatcttggatttagtgcaacttgttgatttttgatttggccagcaaaatgcctttttccttggccaatattaattgataaatactgaatacatttttaaaagamtgaatgacaaaataaataaattcattcacatactgtggtggatctattttgataaatttcacaacctataaaatatattccttctcactcttccttagcttrccgatgtccttatgaatgaaattctccatggagctgatggaaccagtatcaagtgtggcattattggagaaattggttgctcctggcctttgactgagagtgaaagaaaggttctccaggccacagctcatgcccaggctcagcttggttgtcctgttattatccatcctggacggagctccagggcaccatttcagattatccgaatattgcaagaagcaggygcagacatctccaaaacagtcatgtcacacctggataggtaagtaggctgtcttacaaatggatgcaaactgccatrtaattaatgcatgatcaaattaagaatctacagtaatcagtcaatgcaatactaatcacgcagagaaaaccactaactatatggaaggtagtatttataaagtttcacaactgacatgaataaaagtcaatgctgccatttttgtgtccctcctctgtgtcagatagtgtcctaggtatttcacataagatatttygcataagtcatttcctttaatttactcaatcctttataactcataacaggtgtcactgtctacttcatttctttgtctcatgggatgctatcaaagtagctgccaattccacttgctcaatgtttaccagtagttggagtaataaagttatcacacatataaagggagggaatgtcaatggtttcacccagagaagaaaaccgcaaatataaatgttcacatttgtgtcacttgtggtttgaatcatctgaattttggaaaatgcaattataaaaaataatagtaataagtatagcatgtgttgggtagtatcatgcattagtttcctattgctactgtaacaagttatcacaaactgggtgcccctaaacaacagaaatttagtctctcaaagttctggaggccagaagtctgaaatgaaactttgtcagggccccgcttcctccaaaggctgcagggagaatctttccttgcttcttccatagcctcagatccagctgttccatggtttgtggctgcataactacagtttttgcctctgtcttcgcatagccttttcctcactgtctatgtcttctcctctgtttgttacaaccacagttgccattggatttatggcccgtccagataatccagaataatctcatctcagatcatttacttaattatatctgcagaccttttccccaaataatgtcactttcagaggttccaagagttagaatatggacctatcttgttggggttcaccatttaatccctacatattattttagatgcataggggacagtaaaatgaatgactaaatgaagaaatgccagctgctgttaattttatgaacaagtctaactgttgctaaggctactcattagccttcagttgaatttattatagaattaatacagcaccagtgagactaataatatattatagttacttctatcttgcctattggagtaaagccatattaacatattgataaatcctgattatcagaccagacagattgctatttcataaactaacagtcctgcaaaatgtattgataaaatgcctctccttatgaggctgcagtgaaccatgaccactacactccagcctaggcaacagagcaagaccctgtctcaagaaaaaaaaaattcttttacttaataaaaaatactgtgaaatcatgtgcaggaaatataaacaagttgtagttatagcagaacagagaagtcagtattaatggggaaactgaggcataataggataaaggtaattctcctggcaaccaggttggtatcaagatccatacttggctatcttgaggaatcttctggttgcactgataaagtagaggcatgcttctatatactggtcacagagacaatgcatcagactgtgaaaactagactctttggacccagtgagaactttgaattctaactctcattggtgtaacatcttggacagcttaatttgaatttaaaacaatgtattttataatgttgccttgtatgatatgggatatatgtagcacatttactgagtaaggatgatactttttaaacattgtgaagtacctyataccttcaaaaatgtattacactaatacttttaaattttataaartgttttagattcttaaaagcgttgcattctgcagttattatacagtgtaattgttctatatgtctattagaacataatcatttatcatgttcaagtattctgcatttctrctaatttaaatatatatatatatawggagagagagagagagagagagagartctgtctctctgttgcccaggctggagtgcagtggcatgattttggctcactgcagcctcaccctcccaagttcaagtgatcctccaacctcagcctcccaagaagctgggactacaggcatgtgcctccacacctggctaatttttatattttttgtagagataggttcttgccctgttgccgaggctggtctcaaactcctgagctcaagcaagtcactcgtcttggcctctcaaagttctgggactataggcatatgccattgtacctggtcataaatttcttttaattgcgtgcttggcattccttgggattcctgaatgtaaggatgtacctttcattgtttctgaaaagcctcagccattatctctttaaatactgtttcactcacatgttatttatcatctgtatcacaaactccaatttgatatatgtagggctttcttacctatactctgtatttcttaacacctctttcatatttccatccacgtgcatcactgagctataatttcttcagtttgatcttcctatttactacttctctttccaacggaatcaatctgtcacttagccaatatatttggtttataatgttgagaactacatggtttttctgttacctattaagttctagttgkttacttttcaaatctgcttggttaattttgatcatttatgttcctttcaacatggtttcgattcaacctttaaaaaaatattaaacatacaatgtataacttgtawttgataaatctaacttctactgcctttgttttactctgatatagtttactagttcttctggctgtcattgataggaggttatttccttatgttttagagtacaattttttgttgtaacatcagacatcttggaaattattatgagtattaggttggtttcctcttacccctggttttttttttttggktatttattttttatttctggtaggcagttgtggcactacttacgtgggacactttatactaaattttttaattgtggtaaaatgtgcataacataaaatttatcatcttttaaacattttgaaatgtacagttcagtaatgttgagtgtattcactccccatggcstgtgacaaacgccattctactttstgtctmtatgaatttgactactctaggtacctcatgtagatggaatcacataaagctttttgtgactgtttaaactaaattttagacttgagagacttagacccacacaggtgmtatgagttctgacccctcagcttagcaagtgcaggaatggggctatggattctcaagggagactttttctcaacttaccttcctttcactagaagacaagactgagaaagatacatacagataccccttgacttaagatgggttatgttccaataaacccattgtaagtcaaaaatattgtaagctgaaagtgcatttaatatacctaacccactgaacactacagcttaacgtagtctaccttaaacatgctcagaacccttacattagcctatacttccgcagaatcatctatcacaaagcctattttataataaggtgttgaacagctcatataatgtattgaatactgtaccgaaagtggaaaacggaatgtttctcttggtacttgaagtacggtttctagtgaatgtgtattgcattcacgccattgtaaagtccaaaaagcattaaggtgaactagccagggaccatctgtaatctccaaaaactgtatatggggcaagtttttacctacttcatcctcaagggtgttgccttccatataaagggagtagccctttatatgtctccagtctgatctcctactcagttcaagcccaagctctgtcttacttggttcattaataccttttaggcaaatgctagctctaggtctcaacttattcctcattttctcagctctcttgttgtctctgtcccgcgagcaagtaagtgttactttcccaccagctaaaccaagcatttcaaaatagggtgttttttttctctctcttcaatataatgtagtattttacatgcattctgctggaaaggttttctgtgaacatctagtctgccatactgcttgaaactggctcaagatgattcgtaaagaagaagctttctatctccatctatttacagttagacatgtatgtaagttagaaaattatgcttggcacaaatagaaaacaagctttcactggaaaatgtgaaataaacccttacttctaccacagtagtatttccctgctcataaaatcaaacaatatataaattgcaaatgttttctttattgcctagtgatatacatatatgtatacactacacctatatatacacatatgtatatatttatgtatatacacacacatatgtattttttttctgttamacaataaagatacattaccagatttccatttggctgcagtttcaatatatctctctagaatgggtcagaacagaatggaaaggttgacctgacatcagacaaactcagaacattctagaaaattctgagaccatcgctagagcagccatccattctgtacctatctgatggattattcacggttccagtgcatgaaaaagacatacatgaaagtatgagcatttcagaarggaggcagctagggaacatggctttagaaaaagcagtgcattcggaaaaacataccgaataaagtaacagaaaaaaataatcagggaggcagatgcaggcattgttagctctttgaagtggctgttcacagcaagacagtggccatgctgaagtttgactgggtcagcctctcacagactctctgaggtctgcagggctgtgcatacgatctgagccgtactgaaaggccaaggacttcagctttctgtaacggggacaaatcacaaagggcatgtatttcatgcaacgaaatgcacagaagcctcacgaaacagacctgcatccccaaaacaaggcctccaaaaaataaaaaccaagacaaaatggcaaatcatttcatttcccccatcatgccttttcagacattaaaaaccaaaaaaaaagatctgaggctaccttgtgattggaagataatcaggccgtcgctgtgcttcatagccccctccagaatgctgggactctccaatgggactgaccctcagtcttacctacccatgatcagtttatttttcccctttaaagtagtatttccatcatttcagtatacaaaaataaaatattacagtgtgcccccaatcacattgaagcaggtaaatatttttgaagatatacaatcttcattaggattcatgcatttgtatgggtgcacacacacacacacmtacactcattgtgacaacaacaacaacaaattgctacatggctatccaaaaggggcatttgggaccctgagagggaagagttaatgaatggccatcaccttaggagacctcttaactacattgttgtcatgtgaccgttggtgacctgcttaaggtcatttactaggagataacagcttgacaagataaatctgcttctgtgtctaggccgtcccctaaccatctgctccctttaagaaacatgggcctgttggttgctgtgaatttaaccctagggaacattgcagggggctgcccttgatagttacagccacccaaagtcaacatttattggaaaagagcacctggcacttaagtgttcctgtttggtcttaatctatgaaggctttctgcctttcaatcacttactataattttactacctgttaaaactctacccacgtgtccaggtgacgtgtaatgatagcactgccttggcctccggtctaatacaggctagatgcgattaaaaaaaacaacaccccacatatatcctttttgccattcatcttcaaggagattttatccttaatggactattagagtagctgtaggtatttttatgacgacaaaattctttaccaatgaaagctgagtaaaacagcatggctggcaggtatttgggtagcaactatttactgattaatttttgagccccctggaggggaaacagacaggtgctgtgtgcctgaatcttttttctacttggttatctattcaacaagccaaagggctttgatagaaatccagggcctagagtttgattaagggcacaatgataattaagtgaaggaaaatagcgcatcactgtctttgaaaattcctagctgaggaaggtagaggaattgacctaagggtttctgaaagacaacaagagggaaacatttagggaactggccgacagcacattttattccctttgcctctgatcattcgtgccaaattggccaaactcttggaaagctataattttgatatgtttttcatgctcttaattagatgaaataagagagtgggatatcacatcattcattcattccacaaatacttgcatgtctaattaccatataccagacgytgggctgtagcctgaagaacaacccactctctgccttcaaagtcattatttaattataattatggtgatttttaaccttaaggttttctgtgaaaarccacaaaaaataattatttggtttccttggaacttacacacatttaatccctctgaatattcgtgaattaacgggaagtcattcaaaaacaattccaagcaaatgtttgacaaactgaaactgagcaaaacatcgtgatatcgttaagtagtacaggggtgtttgagaataattggaatgctatgtgcatgtatttgtttgtaacatctagaatcctatgaatatgacactgagtttcttttattcttaaaaacaattttttttttwaatttttaagagtaaaagagacagggacttgctatgtttcccaagttaattttgaactccttcctcaagtgatcctcctgccttggcctcccaaaatgctggggttaccggcttgagccactgagccggccagaaaaattatttttaaccctaaagtgttatgcaaaatttccccacccctgccctagttattgtttactgtgtattttctctcaacatgcagaasgtatggaaggaagaaagggaaagggagagggagggaggcagaaaggatggaaggaaggggagggagggagaagagaaagaaagaaggaaaaaaggaaacagaaagaaatccaggcaaatatctgacaaagtaaaatgcaccaaaattctgtatattcataaatagtgccaaataaaatgcaataaagttatggtgataattaataattaattgtggagtattccarattatactattttgggcagacctgccttcctggtgaaagggaaacgctggccatgtgctctatccagtacattctacccaccaaagccttccacgagtaattttttttctaaagcaatttttcatamctctgacaccattcccatgaaatgtgacattttaacaaataggattgccaggtctgtgagatttatcttcactctcctcaataccgtcattccctgaaccgtgtatcgccttacatgaaaaacgcaacctcttttgtgctatgtggtagctgaagagttcgtatggtaaaaagctcttcctgggatgtataaactgtgaaatgcattctaaaataaagttttaattacactttgtaattcggagccaacttctgggtttagtctaatttaaacaagggtttttctctcttgcagccatctgttccttttgcttaagcctacacttaagtcataatattgaaagggtgacgtcactccttccttatgatgtcattaaacatttctttagcgacccaagcagtcagagaactgaataagtgatggggggagatgcttgttaaaatatrgataatagcatactgaattattttatttttcattcccagttattctccaatatcaaaaatattgttcaatgaaagtcatgcctccgtgcaaaaagaatcccataaaaaataaatctttgaaatacctacgtatttggtcataaactagtacattaatgcaaacgtaccactctcatttttggcttgggtctggatcaaactaaaattcttggcaaattattagtggaagtagcaaattacatatttttaatcataggcaatatttagaccacacattaaaaacttacatcatctctatttactttctatttttgacatttaaatttatttttaattaattgagatcagttaaatttcttcaattaagaatttctcagctctcatagttgcagtggagctgtcattagcagtgtaagaatatacatgaataatgttttaaaattatgttaatatcaaattagagtatagtaaattaggttacaatcactcaattatagtaatttgctttttttaaatattgcattataaacattttaaaattaattttaggttattaagtctataattctagctgagtttagtaattattttaagtagttgttgaaaaactttaaaaaaataagaattccacatagctgtacaaatattcattggttctaaattgataaactcaagggggaggagtacaaagattttttggaattacttttttttttttttttttttgagacagtgtcttgctctcttacccaggctggagtgcagtggcaccatctcagctcactgcaacctccacctcccaggttcaagcgattcttgtgcctcagcctcctaagtagctgagattacaagcgtgcactaccacgctcagccaattttgtatttttagtagagacgaggttttgccatgttggccaggctggtctcaaactatcgacctcaagtgatccacccacctcagcctcccaaagtgctgggagtataggcgtgagccaccatgcccaaccttcaattacttttttggtaaacaatttttaatgatcagtcactgaaattcaacaattttttcaataaatcagttgtatatataagcattctgttgttattttatttgtatgccaatttttaaaacatacttgatcaagtctgtaagttttatcagggaatgcaatttatgatgcataaattcagatgtcagggcctgagctagttccatgagccacatagagctgccctcacaggcccaccacttgcccaaggaattcacagagtcaaatggctgaggagttacaattaaatcaaagctcagcacaatggaaagggcactagattaggagttggaatacctgcattgtgngtcactttaaagaacacccatgctttcctttctttatttgtgcagtgacattaatacgtgacataattatttcaccagtctattgtgagtttcacagcctgctccttgttcttgttatttaatggtgccaacatmtaatcagttgcccaagcaagacaggcttgtgattctcctcstgcgtggctgtccctgtggtgccaatgcctcatccttcactcttgctgctgtgctccgtaatctggctaataacagcgctatttacccagctgttagcctaaagacctccagatacaagctctcctgtccactcctctggtgttctctgaattcagcccctcatttatcatttgaattattataagtctccaaacacaaatccctcccttagttttggtcccagatctagcctccacaatccaccagatctttccaaaggcaaatctaattatatccctgatcctgacttaaaagcctccaatgggtcacctttgcctcaggcacaaaatccgaaggtcttggtcttctggttccctcgcctccctccaccttatctctcgttattyccagtatgcacacagtctctgagccaaagccacactgaccatgtctttgagtgccctgtattggttgtccttatatgcatctcacacatgctattctctctgctaggaatgttctatttccccttatctatttagcagaatctttcttcagaatgcaattcaccaggggttttctcctctatgaagcttttccagaaacagccaaccactgtttgatatctccttctctttgccaacctagttcctagcagcactcttaccatgacacttggtaaattctgtatagcaagtatttgtttccgtgtctcttttccacagtagatactgaaattcttccaagatgggactggtgttatttgtgtttgctttcccagctcatggctgattgcaagtaggtgatcaacaatttcttgttaaatggaatgatggatagatggatggatagatggatggatgattcccctctcttctccccttcctctgataaactacacccttatattcaggaacagcaagctccctttttgcctctcagcaggtggttctctggatttttttttttttttttttgagatgaaatctcacactgtcacccaggctggaatgcagttgcgcgatctcggctcactgcagcctttgcctcctgggttccagcagttctcctacctcagcctcccaagtagctaggattacaggygcctgccaccatgcctggctaatttttgtatttttagtagagacgaggtctcaccatgttggccaggctggtctcaaactcctaacctcaggtaatccactcgacttggcctcccaaagtgctgggattacaggcatgagccatatgcccagcctctctggatcattcatcttgatccctaccaacatttgtctaaatggtgtcctttaagactcaactcaaatgaatcaaagtgaatcaagtgaaaaaaattaagtgcttcattcttcgttcgcaatactgtgtatttatttgtacttmaatgttttttagcacatttaactataattattagcttaaacatcttccttctgcagactttaatttccttgagacagcatcttaaatttcttattcgtgtctatrttcctaacacagagaatagcacaagatagctgatagtagatgttcactgaattaatttatgaaggtgtgtttcaatgtgtgaaatgaaataatatacctgagagttatttgaaactgtaaagcccaagacaaatggtaggtgcttktgttatcttgatcctacccrcggatcaaattctttcctstgctccttagttctttctagctagggagcccacagacccttgtctaaattatcacttcatgcagacttcctttctcccacacagagtgcattttgacattaaactaaacccctcagcatatggataagatctagaatataaaagggggttgaaaatagaatcacctgtcttgcattatagtaccagccttaagaaactgggtatatgataactgtattctgacaataaagagccgaatcactttggacaccatttttttttttagctgrtgacaatttattttccctaaatttatgcctgtttcttatatacagaaaagttacttactagttgagcaaaagtataaaatatgcagcagaggaaatgatatcatatgaatgacatgaacaagtacttgataccaaaatctggtcttccttctgggaaatcccaggatgttttgtaaatgacattgcaatcatttcatccaccttgaagatgggacttttcttcagtgtgaaatgcggtagctcttctgtgcgtcacaatcacttcactgacttttcaggggaagaagtgaaaaataccgacyttaaaagctgggaaagattggagtaagaaagaatagaattattcatggatggccaggcgcagtgtctcacrctgtaatcccagcactttgggaggccaaggcaggcagatcagctggcgcatcagmtgaggtcaggagtttgagamcagcctggccaacatggcgaaaccctatctctactaaaaatacaaaattagctgggtgtggtggtgggcacttgtaatcccagctactcgggaggctgaggcaggagaatcgcttgaacccaggagatgaaagctgcagtgagccaagatcgcgccactgcactccagcctgtgtgacrgagcgagactgtctcaaaaaactaaaataaaaaacaactctcaagaagtattcatggatatagaatgcagaatgaggaaaactggctgaggttagcacctccactcttctaagatgtgctatgagatcattggtgactgggagggacaggacctctgtttaatcctcatctgctggatggcacacagagttcattttcccatggtaatatactgacattaggggtcaaccctctccaagtgaaaaagaaagtcacttgcataaatgcaacttcagtagcgctttggcagtccctggaagccatccagctgaatgtcaatttcacatgggtaagtcaccttgttagacgttcacggygcaaggtgcttgttcctagatgtcactacgatggtgagtgtgtctccrtagtgtgagtgccttggaggaggaacggagttgccctggtgcctgggtgttcttacccctggaggggcagcctggtttaagaacacggcctcaacacaaaagcagtttgggtttgtttgaagctcttcaggttgagacctgagtttatcttttctgagacttaaagtcctcatctgtaagatggggacagtcacaccttcctgatagagcttctgtaaggattaaatgagctggggctgtattaaatacctgatgactatcaggtgttgattttcttgtttcccgtcccaccccttattaatatctcataccacatactacttattttcaggactttcctttgaaaacctgtgtgatcactcacactattttmttcccctgaattttgcactcagtttgctttgtcaataagaagaatttaaaggaattcattcccttttttatttttaatttaattattttatttatttatttatttawattttggagacagggtctcgcttgctctgtcacctaggctggagtgcagtggcttgatcgtgactcactgcagcctcaacttcccgggctccaacaatcctcccacctcagtctcccgagtagctgggaccccgggtgtgcaccaccctcacctggctgattttttgtatttttgttagaaatggggttttgccatgttgcccaagctggtctggaattcatgagctcaagtgacccttccacctcagcctcscaaagtgctgggattacaagcatgagccactgtctgcagctgaattcatttcttaattgccttcacgttaatgtttagttaccccaaggaggtcatatcaataaatgtcagttaaaaaatcagaaaaaaaactgcatatatatgtatgtatgtcttggttttttttatgacagcaaatttctcttcccctctttttctttctatttgtttgtttatgttatagaggcagggtctctctgtgtttcgtctcaaactcctgggctcaagcaaccctcccagaggcttggcctcccaaagtgctgggattacaggcatgagccactcactgcatctggccttgccccttttttttyaactgcattttcctratgtctaaaatatcagcctaattgcttcccttctgaagcaatctcccctcacgtgtgatcatgaaatttttaagagcattttaacagaggaaccagcttccccaaagtcactccsctttatataagtttttgagcggataagaattcatagggattacttttttttttttttgagacaaggtctcactctgtcacccaggctggagtgcagcagtgcgacccaggctggagtgcagcagtgcgaccatagctcgctgcagcctcaaactcttgggctcaaatgatcttcccacctcagcctcctgagcaactgggaccacaggcacacaccaccacaccctgctaatttttaaagtttcattgtagacacagggtcttgctttgtttccaaggctagtctcaaactcctgagctcaagggatccttccaccttggcttcccaaagtgctgggattacaggagtgagccaatgtgcccggccaggggttacttttgaaacttacatgtgtggatgaatcttatgggacagtgttagtcttcctctagaaagacatctctgcttattgtgagattcttcagtgaacgtttataacgtaggtaacatttatatttcattgcatctggagaattgggtccctacagtccctattcatcttttattttttatttgtttatatttctttttttagagtcaggggctcactctgtcacccaagctggagtctagtggtgtgaccataggtcactgcagccttgaactcttgggctcaagcaatcctcctcactcagcctttcaagtagctgggaccacaggcgtgagccaccatgcctgccatctccccattcctcttttattttatttttttatttttgttttttgagacacagtctcactctgtcacccaagctggagtacagtggcacgatctcggctcactgcaacctctgccttccaggktcaagcgattcttctgcctcatcctcctgagtagctgggactgcagcacgtgccaccacacccagttaatttttgtatttttagtaaagccagggtttcaccatgttggccaggctggtcttgaactcctgacctcaaatgatccacctgcctcagcctcccaaagtgctgggattacaggtgtgagcccccatgctcagccaatatttgtaatattcatttcttagwtgactycacactagtgtttagttatccagagggggtcatatcactatatgtcagttaaaaaaatgaataactacacacacacacacacacacacacacacacacacacacacatgcacacacacacacacacaccccatagtaagaaagtaagcagttgtcatgattaccatagttcctttctctttgatcatgtsattcaaattgtctaaaataactgtaaagatttaatcctgcttactatatatagttaccctctgacttagcagttaaaaatctccacaagtgaatcctttcttacctttctgggattttcactttcttccccccatactaccctttgatggtaaattctccatttttcaagtgcagtgtgagggtaccacggggaggaaatttcaaattaaaaattaaagcacactctgtgcacattcagtcattgtaattctggaaaatgtcctttgagtaaaaaacaatatttagcaataggagaagccatacagtatggtggtttacagcgtaagttctaactttgagatgaatttaaattctagcacatcaccttgagtgactatctaatcaagtcccagtttctcagtcttcagaattgagagctgctgggatcatggagggtattaaatgagataatacatataatgcacttygcacaatgtcagacacatagtaagttctcataattgtcagcatgatgataatgatgctaagtgactttactttttattttcaattggagctaaggctaaagagttttctaaggctttacatttaccacggacttttcactaagtatatgcctcgatatagcactgaaaatttaggaaagttattctcaaggcattgggccaaaggacagaaaaagacattaggagcagaaataagagtatgatccaacctgtaactggtgactccatttccgtgctgactcctgccctcccccagtaccctgcccatattggataattaacacactgaatttactcaaaaggaaaaatactaaacttacctcttcccgcttacattactttaattgtgtatattttgtttttttcaagtatggttctttggggaaaacagaatatgttttctatagaaaaacacatattctttcagcctagtaattttggaagcaaaagatggtctccatggtaagaagatggaaaatgagtagtattaatagaagatagcacagaactaatgtacattttatagtagaaaggaaagattttttagcctccctgcctaaaacaacatcgtgaactctaagttatgctaatttggtgaataaatgaaaaggagccagccagggtatgatagctcagaatgaaagtcagtagtcaactcccaggaatctcacaggaaaggagaaacttcccgcacccgtggcacagggaggcttaattggttctcctgtggtttataaraaaagctttgatcaggtgcggtggctcacacctgtaatcccaggactttgggaggctgaaacaggtggatcacctgaggtcaggagttcaagaccagcctggccaacatggcaaaaccccgtctttactaaaaatacaacaattagccgggagcagtggcacacacctgtagtcccagctactcgggaggctgaagcaagagaatcacttgaacccgagaggtggaggttgcattgagccgagatcacgccactgcactccagcctgggcgacagagggagactctgtctcaaaaaaaaaaaaaaaaaaaaaatctctgaaaatacttctgacctcttagaagtagattcatggacacatgatagtgctttttttttttttttttttttttttttgtatttttagtagagatgggttttcaccatgttggccaggctggtctcaaactcctagcctcaaatgatccacccaccttgtcctctcaaagtgctaggattacagacgtgagccaccacacccagccacatattagtgctttttgttttttgagatggagtcttgctctgtcacccaggctggaatgcaatggcacgatctcagctcactgcaacctccacttcctggtttcaagtgattctcatgcctcagcctcccgagtagctgggattacaggtgcctgccaccacccccagctaatttttgttttgtttttgtttttgtcttttgagacagagtctcactctgttgcccaggctggagtgcaatagtgtgatctcagctcactgcaacctccgtctcccaggttcaagcaattctcttgcctcagcctcccaagtagctgggattacaggcacccaccactatgcccagctaatttttcgtatttttagtagagatggggtttcgccatgttggccaagctggtcttgaactcctgacctcaggtgatccacccacctcagcctcccaaagtgctgggattacaggtgtgagccaccacacccagccatttttgtatttttagtagagacgtggtttcactatgttggctagactggtctggaacacctgacctcaagtgattcacccacctcggcctcacaaactgctgggattgagccaccgcaccctgccacaaagtagtgctttaatcctcacatcgtggagttgccaaagtaatagaaatatcagcatggataaaaagccaataagacaatgactgtctaatgttcccaactcatctccatgccaatttccgatccgaaacgatcccttacatttctmtaggtccttcattcctttcatgcaatgtctaatggggtatatttttccttcattcccttcatgcaatgtcttccttcccttcatgaaatgtctaatggggtatatttttccttcactttttttttcccatattgttttctgctaggatgtttttattccttcttagctctctgtgtgattggatctctacagtggtattttggggttaccttagtgcatctctttttacttgttataatgcaaatttcttgatataatctactcttgctctgtactctacgcttgtctgtagcctgtacttgtcttacatttctctcctttccctttcatttacataatcttacatcctaaaatagttacattctttatatgacatctattgaaatgagaagatatccataaaatttatcataaaataataaattttatttaaaaaataagcactccagagcataaatatctgtatgagtattgtgccttcaagaaaatgtgggaatgatattctttaaaggctttagaattaattttagaaccactttacaatcttcacaagaaaatcaccctgctaccacaaggcaaagcctcatgtgttacccagattagcattactcacctaattcaccagacctgaggccagatttcctttaatagttttcacagttcatagcagtctttagaggatgaaaatttaccccattaaggattctcaaaatagtgtgggggcatcttctgaacacagttctgagggagaattccaaacttgctctggaataatggaagcatcattaaactaagtctgtagtacccaagtactttagaggggaaaactcctttttagatgagtaagttctgttatttctagtaacaaattgaacttactsttttatactcacatcattaagagccatttcagaagtgtctgttactcgacttcaactatgttcttgttcttgtacattgtgtgcttaaaacttctagtatgtacatgtggaaaatgggctcttcataataacagttcatctgtcgcattgtttctaggactattcttgataagaaagagctcttggagtttgctcarcttggctgctacttggaatatgatctctttggtactgaactacttcattaccaactcggcccagatattgacatgcctgatgataacaaaagaattagaaggtaaatatggtaaagcctctcatagcattccctttccctagccctttttgattgtcatatctagggaagtattagcaaagattcagaaaacagtaagcaggccgaaccacagacttgcagagaaaaatatatctatgctgtttcagggagaaaaatctctctatattattttaaggagaaaatgagtcatcctaagtaggctaaagcttagcagagccttagaagttcagtgcagatgggcagctgacaggaaacacagataatacccaacccctgccatgaaaatcagagaacaaaagacattttcctctatttacccctaatgaaataagctgttcctctctcaggttgaccacactaaagccataacttcctacaagtaatatttgaaatgctttatcaaaagttttcattaaaaaggtgatttcaagttaaatgctaaaagtataaggtctaaagactaaatattatgtaaaatgaatgcaaccttccaaaactgtataatgtgtgatgctggcagataattgtaggagtcattctttgtaatcaagtagaaaattttaggcgtcaatgatagctacctagtttggtcttggtcacatggtgataagaagattgaatgaaccaagttagaatacctaggaggagaaataaattggagattgacaaggaagactttcgtttgggaatatctaagtgttgctacccagtgaagccctaagatatggtttgtatgtgatagttgaaccgtgggaatgaatgacatcactcagagaagaagatgaggacagagacctggggacagagacatttaaggaatggagtaggaaccgttgctcaaggaaaggtcraggagaagttttcaaagtgataacatgagagatatatattcttatggaagtcagtagagaggaagtctcagggcagaagggcttgaatgccggtaataagtgacaaatatcaagggaaataaagactgaaaagcatccattggatttcacaattaggaggctcacattttataaacagagtgcaatctcagtggaaaaggcttgagaaatgggtgggccgtgaggaagaggagagaggatgttgaggtgactctttcaagaagcgtggcagtggagggaagcaaggagatgggtctggagttasaagtcaataaaggatcaagggaagcttctagtaagagttgagcaatgtttatgtgacttaagagcaaragcagagacagagccagagagaatgagtccagggaagtggtgcccattccacagggttactatagaattgacatgaaataatgttttccaagtttttgtctgagtgtctggtgcagaatatggaagtgttcaatagatgttgactttaaaaactctggatagataagaaatatagagcaaggttcctaaggcracaaatagatggaatctggggaacaaatagaaagtcggttgaaaggatgctttctccatggaaatgagagggcatgacacagcgatggggtgaatgcaaacagaagtcttagtgagggaaacaggagactgaggacacatggccacatgtcctctartgtctctgtgaggtggacatggttatctcctgagaaaaaaagagtggatttagggcagcactgtgtagagcaggagaaaggctaggaatggctgtcaggtcaatgagagagatcttgacatggatgtgttatgtgcgagacctagttgagtctagaaatcatgattgcakgcctgtgyattggcaccaatgcacacgatttggtgattattttccaaagcaaaactgttttgcgttttggtagtggaaccagagaagttgtgtgcgtacaagcagaaaatgggaacagttcaagagattgagggttgggattctatctgaaagagatggataacaatggaggagttgagatgagggtcatgggatccaagttggagggaagaaagcatagagaggaatggtcagatagacaggaaaagcatagcagggcaaataagtggactgcaggctttaatgaagtgggtggagcatatatatatatatatatatgttcaaatatatatactgtatgtgtatgtgtatatatatatgtgtgtgtgtatatatatacacagtagaagaagtgagtggaaaaagtagaaaaatgtaacatgatcggagtgggaaactgaagatggagatttcagagggggagcagtagttccctatgataacaagaactagaatataattatgagaacagaaaagtgtttgcagtggaagtagcaaagctggaattgagaagtgatgtccaggaaccatgagattcaagtattgctagttgaataaggcacactgggttgaggggaagatcttgagccagtggtcatagttgggacatcctgaggatctttccctgggaagtcacatttaygtctgtatgccttctgctgtctccaagtactggcattctgccytgatcacctcattaatagtactatgcttcaagtttagtatcattagggaaagctagttaatcagtgttgcattagttaagtaagatggcaactctcaactctacatgagcaaatgacttcacctgtcttgaccaatgaagttctgtcttttaatactcagatcagttatttgacaagtagatgtaytgtttctttgtttatttttgttttattattttaatttacttgcccaggaacccgattcaatacaggtgaacctgttcccctaaagccctrgtagttagtttatactcagaggagactattccttgcctaagggcatctggaatttaaaatagtgcagtgcattcagtcattctcatctttcacaatctcaaaaacatgatttcctgatcaatgccctcaacatatgttttatttcttttttctttttttctttttcttttttttttttttttgagatggagacttgctctgtcgcccaggcaggagcgcagtggcgcaatctcacctcactgcaagctctgcctcccaggttcacgccattctcctacctcagcctcccgagtagctgggactacaggcacccgccaccacgcccggctaattttttgtatttttagtagagacggggtttcaccgtgttagccaggatggtcttgatctcctgacctcgtgatccgcccgcctcggcctcctaaagtgctgggattacatgtgtgagccaccgcgcccggcctcaacacatgttttctaaatcatcttggaaatgggaactttgcactctggatcggcttccttttccgaagcccctttgtggtagtgaggtgcatcttttgcacacctgtgtctcgcatgaggctcccagaccttctagaacaagagaaagaagatccgtaaaggggcatctgtgaaggagatagaagggtcagatgaccgatggctcccccagcattccttcttagctccttttagccatttgtttaccctttactgtgctaaatatagctattctggatgtatggaaataataaaaattattataatataaatctgtgtatatatatataaaatacctgtgtgctattccatacgtacgtgtatgtgtgtgtgcttaatcttccttaaattaaaccatgcattctckcttgacccaaggacagcccatgttaagcactgaatgcccttttgggttgcgtgtgctccagtacccactgtcttgcacacttgattttcatcatgcatgaaaggaccacagggtccttttctgagccatcgtagtcttaaaccttgaagtgcatgaacacagaagcacgcttctgcctacctctggtgttcagcaccagaaattctgtgtctaacacctgttttcaatcttctgctccatttctcaaatcttattatatctctgccttttcacactttgtagtctctctctaatatttgtttgcaaacactaactcatttgtatttctataattaccgtgattttttgtcttctcgtctgtagtggctcccccttttctggcagcatctctgtaactcctgttcttccatataatggcacaacaggagagatgatcttttagtgtaagcaggacggggcaggttttcttcatagtcaggatatgattgtgtgtccagagccataacgttatctttctcadaagtagtctccagattcttgacttaatgggttctaaggattcccggttttaagtatgagtatcttgtcctctatactctttcattctacttcatgatttgataacattgtgtttcaaggtctgacaaaggacatcttaaaggaatttgtttatccacatgatctgcctttatagtgtgagaaattatatttatcagataagaaacataggcaaaaattttggaaaatgcccagaaaatatcagggagaaagtgtttcctaaaacctcctataccgtgatacttctttgcagttgtggatcaaggtttgtcaccctaagcttcagtattgtgtgtgcattctgtcaaatctttgtctttttatgtgataatataacttatcttagataattcccctaaactgagtgtgttccaaaagtaactgcagatcagaacttcaggatagtatacaaatttcaatgaggcaaaaaatcayagtggcacaaaagtcattacatgcacttataggacaggcatggttcttctctgctagtgcttgcattcctttgacctgcagatacaaagtctattcttccattataatttattttaaaatatgtgttctcagagggcagggctttgtgcttgagttttttttgtgtgtgtagtaccccacgttttgctcactgtagtagttattaaatatgactcatgtactaggacaccaagaaatgcttttgaaacaaaaaagatacctttcaaataatcagcctctggaggaaggcactgtccgtccgtctagatccactttagaatctagacgccaaaaaaactattcagagaatcccatagaagagccattgtctgtgagtggcatcttctaccatcaaagacccatggaagtcacgacagacactgcccagagtccagacacgtacagatggtggctgtcaggaggtgactcacactacagattccagcatttaacaaagcaaagaggatttcatttttagagaatagtcaggaagctgttctttagtccactgactataaatttaaaggaacagcttattattttagcaatcttgctgacatggaaagaagacagaatatatttgtattggtcagtttaatccaatgctcagaggctacaactaaatcaaaattgccatagacttcaaaggggcaaatggttaaaatrctgaccaaccttttttcagtggctttgtagcttatcaaatgyccctcacttgcagaccaactgattttgctctcagaatattttacttgtagtgagattccttttgtttccctattttaatcgcaaacagtccttgatattttttggccagataaaaggagagagcaagaatgagatctgaaaaatgggcccacagggagaggcatttgagagaggattgctgaatacaaatccagaacaaagttatttagtgaaatgccaaaatggtcattcatccaaactggcacatcctattagaagctatctttaatgcggtattgccaggcatggtcataaatgtcacaggttagaaatttctgtatgcatggaataaggatatgttcctgctaggatgcagcaatatttttatcrtcaccacacaatatttattaaaggtctctcagtacacacgccacagtagaagtcagtatctttacgacaagcacaataggttaatgagtaaaaagttgaaagcatcctgaaaagcgaaaatgaaagacaaatgacatctaatgagttaacatttttcacagggtgcgtctcctggtggaagagggctgtgaagatcgaattctggtagcacatgacatacatacgaaaacccggctgatgaaatatggaggtcacggctattctcatatactcaccaatgttgttcctaaaatgttgctgagaggcataactgagaatgtgcttgataagattctaatagagaaccctaagcaatggctaactttcaaataggatggktgcttatgaattcacaccttgagtataaaacttgcagagaacattcagcgatttccagtccactgtgagatattaatcagttacctakgactartgacagatcatttccttctgatgagaactaggagggkttgccttctctgagaccagctattacaactgtgcctctagggagttactcagcctaattgagccctattattttaacttaacaaaataaatacagaagtacctatttctaaacaatgatttaaagtctatatcccctaagcggagttgttgtttttctccctaatctatcagctgcactacttgagaaaatttaaagtgtttctagttaaattatttccttcttgagcgatctaatgtttcttgtaatattgatgatcctactaattatcctgctgttctttaattaatgcttaatgaataatatggcactgtaaaatagcttctkcaacaagggaagttaaattttgagacttttttccccaaaggatactgactgtaatacaattaccaattcacaatgataaaaatattttgaaaggttaattttatactgtccacctatctatatattcttctactgaaatgattttgatatctttggctttccggtatctatttttgccatacattttgctgttttgcaaagtttgtataagaacacataacactactgaattataaaaaytcaatcataaaagtcaaaatatattacataatatagtttaatgaatcattacatttataataacaaaggccacaatttaattaattggtaagatataatgcaaaaaaaaaaagagaaatgtttgccttatgtatattccctttatttcctttaccttttgtttttccttggacctaaacagagaaaataatgcttatgtatctgaagaaaaggtcagatctattggaaatgacagcccgatacttgagcctcctctttaaaaggtatccagccctgatattttgtgtaaataaaatgtttttaaaacctgttagttaaaacacttaggtgatgggcactgctgcttataaattcatcttttggttgaatcctcactatgctatttggtacctaaaaatattctccaaacccttgctgccagttcctctttgataaatatatagttaattcgaaataaaatccattgcaattcatttatgagttatcttacatatcacaaagaccaattagaattagtcattattcttgatgaagagtctgtttttaatcataaaaatcatgacagttactcagacccaggcatttcaacagagctaacaccaccttcagataggcacaccatgcataactcttgggaagttgagctttgctaaataaaagatatttctgctgatcaaagatgaycaagctttctgtgtattggaacagaaagtaacaaagaggaatgagccaggagaacaaactaattcctttaaataaataaawaaaaaaaatgcaaatgtccttcaccagtaaagcaagcaaatttttaaaatctctgtttttgaaatctactcgtcaaagagttttcagaggcaatgaaaggggaacagatttttcattgtaatagtggaagttgtgtgatagttaggagatatcaacatgcatttttaatcttttccttagatgaaagagatggcttttggcagtgtgttctaaccagaaagaaaggatttgtattactctccaaatctactgtactgtcagcttcactccacctgagaaaaaagaaaaaaaaattgatagctcaaatgcatgtaattcataaacactgcaaaggagagccacttggtgtctgcagtcctcatattaacagtctgtcacagaatgcagttaaagtattgattggcatatggtaatagagcaaccatagccttaacttacagacctgtgaaataaagggcattttgacctaatacaattaattttctggataactcttaaagagaagtcattttaactgtttttgctactccatatattgtcattcaaaatatattttaacccaaaataagttaaataatttgtgcatgtttgtgtgtgtatatatgcatacacttttttatattaaaattttgaggctatacagccactgtgccctgtggaataaagccatatatataaatgttttatatgtatatgttttatacatawataaaacatttcatctaatatatatatgtgtgygtgagtatatgtgtgcatgtttagcagatatttgtataaaatataaacactctgttgtcatatwggctatatgcgaaattgttaattttaaaataacctcaggccacagacttgtagtaatcatttgaaggcctcacctagtgtccccttggtgacgtatgcagcagctcaaattaaacctttgtgcattgggttatgaataatcttttcttccaaagatggcaaaagcctcggtttgatttgatactaaagaataaatttctctgactttcccagtgaatctaaatgtattcagttgacaaaatggacacataagggctttttytaaataccgtacataattacacattttcacacttagagggtaatcctatgatacactgtcaatctctatttttaaagactatcaccagaaaagagagaaaagaaaattcatataagaaaaagaaaatgtgaaaaagatcataggcttgggaattccctcaaatccagaaaattccaggttaaggcttgaagttgaatcattcccaggtctagctctaaggttaacaagagtacaaggcaaacaatttctttggggacaagcagcattatttcaattagaccttctcctgcagggcaaaaatcattcttccccacactatgaatggactccaagtatcataataagcaggtaaactcacaagaaccaaagctgacatatggataaaagcagcaagatcacagtacaccaaagtatcatatatatagaagaaataattcaatgtcttagatttgtctataaaaatttgtgatctatataggacttcattcacatggacactaacgataaggagtatttgctttggcggtagtggatcacacatctgcttatcttgctttgatattttttacataatgtttctgagtgatacagatgtgagtcaggtagcatttgatttccccacatatacacaactgaggtgccctgccattggcatcccctgggatccttgattcactgacgttagccatacgaatccagtgttcaaactcagaataataagyttagtttctgcattatcagtcagcataaataataaatccagaaaacgtgctgtatttgttgttgtttcctccatgggctttcccgccatctaatttgatatagacttcatctcccggctccaaatgaagaaccacactgttactggcatagtcgtaattctgatcagcatcttgggcaattgcactagcacgcacctaygtgaaacagacaagaattaggatgcgtaaatgagaattctcaagttttcttttttgccattcatgtagcatcacaagctgacttgctgccatagtacagaatttagcatagcaaagtccatgttgacctcagagctttatgaggatagtgctgtggcagtttccgctacgttagtgagaaggaggacagaaagggacaaaatagtgcttcagtggggaccattctggcagtcttatctaactacacattctaaactatgcatacaatttattatcttcctgtatcactcgtttttctaactccttcgatccctatgcccaatcacattttgaaatgaaactaatagtattttttgcattttaatttaagccagatagcaatattctaatcagctgtttatgagtacagaagttcaagtctaagttcagctgttcaccacaattattagaaaattgaggtatgtaatagctaaaaatacccaggaaaataccaactcctctactacttacaaagaaaaaaaaaaaaaagaaaaagtcttttgatttagggctttccaaatctaattcatgtaaagccccctttaccaggctgcttcagaagcttagctcatttatacatctttgattatatcacctgagttttcagagttcttttttccatcgtgtctttttattacttaactatgacatgtgcatttaaatcaagaatttaacctcaacatatctaaaagttaaagaaaggactaaattttcatgctctgaggcctctcaagtttcaagaatttttgaatgatttcgttgaatatccacttacacttaggagattctaaatatgtggcttgatttgagggcagaggctgcttataatctgcccatggtaagcctgtgatctcattagtgagttgatagacatttacaaacagtcaaattgcctatcatctcatgcattgtggacattctgtcagatccttagctcaaattaggcttcatattcatttagatatattgtgattctgccttggaaaatctttcaacaggcagacttagatttgatttatttcagtaaaacatcttctactttgtggcttgtttcatttctattccactataatgatatttccctgaataacatagcaagtgatttagtggttttgtaaasctgcactatgtaataatgcatgatttggggtacaatatgctggattttatcacttggcaaaatgagagaaatgagacagaagtcaagaatttccatgcatttctttcaaaatttaaatgatgagttttccaattaaattttcttgtgatatagtctcacgttaatgctgaaatgttaaaaaaagaagactctttaacactgctgaacttgtaaagtcatttgagtagtatctttaaagtgtctttctgggtatcacatagcaaaaggagaaaatggcttaaaggatttagaattgcttaacgctgtactaacaggcactaatataatgaaagcaatataccatgtaattatgcttggaagcactgactccaatatatatgccaatttagtaaagtggtccgttttgaccattaaataatgacgcagtttgacttcataatattttctaaagattaatcatgagtttgtaggagttgaatgctttgattcattaatttcatctagccattaattcccagggaaacaaatctacaagaaggatattgctattatgacttgtgtttttttctcatctttggatttttaatggtgaaaaaaattaaaaacaaaatattcatgagctatattagtaatacattagttatcaacccataatatactcctcagctattactaataaccagacatattttattcagtgctttgggtatttaggacatgttctatggttactgggctttaacatggttttctacatgaaggtattggagaaacaggacatactaaaattacttgatttagacacaataatccttttaaaaatataatgccatttttattctccagggtgtaaccacaaaaccgagtgaacgtcaccatttttattcagtaggcgtaaccacaaattcctgcgaatgcattagagtgattccacagactgaaaggttaccctcacagtttctaccacctttgttggatcaagccagtgtggttgctttttaatgaatgtaattctgtaagattttaacctatactgtaccgtaagactgtcccaattaaataattgccatactccagtgtacctggcatgattttggtatggctgctcacctgatcctactctaaagatataacaggacttgaaatttcaagctctagtattcagctcagtgacttcaacaattctttcaagccatcaaactattgaggaaggcaatgtgttcaccctggaggctgtttccagattcctaaatgtacagtgatttcagcattctgtctgggaataagatccatccttccttcagcgcaatcaaccgatttctacctgaatttactctaatatcttttcttattacaagataactatttagattctgctttatgtttagtccgtatttctttaaccctaaaaagattatgaatttgacatgtcattgatctctctaataagcgaataccaacccacaaaccactcatccttttaaaaatatttcatgggcatcggtgccataactaataaatttttaagagtaccaactggtctttaattattttatgcttttaatcctgaaacagtattagttttcattcgagtggcttatttattatagtggcattagagtgattgtattcaaatagcaatttttcttcatgttttctgctaaaaggattatcaacattaaagagatttcctctttccaaatgtaaagctatttgagttgaacttttacctttaatatgcactgtcatgggctttcaacaaatggtaggattaaatttaggttgatggcttcatggggagtatgagagctgcggtcattttagggatatgtttctgtgtctgcaataggtttcatagttttagcattatcttattagtgaggatctatcattagagatcatatttatggtgacatttgtaatttaattaattgctactgatgttctcgtaatttcattttcattgtacttctgtggaatcataaacaaaaggttaagtggcacatcaggttaatttactggtctttgatgtttccatctgtgatcttacattctacacaaagtataaataaaatggctctcatatggttacagtccagaagcatttctctctcttagagggaactgcatttttagtttaatttttgtgcttctcaaaatccacttaatccatagaacattacactgacatggatctctgagtttctgttttatgaaaaattaagtcagctcagagagggaacctgccattctaagaagtgatcagaccagaatataattgaaaagcaagagtgaagtattatttaaaattaataaaaagattttaaaagatttctcatttgtaactgcctgcagactggacttgacaaaatagttctaatctagagataaaattccttaactgtagtagtgtagtaaccattttccaaaatagtccacactgaactaaaaaaaaatgtttaccactatagatttatttttctgaattacctgttgcataccttttgcagaagtagcagcttaatattaccaatgaaaagacttatacattataaggtcagctgttttaccttactatttttcctgatcctcatggaatgtgtgtgctagtgtgatacaaaggaagattttacaccccaaacagtgaaataattttaaaaacaaaacgcacatagaacacctacatggtgttattttcttcaaatcagtgtaatatacacaggctcagcagtctagacatcaacatttaaactaatttaaatgtattaatcccttcttttttcatgcaattgcaatttccagatatttaaagatgtgagcatttttacacatttgctgataaaattggaatcatttcattttaattgatacctctaaaaatcatctcttcagcccgattgtattttccagacctgacctttgagtcagaagagagccaatttgcaaataaaggggtgtctcatggctgcctgctgagggactgttcataagcctttttgtgagggtgattcaatagctccattctggtacagtgagtcctgcccgttttagccatttgcctataactgttttactgttctgtgaataatttttatttatcttaatattattttcatgcataataactataataaacaaccctgtcagtgcctcctggtggccatttttcctctttttgttatatgtgtcctgagggtcccttaagctatttgtaggatagggtagagaataggacgttttttgtcttttttctctcttacgcatttaggacttttttttttttttttttggtctttcacttttgaaagaattctgacactgaagtaggtcttccgaatcctgcttgaatggtgcttaacagaaacctgggttatagctaagaatctctgaatgtccaggggtcgagttacctaaagcccaatagacctcgttaagtcaaagttgctgcaggagaggaggtctcttgatggcgatgccagggtcgcgggccatcccctatgccactcaataagcaaagttaaaaccgagaaactcagcccacaccgcaggctgcaggctgcaaggcctcgcctcagtggctactgattcagcgtgcacagaaggtcccattacacttttaggtagttacaaatattattttcctcctttgactaagagatcaaacaagcttcggttttgcaatgacctcgaatttctccacagtaaagtggccccagcagaatactgcagacccatgcgtagcccttgtagcggcgccgaccggctcagggaatcaaatcctcttggccggctggtccagaggccgatagacccggggctgggctcgaaccggtcgccccccaggccacctgcctgagcgtcctccgactccatagagagtttgggttctgagtctggctgcgcgctgtgtttcaccgcatgaacccccgaatctcaactattctttttgttatcagcactccttgcctctcccctccgctattttttggctgaagacgaaactggagtttgcgccttgaaattgactatatgtgagtttcacggcctgggacaccgcaaggactcggcgacggcgagccccacggtcgctcctccgctgtggctgagccctgcttggactcattccttcggggcccttgtttctccctccggcctttgtctaccacccccgagtcggtcaccctgccacgcccatt

SEQ ID NO: 95178 - DNA, 18763 bp, Homo sapiens
agacaaaattgcaaaggagagagacagctgaccaggactggggacattcccaagagagggcatccaaaggcaaggctgagaggacttgtgaggtttcagtgctggtgagatgtctatgtggacgcccaggttcctaaaaacagtggcacttgttgcaggaagacttaaggagcaggtgctttctcagagaccgacggagaagtgatctgtaacaggcaggcatcacagagctaaaggggaggggggcgagggtgaagggcctgccgccccaaggagcttggggtcaaggaaggggtggcagggccttggactccgtgtgaaaacgctgtgggaggtgggaaagaggcctctgtcctggcctgcaaaaccccaactgcacaggctgttttagcagcaccctcaagccacctgcctaacgctgctctcccacagagaacccatggcgctgtgactgcgccctgcactggctgggkgcctggatcaaggagggcggccagcggctgctcacctccagggacaggaagatcatgtgtgcagagcccccgcgcctggcgctccagagtctcctggacgtatcccacagcagcctcatctgcattccgccctctgtccacgtgcagccgctggagctcacagccaacctgggtgaggacctgcgggttgcctgccaagcctccggctacccgcagccattggtgacctggagaaaggtgccccagcctcgcgagggccggccgcgagcccaggcccagctagaaggcgggttgctgggcctgggcggacactcggcatccgacacgggcagcggcatgctcttcctcagcaacatcacgctggcgcacgccggtaagtacgagtgcgaggcctccaacgccggcggcgctgcccgcgtgcccttccggctcctggtcaacgcgtcccggcagcagccgcagcagcccgcgcaaccgccgcctccggccgcccgccccgccggcagcgagccccggcccgaggcgggcagcatggccttccgcgccctgggcgtggccacacagacggccattgcggcggccatcgcgctgctggcgctcacggcgctgctcctggtcgccatgatctgtcgccggcgccgcaggcgaaaaaaggcgcgggggcctccgggggagggagcgctgttcgtcaacgactacttggacggcccctgtacgttcgcacagctagaggagctccgcgacgagcgcggccacgagatgttcgtcatcaaccgctccaagccgctcttcgccgagggtccggcggaggcgcccgctgactgcggcccggaacagggggcggggccgggactccgcgtgcccccgccggtcgcctacgagatccactgctagggccgcgggcgcgcggatgacgtgggcgccggagattggccggtgcggcctcgcgcatgctccgtcagtaaaggtggaagccgcgcagtgtgcgctgagccgtgtgtggggcgcgagccgggaacgttgcactcgggaatcctggggtagcaatggaaggtggccggggaggccccaacacctcccttgaagctcttccgaaaagacatcaccccaacctccagctctgcgtggggggggtccctcgctggccctggccggccacagtaggatcttgggcctccgaaaggtgggaagagcaaggactggccggcagtgccgacggggctgccccgcgaagggcggggcgacaggctggatggcagttgttgccsggtggccatgttgggggtgacagcagagataaggataagggtgaccaacgtggacagaaaaaaaaacagccacaaattcaacttccaggcacatgtgtaccttgatgaccccctccagcccgagcccagcccagtggggtggctgggtggcagggtagggaacacgtaagaggcgtgagtgcctggggactcccagcttccctgaagcaggcctctgtccaacttcaaccccagaagcactgagctctcagtaaagggagaggaaaggcccagagaggccatcatctctctcagctcacaactggaatcccaaagcatttgcacaaaggaccaggaccccagacggcagccaaatgcagccaaactgagcagggcaatggaggcctgacatccagccccggggcccacagatgatcagccaattatggagcaagtgcagggaaaaccgcgtggggcactgcagaaagcaggggaggcttgaggtgtgcccagaagcaaggtagacccagcaggaaaccagtaaccagtgcttttgtgaaggcctccaccaggggtcccagcaaaggccctgcctacctaaagagactgcagggcggcctgtgtctcacccagagctacttcatcataggctgaagtagtccgcagccagtcgcccgtagatgtccgtggtccagagcacatgggcacggcctgaggctagaagcagctggtgcaactcagcttctacgcgggcaaacttctcctcattgatggaggcctccagcaggacagaggcaggcggcggccagggcaagycctcatagcagtccacagggaaggggtgcaccacagtacgcagctcagcctgtgccactgagtcccgcagcagctccttgaggcccgccatggacagtgggttgccatagaggccaaggtaccggagactggcgcactgagtcaggatgggtagtgtggccaacagctgggtgtctgcgagctgacactcagtcagctccagatgcaacagtgtggctgctgatgcctgcaacagaccctggaagggtgccagctggctgccagacaggtcgttaccactcaggtccaacttcttgaggtgggcagcatgtgggctccgtgccaggaagcgtaggtcctcaggcagcagagcacagaaggccaactccaggctctccagggggctctgcagggtgctacaggggacacaggggtcacagacaggcagagccagggagggtccctacagaagggaggggcagggcagtggtggggcccgctcacctgagcagctggtccagcctccctgaaaggagagaggagcccatgctgagctcacgcagacaggtgaagcggcccatctgggcaaggaagtagcggaagttgtcctcgccatccacggagggctgccttgaatccccatgcacatagtggagccgcaggctggccaggtgctggaagcgggccacgtgtgggatgatcacagacaggccgcgcaggcccagattgttgaagcgcaggtccacgcggcgcaggcagcctgcatccagaagctgcagcagggccacagtgttgcgcatgggcaggtcctcagctcgcaggtcccggcagcagagccgcagcgggctgcccacgctgcttcggagtgcctcccgcaggaacgcataggaggcccggttcacccgcaggtccacgcgcacctccacggggatgggggctggcccaggctctgcggccccaccctgctgctgggcaatgcatgtgcgagctacggcagcagtacagtcccacatgctcatggtgccaggatcctgttccacaccatcatccaagaggcccgtcatgtccagcacccgcagcgcatgcttcctgggagtaggaatggtgtgaggaaggggtggaggggcagcgcccataccccctcccagccaccttgggacaggagcaacgcgcctgctcctgcatgagctcttgctaactttatgacccaagcctcctcaggggacccacttacacacccctggcctgacgaccctccagataagtccatacctgcagaggggctgtgtgctggccccaggctctgaggtgtggagccgggcagtcagccccaggataacagcctgcatgctctcagtgctaggccgctcctgcaggagggcacggctgcagtgggcacactcctgtagcagctgctggaaactgagcagcgggaagggccacgtgtgtaccaactcgcgcagtaccactgtcttcttgtccatgaaggccaccttgaacagcagggggaagagttcgcgtggcagcargggcagggcctggcaggcagctggctggcactgcagcacctgccgtgtgctcaagaacacaagcgtgtgcatggtgctgggccgggcagacggccacctgcaggagagggacttcagcagggaggagagaccctaggccactaccaagccacacacaagtggtaggaaggcccagcatagtgcctgaaacaaagtcagcagttagcagtggccatggcacagagaagcacctattagatgcctagcgctgggctgggtgcagtgaactggcagacaaactcacaactcagccccagccctccagatgcacaggatctctttagagaaactaagcgtcaagcagtgtggcatcgtcaacaactcgcttgcttgggtatgcttttgacagatgcctgttgccttgcagggccccccatgggtacttcaggcctctcaaattacaaagctgcttcacaaaaccttcttcgaaacctgaataaagcccaggactctccccaccaaccttcatcagcattagtattgacgggacactctaaggagtcaagcagccaaatcacctttccttcccctctcctcacagatgctctccagggctacacttggactccacaaaacaccaaagagctggaagcacagaagcagcttcataagcaacaaggcaggttgaaaagaccgagacccagggaacaccgagtccagatgatgtagcctataaaatacaagcccccgcaaaagctactattctccagagcatcaccaagcacggagaccccgaaagaaagcaaccctcacctttgttggcccttaccactggcctaaacctctccctcttccctggagagccactgtggaaagaccaagtcttaagtatgtgggattcagaaggtgcaaagctacagactgctcagacaaggcaaagaaagctgcctcagcagcacccaagctgcagagatgcacaaacactcccaaggccacaaggtacctgtgacacagggtgccagccctgctgctgcctgtagcatcctcaaaactaaatcgcagccatctccctgtgacagattagaaaatgaaggcctcggcctggcccaaggtcacagcctgagtgacaagccagggaagggggccggggaagacactctggccccaaggcccttctttttgtcgacttttccacatacaagtaagtccttaaggcaccggttcctgaaaagtcccagacaccaaccctcggcctagttctgccggtggacagatctcaacgatcatactcgctctgacaggacagaccaaccgagcacttgtcacgggagaacaccaaagcagacggcctgcccaccaagggaggcaggcacctccgtgcgacgccccctcccctcccgccggccgcagggaacgcgacggtcctcggtcgcctgcgtttcgcgaagacgcccccgcccggctcctccgggcctcgagccgcgggaggcgctggaccctccgctctttcgcctcccgagcggggcctgctcctccaggtcggatgcgtctcccaccagggcctgacgccgctccgaccggcccggggactcccagtccttcccggcccgcggtggcacctcccaggctcccggcctcggccccgggctcccaaatgcagccactgcctccctcggccaggccgccccgagcgaccggtgccccgccccttgaggccaggcagggccaggggcgtgcgccgccccgctcagacacccccccggccgcccgcgctcaccggtcccgcaaccgcagccaccgcctccagccccgcctagaccgtccgccgctccccgcccggcgccgcggcgccccgcgatgacgttgacgcctcccattggctgcttgtccgaggcccgacggactggctgcccaggggcggtggccccgcccccggcccgccgcgcatccgcattggctgtcggcccccgcgacggctgcgcgggagattcgctggacgatcgcaagcgcggaggccgggcgggcgcgcgcgccatggagcggctgcgggacgtgcgggagcggctgcaggcgtgggagcgcgcgttccgacggcagcgcgggcggcgaccgagccaggtgcgggctgcccaggggccgaggggctgagggcgcggcccgcggctgacgcgttccctttacaggacgacgtggaggcggcgccggaggagacccgcggtgagcgcgcggcggggcggcgggggcgagaagacaccgggtcggcaggggcccaggccccaccctgaccccgcctcccgctcgcccacgcagcgctctaccgggartaccgcactctgaagcgtaccacgggccaggccggcggcgggctccgcagctccgagtcgctccccgcggcggccgaagaggtacccaggccccgccgccccagcctcctcccacttccctgtttggcggagtggcgggagccacggagtcgcggccaggcckccgtggggcacagaacttgggaggggsactgggcaaagtgaagaagggccgggcctcgctccaggtgcgggaggggtggctgggagcgcttctgccgccacaacagccttttctggcctgtgcccctgttgtctcctgcaggcgccagagccccgctgctgggggccccatctgaatcgggctgcgaccaagagtccacagyctacgccagggcggagccgccagggytcggtgccggactacgggcagcggctcaaggccaatctgaaaggcaccctgcaggtgaggagtgggcaggcagtgagtccacgctaggtccacagctgcttccggtccgggtcgccctcttgtcattttttccacacagacaggcacgggcccctgtgccaaccagggcacgagtcttcagggagcttctcggggccttcgcccttgactccctttctagtccagccttgtgctaattagcctgctctacaattgagcgtggggactcaggtaggttttagagtctacagtagctcaggggcctgagttcctcctgctgttctgttgttcccctcccaggccggaccagccctgggccgcagaccgtggcctctaggaagagcctcatctaaggcatccaccccaaagcccccaggtacagggcctgtcccctcctttgcagaaaaagtcagtgatgagcctccacagctccctgagccccagccaaggccaggccggctccagcatctgcaggcatccctgagccagcggctgggctccctagatcctggctggttacagcgatgtcacagtgaggtcccagattttctgggggcccccaaagcctgcaggcctgatctaggctcagaggaatcacaacttctgatccctggtgagtcggctgtccttggtcctggtgctggctcccagggcccagaggcttcagccttccaagaagtcagyatccgtgtggggagcccccagcccagcagcagtggaggcgagaagcggagatggaacgaggasccctgggagagccccgcacaggtccagcaggagagcagccaagctggacccccatcggagggggctggggctgtagcagttgaggaagaccctccaggggaacctgtacaggcacagccacctcagccctgcagcagcccatcgaaccccaggtaccacggactcagcccctccagtcaagctagggctgggaaggctgagggcacagcccccctgcacatcttccctcggctggcccgccatgacaggggcaattacgtacggctcaacatgaagcagaaacactacgtgcggggccgggcactccgtagcaggctcctccgcaagcaggtaagacagcgacgggccaggacaggcattccctttccctcccctcagccctcccgtatttcccgcccagtgaccctcctatgtgggcaccccccaggcatggaagcagaagtggcggaagaaaggggagtgttttgggggtggtggtgccacagtcacaaccaaggagtcttgtttcctgaacgagcagttcgatcactgggcagcccagtgtccccggccaggtgagacatctgccctgrarggtgggtccggccaacactgtggagagggcgcagtgctcttttgggggacacttatgttccaagcaacaggccttccaggtacycctggtccaggccctaccctagctcccctgaaggagggtggcagggacgacgatggctgtcactcttttctgctttggaaaaagtagcccagaggaagggcactgcctgctgccaaccccctttgggggaaggagaggttgtggccagtggttgtcttgcccgacctggagctcccattctaccctctcctgcctgccccagcaagtgaggaagacacagatgctgttgggcctgagccactggttccttcaccacaacctgtacctgaggtgcccagcctggaccccaccgtgctgccactctactccctggggccctcagggcagttggcaggtgagcagtcagcttctggcccagagccttcactgaggggttggggtgactcaagtcatggtgatcaacatctgtgtctgcaragacgccggctgaggtgttccaggccctggagcagctggggcaccaagcctttcgccctgggcaggagcgtgcagtcatgcggatcctgtctggtgagcgtggctgccagggctgasgctgggctgaggccaggctgcagaaccctgctgctgactcccgccccatccaggcatctccacgctgctggtgctgcctacaggtgccggcaagtccctgtgctaccagctcccagcgctgctctacagccggcrcagcccctgcctcacgttggtcgtctctcccctgctgtcactcatggatgaccaggtgtgcacacagggccctgggcacacgtacacagccaagaaccagcacttgtgactcccaagggcaactgctgcttgtcccctaaccaccccctcccctgggagcttcaaggtgtctgtggcctcagtcccagtcttggcagcaggtcaaaggcagcccagctccacaggcaccacagccacccctacgggaaatgtgctgggaaaggagccatccctacttcagtctgtctgctctggggctcctgggccaaggcccacaggtggctctaaacccttagccctaggacccaggacctggttctcctctcccctgagggactaggatggacatggcagcagctctgggatgacttggggaagggccagggctgggctggcgtatgacggctgtcgytcctgcatttgcaggtgtctggcctgccaccgtgtctcaaggcggcctgcatacactcgggcatgaccaggaagcaacgggaatctgtcctgcagaaggtgggggcytcatgggcctaggggtgagggaggcagcgggcgggcacctgggctgtgcctctgatcttgctgccttcagattcgggcagcccaggtacacgtgctgatgctgacacctgaggcactggtgggggcgggaggcctccytccagccgcacagctgcctccagttgcttttgcctgcattgatgaggcccactgcctctcccagtggtcccacaacttccggccctgctacctgcgcgtctgcaaggtgagccatatgtgaactggggtgggcggccagggccgggatgggctgggcggcctcacaccactgccgcctctggtgcaggtgcttcgggagcgcatgggcgtgcactgcttcctgggcctcacagccacagccacacgccgcactgccagtgacgtggcacagcacctggctgtggctgaagagcctgacctccacgggccagccccagttcccaccaacctgcacctttccgtgtccatggacagggacacagaccaggtgggtgtgtgtgctctggggaccctgcagggccctggctgctgactgcccacgccgacccctcctcactccccaccgcccacgccgacccctcctcwctccccaccgcccacgccgacccctcctctctccccaccgcccacgccgacccctcctcactccccaccgcccacgccgacccctcctcactccccaccgcccacgccgacccctcctcactccccaccgcccacgccgacccctcctcactccccaccgcccacgccgacccctcctcactccccactgcccacgccgacccctcctcactccccactgcccacgccgacccctcctcactccccacgccgacccctcctcactccccactgcacacgccgacccctcctcactccccactgcccacgccaaccgctcctcatcaggcactgttgacgctgctgcaaggcaaacgttttcaaaacctcgattccattatcatttactgcaaccggcgcgaggacacagagcggatcgctgcgctcctccgaacctgcctgcacgcagcctgggtcccagggtctggaggtgcggcatggacagagctggtgtccccgtggacccaccttgggcacacatggtcccatcccactgaccatctgcctgtcttccccaaaggtcgtgcccccaaaaccacagccgaggcctaccacgcgggcatgtgcagccgggaacggcggcgggtayagcgagccttcatgcagggccagttgcgggtggtggtggccacggtggcctttgggatggggctggaccggccagatgtgcgggctgtgctgcatctggggctgcccccaagcttcgagagctacgtgcaggccgtgggccgggccgggcgtgacgggcagcctgcccactgccacctcttcctgcagccccaggttggcaccccccccccacactgccagtgctcgagcccccagtggtccaccccaccctcatgaaagttgccctgcagggcgaagacctgcgagagctgcgcagacatgtgcacgccgacagcacggacttcctggctgtgaagaggctggtacagcgcgtgttcccagcctgcacctgcacctgcaccaggccgccctcggagcaggaaggggccgtgggtggggagaggcctgtgcccaagtacccccctcaagaggctgagcagcttagccaccaagcagccccaggacccagaagggtctgcatgggccatgagcgggcactcccaatacagcttaccgtacaggctttggacatgccggaggagggtgaggaacctggggtaagccacaggggtgtggaggggctgtccccgygtccgctgagccctgctctgcccccagccatcgagactttgctgtgctacctggagctgcacccacaccactggctggagctgctggcgaccacctatacccattgccgtctgaactgccctgggggccctgcccagctccaggccctggcccacaggtaagcacgccctgcccagttggagacgaggttggagaatcagggctgttggccacatgtccctttttccctgggcacaggtgtccccctttggctgtgtgcttggcccagcagctgcctgaggacccagggcaaggcagcagctccgtggagtttgacatggtcaagctggtggactccatgggctgggagctggcctctgtgcggcrggctctctgccagctgcagtgggaccacgagcccaggacaggtgcgcctctccccaccccacaccgccctggacgctgcctgcctgcatctgacatgctttccggcaggtgtgcggcgtgggacaggggtgcttgtggagttcagtgagctggccttccaccttcgcagcccgggggacytgaccgctgaggagaaggaccagatatgtgacttcctctatggccgtgtgcaggcccgggagcgccaggccctggcccgtctgcgcagaaccttccaggcctttcacaggttgggaggaggygggcggggcctgggaccatccaccctcccgcagtgatcagctctgacaggctcctccccacagcgtagccttccccagctgcgggccctgcctggagcagcaggatgaggagcgcagcaccaggctcaaggacctgctcggccgctactttgaggaagaggaagggcaggagccgggaggcatggaggacgcacagggccccgagccagggcaggccagagtgagtgyagtaaggccaggcagctcatcggggttgcaggttccctgggctgcatggggcttgctctgtggatgcagtgccacgggagctcagaggaagcctgatgtgcctgtccacacagctccaggattgggaggaccaggtccgctgcgacatccgccagttcctgtccctgaggccagaggagaagttctccagcagggctgtggcccgcatcttccacggcatcggtgaggcctgggaggccccacccrctgcaggctggggctgggggctggggcaggtgaggcctgggaggctccacccgctgcaggctggggctggggctcacggctgtgtcttggctccaccgtaggaagcccctgctacccggcccaggtgtacgggcaggaccgacgcttctggagaaaatacctgcacctgagcttccatgccctggtgggcctggccacggaagagctcctgcaggtggcccgytgactgcactgcattgggggatgtcgggtagagctggggttgtcagaggctagggcagtgactgaggacctgggcaaaacctgccacagggtgtgggaacgaggaggctccaaaatgcagaataaaaaatgctcactttgtttttatgggccctcttggccaatgaggcaacccccacaagctggggacaagcacatcacatattccaggcacagagacatctgggccacaggcacatgtggctttattgaccactccagccactcagctcagagaaaggtgctgggtgctaggtccaggtacagaacgggaaaggcagagaggatgagcaggagcaagaagcagggatgtggccccaacccatcagccaggcctccggccagagtgcccagcagcagcttccccagcagctccagcgtggccagaaggctgtagtgtgtggcctgaggggggtgggggtcacggtcaaggtcaggcccacacagccccagccccgtggtctctcttgtgtccctgctacatctactcacctgcagggccctgggggccagctggctgcagcgcatcatcccagtgaaggtgactgtggtgaccaggcctcccaagaagtgctgcagacataggctcagcaaggctgaccctgggagggcagaagtcagcagtgccccaggctcctggcccctctcttcctcctcaaggccagcccctcacctctcaagattgtgccagcgtccatgctggcccccagggtgtccaggtggaagaccaaggcagtctgacaggctaggcccccgaggcggaagcgcagcaccgacctcaacagaggcagcagtttcctgggatgggggtgggaaatgggtcagtatagtggattgggggcagctcaggtacaagtgggtgggcagggtacactggggagggctcaccagtgcttggccagcaaggtcccacccagggaggagccagcgatggagcagaccacagcacccacaccattccacagtcccaactcgggagcagaaacgccgtggtccagcaggagaagaggaaacaggctgctggcaccctgctcaccttgggtggtggggggggcatgagcacgggaggttccatatctgcccccacctcccttctccccacctgggccctcagtcctgccctgctctcctcagtgttccagagctgcagatactgggggagaagtggggcagcccgagagagcgctcagggatggggctagagctgggggcggacaagacacaaggcccagctgcagagccccggatgtcagggccaagtcttgcaggtcataccccagaaagagcgtggccctgtaatgggttgcaagcccctggggacacacctggagctgtcccggaagccccaactgctgttgcctggctcgaggcctcactcacccagcttgtaggtgagcacaaagcctgccgtccacacggtccccggcacggctagcacgtcccgcagaaggtgcgcggtgtggggacgctgctcggaagggggctgctgtgggagccgccgcagggctggtgcagcccaggccagggccgcggccagccagtaggtggcagccaggagcagaaagagttgcggccacgagaaggtgggcagcagcgccagcagcgcgcccccagctagcgcggcccccagcttgtacgcgaccacctgcacggtattgcccggccccagttcggccggctccagcagctgcacagccagcgcgtccagggccacatcctgcatggcggcacccaggttcaacaacagcagcaaccccgccacagcggcgggcagcccggcctggccagctccaggagggggcagcccggcaagcagcccacacaccaggcccaggcccgccgtgctgcgcgtcacccaggccctcgccgagccctgcgcgtccaccagcggggcccaagccagcttgagcagccacggagcgtacagaaccttggccagccccacgcgcgtcagcgagaggccgccggcacgcagcagcactggcaggaggccggactggagcccgtagggcaggccctgcaccaggtagaggccggccagcggcagcaacttcccgcgcatggcggctcaggccggctgcgaggctgggaggtcgggttccaggtggggtcccgcaaggcgaggtcccctccgcgtggggtcagaggccacaccccggcatggctttggttctgggaccgggcagagtcagcgtcgtacaggctagggtctggacacgtgctctcgggctttaggagcatcaacaccccagaagaaccgaagtcgggtccaaacgggggcgagcggtccggacaccggcggccggcggctcccggcatgctctgcgcggccgcagggaagggggcggggccactgcctcccggggctcccaccatgctctgcgataccgcaggtgaggggagcggggccactgcctcccgcggctcccagcatgctctgcgaggccgcaggtaaagagggcggggccgctgcctcccggggccctcggcccgcgcccagcactgccggccgggccggactctcagcagtttctcggccccctggagccacagagcggagcacggaccacacggcgtcgctggagccccgcggccaccggctccagggccggaaggtcgcgcgggccacagagaccgcaacgggccagagcgtcagctcgcgggcgcccccggtggccagtccgggctcgggcccgcggccccccgccccgccacgtgcgcgctcccaccgaggtcctgcgcgggtgagaggcccagagggggaagctacagagctgggccggcctcgaatgtaaggatcggcctgcgcccacggccagccctggcccctctcagtagtttcggatccgctccaggcgtgcttccttcctggtgtcagccgaagcgtggttgctgcagtgcccagcccccgcttctccagccgcccgcatgaaggcgtccgtttcttaagggttccgccgtctaccactggatacttccggtgccggaccccaaccttgctgtgtctgtggcttcagctcctccgtaaggcggtgacagagccatggaagttaggagggaagtgtgaaaggtcaggacccagcttagctcagaaggacaccgccagccactgcccgtgacgcccttcggtgtccggtgacaaggctaggagcaccctgcctgattcgagcccgccctgccaagggaggggcccacctgctgtgtctcctgcccagagctgtgccctctggggctcccgagggccagatgaggctgtgaagtgtgtgtggcctgtggttaagaaccatctccagagcgaaaaaaaccaggtgcccttggccagtcctatctcccaagtttgtgagtctctaaagccagccctgtccttggcggacttgagggcactggacccaacgcatttttctggctgccgaggcctctgagggggtttcttgtcagctcagcaggtttttgggttgcaggtttccacgtctatcaaatggggactatcatgcctacttcagaagagcatctgtgcagattgagtgaccccccagcagtgtctgcatgtagtaggtgctcagccatgctccccaggccaggacacagcgctgcccactcccgctcagcccagcccctgcctcctccagccccagccctcccctgggacgctcccttatcctctccctctgcctcccactccacccagccgaaggactgcaccacacaatgacaccaaaggtggtctctggccccccagacagtggccccacccctgcttccttgggtaagagaaccaagacttccttcctgagctgtcagtcaccctgaccagccagcaccatgctggtttagtatttccccctgccccagggaagacatggacctcacaggaaagggagccaggaaggaggcagttcactgtgccttcctcaggaaaggctgtgtttcttcgggtggccacctgggcccctggctccctagattcttgggggcttccacaaaggggtgtggggcctgcgctttcctcacactctggaccctctcaacccatttctgtgtgatctgacgggctctgccccacaaccagaggccagagggaagacccagcctatggtgggcacggggtcttcaggaggaagaggtgggtggtggccgtggaaggtcccttctctgaagggactcaggcctgcaagaagggtaggcaggtgggagcgggccacgcagctgccaacgcttcctccctggagtcagactgccacacagctttattagggacctgcagagaggcaggggcccagcaccccccccaccccaccccgccaggcatcaagagcaagtacagtgggctccagagcctcccagggctcctgagcacacagtccagggcgacccagcctggccccagctggggtgctcaggagtactcgagggtgaacttggcatggaacctgctcagcttctccagcagcagccgcagtttctccaaggggggcagaatggtcatcctgaaaggagttgacagtgagtgaagggccagggtggcgggacagggagtgagggccaggcctcaccggaagtggtaggtgccttcccgctgcccaaagccgctccctggcaccacgcagatgccggtctcctccaggaggcgcaggcagaagaacatatcgggggccaggcccagctcctgtggacggagagccgtcagagagggatgcccggccccccctgcccaccccgcaggccccgcccccgcctgacctgagcgcgctccaccgcccgcgggggcagctgcacgcgcgggaaggagtacatggcgccctgcactgggttgcagctgatgccaggagcctcattgaagacctgctcggtgagcttggccttggccgccagctctgccagcactgcctgcttctcctgtggccgcggagggagggcccatcagggcacggcactcggcatcccccacccctgattaggtcacctggaccccctcctgcccccaactcacagcctggaactgcgcaaaggaggggtcggtgggcgcgggcgggctgaccaccaggtccagcagggcctgtcctggcaccggcgggcacagccgcacactcatcagcttcagcatctgctgctgcactgcagcgtccatgttcaccacctccacatagccgccgcggaacccgcacctgcgcacggccaggtcaggtgcggaggagggggtggcccatcgggcgaggagggcctggccatggcccgcgagcccccacccgcctcgtacgcacgcactcgcccatgtagcccttggaggtggagtggaaggaggcaagctcctgctgcccggcgtagggcggccccatctccatgagcaccttcttgaatgagtggaactgcgaacccgcggcgtacacgttgtcctggtacacctggaagggcgcaaggcgtcacgggggcggactgttgcccggcttcccgctcccccgcgccgcgcacctcgtccgccagcagaaagagccgctcttcgaaggcgaagcggatcacggcctcgatgcactcgcgggtctgcacctgccctggggtgccggggaggcagcagtgctgggtgagccaagggggcgcactgccctccgctgggcagccggggtccagcggacccggcactgcctgggccagggcgcacgtgggtgcgggaggagtggggcggggcggcggggaacgcaccgtgggcgcggagggagtggggcggggcggcggggaacgcaccgtgggcgcggggggagtggggcggggcggcggggaacgcaccgtgggcgcggggggagtggggcggggcggcggggaacgcaccgtgggcgcggggggagtggggcggggcggcggggaacgcaacgtgggcgcggggggagtggggcggggcggcggggaacgcaccggtggggttgccagggttgatgacacagagcgcacgagggcggcagtggtcacgcgcctggcccagtgcacggtgaagctcggccacgtccagcgcccaggcacgctcctcgtccaggtagtaatccacctgcactgcgcccagctctgccagcgtggccgagtagagtgggtactgggggatggggatgagcacacccgt

SEQ ID NO: 95179 - DNA, 16197 bp, Homo sapiens
  misc_feature (1)...(16197): n = A,T,C or G
cctcccacactgccctccctgccccggcccatgccccccagggctgcctgggcctggttattgtgtggggcctcctgacccagccaagggcacgaagctctgggaaggggatgcccccgagggtgccagtccagctagctgccccacccctcaggcccagcctggcccccaagctccccactctggtgccccgagcagccctgtgggcaagcagccgccgccatggccgagcacctggagctgctggcagagatgcccatggtgggmaggatgagcacacaggagcggctgaagcatgcccagaagcggcgcgcccagcaggtgaagatgtgggcccaggctgagaaggaggcccagggcaagaagggtcctggggagcgtccccggaaggaggcagccagccaagggctcctgaagcaggtcctcttccctcccagtgttgtccttctggaggccgctgcccgaaatgacctggaagaaggtgagtgtggctgagcccagagcagctcccagcagacggcccactccctgctacctgggtgccgtctcatgccaaggctgggggctgggcctgtccacagctcctgggctccagcccccagatcttgcctggtctcttcaggctgggtggcccagggtgcccccatcaggcaagccccaagcagtgggcagccctgaggtgagcctgtgcgggacagccgtccttcaggcgggggctgcatgcagagggctcctgctgtgaggtgagctgaggccatgagtggacccccaggagcctgcagaaaaacctagtgcggggccccacgggagcaggggtggccggtagtcattgctgcttcttgttaggctgctcaggagagccctggtctccacctccgtgaaatagggtgggaccagccacctctgtgggtgagagagccaggccctgggcaggcacagagctatgcaggtggccccctctcagtgcctgccctaggctctgcttgtgactctcttctcctcacctgtgccccacgcttgcagccccagctgtgtgggttccacttctggtgctctggagtctggggggaagaggcactgtggtggcccttgagactccttcctgcctccctccggagcagagagtaaagaggagccggcagtgtctggcctgcatctttccatgtggacaggagccctcccgggaggcctggaggcagagggaagaggcggagggtgccatggtccacagggagctgtgggaaggtgggagccctcctgctgcaccccaggcaccgtcagggagaaccctggtgacctgggcgagagctgggcccgagttgggatctttgatggggaggggagtgagagcagggatgtgctctggtggtggggagcctcaggtcaggtcccagaggacccaggagagctcatgaacacagggctggcaggttgtcagggaagagccgaaggagctgtggtagcctccaggcagggagctcttcctgggctggagggaggtgtgggattgttggagtgctgctctcacacaggagcacggcctgttctgggggtcggagggctggagcaccaccatgaagggcctgcaggtgggtggaggcagagggcttctgggagtgtgaccggcctgggccagacagatgcctggtgcttctgcccccacccctgggctctggtgtgcctcctgccatcggcaccactgtcttccttgtccttccctgggtcctgggccgaagcacagttgacaggacctgaccaggggcaggaccctgtcctcacctcgccacctttttgcagtccgccagttccttgggagtggggtcagccctgacttggccaacgaggacggcctgacggccctgcaccaggtcagcctgcactgggtgtgggcagggtgggggctggcccccgtgctctggycgctcacgtggcacggtttgcagtgctgcattgatgatttccgagagatggtgcagcagctcctggaggctggggccaacatcaatgcctgtgacagtgagtgctggacgcctctgcatgctgcggccacctgcggccacctgcacctggtggagctgctcatcgccaggtagggcctgttgggcgtccttggcagggagaggcttcctctcagatggccgctcaggaggctcctcttgggcagtatctgtggctctcggcctcctgtgttcccgccttcacctttgctgaccctgcctgtgtcctggcatggagagcagggcctggggctccaggggaatgggcatgtgcccagggcagcgcggtccctgcctccccagcattcgtcctcctgccgagagggcaggcctcgggcccccccccagagtgtgcacagagaaatgtcttggtcagtgaggagggcagaactgctaaggagggaagcagagtgaggaggccaggtggcttgggaggagagggtacctgagcacaggtagggcctttacctttaacacagagggacgtagagcggggggaactctgagcagggagggtccatgagcctcctcccttcccctttgctccaggcatctgtagtgggagagaggtcagggctgcggtcattctcgagtgcccctgtgaggccgggtggggtgtggatggcggtcgcgtcacacacaggcgctgcggggcaggcggggatgtggggtgtccacaggtaggcctgctcctccactgcacacagacacccccttctgtgttctgggctccccttcaccgcccttcttccctggggccatgctccccacagctcagcagcccctcagcgtggctgcctggtcctgcacccccgccaccctgtgctccctgctccccagcaggcaggcccatccaatgcatgtttatgggggcaccgctgcccctggaggtgccaggaacctggatccctggatggatagagactgcaggaggcctgtctggcttaatgacaggatctaggacagccgatgggccccaaggctgcctctcccagcagcaggtggacagggtgcctcctgaggggcagccctgggctgaggggccctggcggggacttctccaagtgaggagcctggcaagcggggaagggccttgtgcccagcaccccgtccgtcttccctgcagtggcgccaatctcctggcggtcaacaccgacgggaacatgccctatgacctgtgtgatgatgagcagacgctggactgcctggagactgccatggccgaccgtggtaggtgcggcggtgcggctgtgggagggctgccggtcgcgctccctctgagcctgccgcctcgcaggcatcacccaggacagcatcgaggccgcccgggccgtgccagaactgcgcatgctggacgacatccggagccggctgcaggccggggcagacctccatgcccccctggaccacggggccacgctggtgagggctggggggtgaggggcacacggggctgggggcctcgctacttggaggtgggggatggggccgaattcaggccgggcgcttgcctgcagctgcacgtcgcagccgccaacgggttcagcgaggcggctgccctgctgctggaacaccgagccagcctgagcgctaaggaccaagacggytgggagccgctgcacgccgcggcctactggggccaggtgagtgcgggcgggagcaggtgggagggggcttccagcgcagcagtctgcagctccggcctgccgtccacaggtgcccctggtggagctgctcgtggcgcacggggccgacctgaacgcaaagtccctgatggacgagacgccccttggtgagcttgcggggcccacctccacctgggggagaggacaggcggggagggcgcccctgacgcctgcgcccacttctcagatgtgtgcggggacgaggaggtgcgggccaagctgctggagctgaagcacaagcacgacgccctcctgcgcgcccagagccgccagcgctccttgctgcgccgccgcacctccagcgccggcagccgcgggtgagcgccgcccccagcaggccccgccccgggcttggccccgcggacgtcagccccgggcggagtgccagccgaactgggggcagagtccgagggggtgggcggggtcctccgggcactccccttcccctcactccctctcctctctcctccccaggaaggtggtgaggcgggtgagcctaacccagcgcaccgacctgtaccgcaagcagcacgcccaggaggccatcgtgtggcaacagccgccgcccaccagcccggagccgcccgaggacaacgatgaccgccagacaggcgcagagctcaggccgccgcccccggaggtgagcgccccgtccctgctccgcccagcgcaggggtgggcctggctctgccctggttctctctccgcttggaccccctcctgcctgtgtcaggaatggtgccctgcaggggccagcttttgccccatctctcctgtctgtcccttcatgaccatacagcctgaacccaaggccagggaggggggaggagcctcctgatggctctgggaccttcactgcccgcaggaggacaaccccgaagtggtcaggccgcacaatggccgagtagggggctccccagtgcggcatctatactccaagcgactagaccggagtgtctcctaccagctgagccccctggacagcaccaccccccacaccctggtccacgacaaggcccaccacaccctggctgacctgaagcgccagcgagctgctgccaagctgcagcgacccccacctgaggggcccgagagccctgagacagctgagcctggcctgcctggtgacacggtgaccccccagcctgactgtggcttcagggcaggcggggacccacccctgctcaagctcacagccccggyggtggaggctcccgtggagaggaggccgtgctgcctgctcatgtgaggctgttgctcagcatgcaggggccctgtckcgggcacagcccaaggctgcctccccacggtgcgtgccctggtgctgcgggtgcagcacggaaaccccggcttctactgtacaggacactggcccctctcaggtcagaagacatgcctggagggatgtctggctgcaaagactatttttatcctgcaactcttgataaagggctgttttgccatggagcctcgttgtgtgttgtgtgtctcagctgggtcgctgtcccacagtggggagtgggttgtgctgtttggctggggtgccacccgtgcctgtgagcatgaaagcctgtaggtgcgcgctggggcatgtggcagccctggctgtgtgggagtgaggctcacagccactgggctggaagcctgggcctcacccactccctcccgtgctcagcctcctggagcctcctccgtaaccctttgctctcctgagaggagccaggtgctttgaaggagcctccatgggggccagggcctagggtgtctgtgctgaggggcggaaggtgggggtcccagggaccatggcttggaaagggaggtggtgttttccacaagactcttgtgtcagagccagaggggcaaaacaagcacaaggctgtgtcagaagctccctgggggggttgtgggtccccagttcctggcacgcagccttaatcctggggcctggctgccagcttccgcctgggctggcataggggacacgcagttggccactctggctctgagctggcttggcacaatgtgtcagggtgagggggccccttaggggcctcaagcaggagggctgagggcaccgctggttcgtctgttcatggtgggcggctttgtgtggccaccagtgctgggtggtgtgggtttgggctgttctccctcctggctcagcacgggcccgtcagcccagtgtcctttgggcctgcccttcccctagcatccctggttggaagggtgtcctcacagggctgtgggcgggccagggctggctgctggttaaatttagtgtggggggtggggcagctgcccaaggtccacctgccaccagggctgccacttggactcccttgccagggggcgggcaggggctggctctgcctggggccaggcccatgttaacctgtgccccggcctgggggccagaggggcaggcctgcgcacggggaggctgttgtggcagcggaacagagacgtgcacggtgagaggcctgggggccggctgtccagggctcccgatggcttttctcccagccagcaggatcagaggagccaaggtccgacttgggcctggctggttgcccacagccctgctcagagggccggctccctgacccccatggttcaggtttcggtgcccgacgctggggtgggccagcgtggagcctggcctttcagctcagcaggcctgtggaggtggggctctgatggcctatcccagctcgtttcctactctctcctccaatcgggaacaagagggctggagagctcaggtcacccctagcctcgggtgtgtcccaagggcaacccccagctggtgcctggtgaaagggcatgacagcagccacggtgtgagctgtcccagggctcagggctggactgcctggctccagccccctcccccagcccctcgcagtgctcatcagggaccaaggtccagctacagagctcttgcagcctctgggccatagctgccagctctggagggtccagatggaacccagagcctgaacacccctcccctccccccagcaccccctggattcctgaggcctggctcagttaataggagacaggtccgctggcccaagcaaagatgcgggtgccacgagggccaggcctcggccaagccctgctggggtaaatcccagcagcccaggctccagtctcgcctcgggggtccctccttgccagctctgccagcccgtcaggccggctgggcaccccttcacctcctgagcaccccaggtgstcagccctctccccctccccccatgtctagtccctcagagctgtccggactgacgtctgtacctaccccccatgtgggtctcctgctctcccttcgtggggacactaggcaggcactgggccttgccccaagccccgcctgccacctcacccactgcctctgcctccctggggcagagctgttcccagacgggtggggcggggcccaactgtccccagctccttcagccctttctgtccctcccagtgaggccagctgcggtgaagagggtgctctcttgcctggagttccctctgctacggctgccccctcccagccctggcccactaagccagacccagctgtcgccattcccacttctggtcctgccacctcctgagctgccttcccgcctggtctgggtagagtcatggcctcgagcacaggtgaccggagccaggcggtgaggmatggactgagggcgaaggtgctgacgctggacggcatgaacccgcgtgtgcggagagtggagtacgcagtgcgtggccccatagtgcagcgagccttggagctggagcaggagctgcgccaggtatggcccagggcccctcgctgccctccaggtcacaatggggtggccgagttggccccagccccactggcacatgggacaagggctgaggggttaggtagggcacagtctccctgcctgctcccctcccctcccagggtgtgaagaagcctttcaccgaggtcatccgtgccaacatcggggacgcacaggctatggggcagaggcccatcaccttcctgcgccaggtgaggctcctgcactgcccggagcacccccccacccccagcccatgtrccctggcctcagcactccgtcttcccaggtcttggccctctgtgttaaccctgatcttctgagcagccccaacttccctgacgatgccaagaaaagggcggagcgcatcttgcaggcgtgtgggggccacagtctgggtgagagccagggccaggaggaagcagagggccgccctgccactggaggagggaagtcccttgggagngctgaggagaacttcacctgtacttcccatcctgtcctgcccgagtccaggggcctacagcgtcagctccggcatccagctgatccgggaggacgtggcgcggtacattgagaggcgtgacggaggcatccctgcggaccccaacaacgtcttcctgtccacaggggccagcgatgccatcgtggtaggctgggcatgggcaccaagacattcctgacactgcagagggggcgcccagggtgggggacaggtgcggccccaggcctcgccaaccctgccttccccttcctttccgcagacggtgctgaagctgctggtggccggcgagggccacacacgcacgggtgtgctcatccccatcccccagtacccactctactcggccacgctggcagagctgggcgcagtgcaggtggattactacctggacgaggagcgtgcctgggcgctggacgtggccgagcttcaccgtgcactgggccaggcgcgtgaccactgccgccctcgtgcgctctgtgtcatcaaccctggcaaccccaccggtgcgttccccgccgccccgccccactccccccgcgcccacgttgcgttccccgccgccccgccccactccccccgcgcccacggtgcgttccccgccgccccgccccactccccccgcgcccacggtgcgttccccgccgccccgccccactccccccgcgcccacggtgcgttccccgccgccccgccccactccctccgcgcccacggtgcgttccccgccgccccgccccactcctcccgcacccacgtgcgccctggcccaggcagtgccgggtccgctggaccccggctgcccagcggagggcagtgcgcccccttggctcacccagcactgctgcctccccggcaccccagggcaggtgcagacccgcgagtgcatcgaggccgtgatccgcttcgccttcgaagagcggctctttctgctggcggacgaggtgcgcggcgcgggggagcgggaagccgggcaacagtccgcccccgtgacgccttgcgcccttccaggtgtaccaggacaacgtgtacgccgcgggttcgcagttccactcattcaagaaggtgctcatggagatggggccgccctacgccgggcagcaggagcttgcctccttccactccacctccaagggctacatgggcgagtgcgtgcgtacgaggcgggtgggggctcgcgggccatggccaggccctcctcgcccgatgggccaccccctcctccgcacctgacctggccgtgcgcaggtgcgggttccgcggcggctakgtggaggtggtgaacatggacgctgcagtgcagcagcagatgctgaagctgatgagtgtgcggctgtgcccgccggtgccaggacaggccctgctggacctggtggtcagcccgcccgcgcccaccgacccctcctttgcgcagttccaggctgtgagttgggggcaggagggggtccaggtgacctaatcaggggtgggggatgccgagtgccgtgccctgatgggccctccctccgcggccacaggagaagcaggcagtgctggcagagctggcggccaaggccaagctcaccgagcaggtcttcaatgaggctcctggcatcagctgcaacccagtgcagggcgccatgtactccttcccgcgcgtgcagctgcccccgcgggcggtggagcgcgctcaggtcaggcgggggcggggcctgcggggtgggcagggggggccgggcatccctctctgacggctctccgtccacaggagctgggcctggcccccgatatgttcttctgcctgcgcctcctggaggagaccggcatctgcgtggtgccagggagcggctttgggcagcgggaaggcacctaccacttccggtgaggcctggccctcactccctgtcccgccaccctggcccttcactcactgtcaactcctttcaggatgaccattctgccccccttggagaaactgcggctgctgctggagaagctgagcaggttccatgccaagttcaccctcgagtactcctgagcaccccagctggggccaggctgggtcgccmtggactgtgtgctcaggagccctgggaggctctggagcccactgtacttgctcttgatgcctggcggggtggggtggggggggtgctgggcccctgcctctctgcaggtccctaataaagctgtgtggcagtctgactccagggaggaagcgttggcagctgcgtggcccgctcccacctgcctacccttcttgcaggcctgagtcccttcagagaagggaccttccacggccaccacccacctcttcctcctgaagaccccgtgcccaccataggctgggtcttccctctggcctctggttgtggggcagagcccgtcagatcacacagaaatgggttgagagggtccagagtgtgaggaaagcgcaggccccacacccctttgtggaagcccccaagaatctagggagccaggggcccaggtggccacccgaagaaacacagcctttcctgaggaaggcacagtgaactgcctccttcctggctccctttcctgtgaggtccatgtcttccctggggcagggggaaatactaaaccagcatggtgctggctggtcagggtgactgacagctcaggaaggaagtcttggttctcttacccaaggaagcaggggtggggccactgtctggggggccagagaccacctttggtgtcattgtgtggtgcagtccttcggctgggtggagtgggaggcagagggagaggataagggagcgtcccaggggagggctggggctggaggaggcaggggctgggctgagcgggagtgggcagcgctgtgtcctggcctggggagcatggctgagcacctactacatgcagacactgmtggggggtcactcaatctgcacagatgctcttctgaagtaggcatgatagtccccatttgatagacgtggaaacctgcaacccaaaaacctgctgagctgacaagaaaccccctcagaggcctcggcagccagaaaaatgcgttgggtccagtgccctcaagtccgccaaggacagggctggctttagagactcacaaacttgggagataggactggccaagggcacctggtttttttcgctctggagatggttcttaaccacaggccacacacacttcacagcctcatctggccctcgggagccccagagggcacagctctgggcaggagacacagcaggtgggcccctcccttggcagggcgggctcgaatcaggcagggtgctcctagccttgtcaccggacaccgaagggcgtcacgggcagtggctggcggtgtccttctgagctaagctgggtcctgacctttcacacttccctcctaacttccatggctctgtcaccgccttacggaggagctgaagccacagacacagcaaggttggggtccggcaccggaagtatccagtggtagacggcggaacccttaagaaacggacgccttcatgcgggcggctggagaagcgggggctgggcactgcagcaaccacgcttcggctgacaccaggaaggaagcacgcctggagcggatccgaaactactgagaggggccagggctggccgtgggcgcaggccgatccttacattcgaggccggcccagctctgtagcttccccctctgggcctctcacccgcgcaggacctcggtgggagcgcgcacgtggcggggcggggggccgcgggcccgagcccggactggccaccgggggcgcccgcgagctgacgctctggcccgttgcggtctctgtggcccgcgcgaccttccggccctggagccggtggccgcggggctccagcgacgccgtgtggtccgtgctccgctctgtggctccagggggccgagaaactgctgagagtccggcccggccggcagtgctgggcgcgggccgagggccccgggaggcagcggccccgccctctttacctgcggcctcgcagagcatgctgggagccgcgggaggcagtggccccgctcccctcacctgcggtatcgcagagcatggtgggagccccgggaggcagtggccccgcccccttccctgcggccgcgcagagcatgccgggagccgccggccgccggtgtccggaccgctcgcccccgtttggacccgacttcggttcttctggggtgttgatgctcctaaagcccgagagcacgtgtccagaccctagcctgtacgacgctgactctgcccggtcccagaaccaaagccatgccggggtgtggcctctgaccccacgcggaggggacctcgccttgcgggaccccacctggaacccgacctcccagcctcgcagccggcctgagccgccatgcgcgggaagttgctgccgctggccggcctctacctggtgcagggcctgccctacgggctccagtccggcctcctgccagtgctgctgcgtgccggcggcctctcgctgacgcgcgtggggctggccaaggttctgtacgctccgtggctgctcaagctggcttgggccccgctggtggacgcgcagggctcggcgagggcctgggtgacgcgcagcacggcgggcctgggcctggtgtgtgggctgcttgccgggctgccccctcctggagctggccaggccgggctgcccgccgctgtggcggggttgctgctgttgttgaacctgggtgccgccatgcaggatgtggccctggacgcgytggctgtgcagctgctggagccggccgaactggggccgggcaataccgtgcaggtggtcgcgtacaagctgggggccgcgctagctgggggcgcgctgctggcgctgctgcccaccttctcgtggccgcaactctttctgctcctggctgccacctactggctggccgcggccctggcctgggctgcaccagccctgcggcggctcccacagcagcccccttccgagcagcgtccccacaccgcgcaccttctgcgggacgtgctagccgtgccggggaccgtgtggacggcaggctttgtgctcacctacaagctgggtgagtgaggcctcgagccaggcaacagcagttggggcttccgggacagctccaggtgtgtccccaggggcttgcaacccattacagggccacgctctttctggggtatgacctgcaagacttggccctgacatccggggctctgcagctgggccttgtgtcttgtccgcccccagctctagccccatccctgagcgctctctcgggctgccccacttctcccccagtatctgcagctctggaacactgaggagagcagggcaggactgagggcccaggtggggagaagggaggtgggggcagatatggaacctcccgtgctcatgccccccccaccacccaaggtgagcagggtgccagcagcctgtttcctcttctcctgctggaccacggcrtttctgctcccgagttgggactgtggaatggtgtgggtgctgtggtctgctccatcgctggctcctccctgggwgggaccttgctggccaagcactggtgagccctccccagtgtaccctgcccacccacttgtacctgagctgcccccaatccactatactgacccatttcccacccccatcccaggaaactgctgcctctgttgaggtcggtgctgcgcttccgcctcrggggcctagcctgtcagactgccttggtcttccacctggacaccctgggggccagcatggacgctggcacaatcttgagaggtgaggggctggccttgaggaggaagagaggggccaggagcctggggcactgctgacttctgccctcccagggtcagccttgctgagcctatgtctgcagcacttcttgggaggcctggtcaccacagtcaccttcactgggatgatgcgctgcagccagctggcccccagggccctgcaggtgagtagatgtagcagggacacaagagagaccacggggctggggctgtgtgggcctgaccttgaccgtgacccccacccccctcaggccacacactacagccttctggccacgctggagctgctggggaagctgctgctgggcactctggccggaggcctggctgatgggttggggccacatccctgcttcttgctcctgctcatcctctctgcctttcccgttctgtacctggacctagcacccagcacctttctctgagctgagtggctggagtggtcaataaagccacatgtgcctgtggcccagatgtctctgtgcctggaatatgtgatgtgcttgtccccagcttgtgggggttgcctcattggccaagagggcccataaaaacaaagtgagcattttttattctgcattttggagcctcctcgttcccacaccctgtggcaggttttgcccaggtcctcagtcactgccctagcctctgacaaccccagctctacccgacatcccccaatgcagtgcagtcagcgggccacctgcaggagctcttccgtggccaggcccaccagggcatggaagctcaggtgcaggtattttctccagaagcgtcggtcctgcccgtacacctgggccgggtagcaggggcttcctacggtggagccaagacacagccgtgagccccagccccagcctgcagcgggtggagcctcccaggcctcacctgccccagcccccagccccagcctgcagtgggtggggcctcccaggcctcaccgatgccgtggaagatgcgggccacagccctgctggagaacttctcctctggcctcagggacaggaactggcggatgtcgcagcggacctggtcctcccaatcctggagctgtgtggacaggcacatcaggcttcctctgagctcccgtggcactgcatccacagagcaagccccatgcagcccagggaacctgcaaccccgatgagctgcctggccttactacactcactctggcctgccctggctcggggccctgtgcgtcctccatgcctcccggctcctgcccttcctcttcctcaaagtagcggccgagcaggtccttgagcctggtgctgcgctcctcatcctgctgctccaggcagggcccgcagctggggaaggctacgctgtggggaggagcctgtcagagctgatcactgcgggagggtggatggtcccaggccccgcccrcctcctcccaacctgtgaaaggcctggaaggttctgcgcagacgggccagggcctggcgctcccgggcctgcacacggccatagaggaagtcacatatctggtccttctcctcagcggtcargtcccccgggctgcgaaggtggaaggccagctcactgaactccacaagcacccctgtcccacgccgcacacctgccggaaagcatgtcagatgcaggcaggcagcgtccagggcggtgtggggtggggagaggcgcacctgtcctgggctcgtggtcccactgcagctggcagagagccygccgcacagaggccagctcccagcccatggagtccaccagcttgaccatgtcaaactccacggagctgctgccttgccctgggtcctcaggcagctgctgggccaagcacacagccaaagggggacacctgtgcccagggaaaaagggacatgtggccaacagccctgattctccaacctcgtctccaactgggcagggcgtgcttacctgtgggccagggcctggagctgggcagggcccccagggcagttcagacggcaatgggtataggtggtcgccagcagctccagccagtggtgtgggtgcagctccaggtagcacagcaaagtctcgatggctgggggcagagcagggctcagcggacgcggggacagcccctccacacccctgtggcttaccccaggttcctcaccctcctccggcatgtccaaagcctgtacggtaagctgtattgggagtgcccgctcatggcccatgcagacccttctgggtcctggggctgcttggtggctaagctgctcagcctcttgaggggggtacttgggcacaggcctctccccacccacggccccttcctgctccgagggcggcctggtgcaggtgcaggtgcaggctgggaacacgcgctgtaccagcctcttcacagccaggaagtccgtgctgtcggcgtgcacatgtctgcgcagctctcgcaggtcttcgccctgcagggcaactttcatgagggtggggtg

SEQ ID NO: 95180 - DNA, 24678 bp, Homo sapiens
  misc_feature (1)...(24678): n = A,T,C or G
gggtgaggtgaggtagggagcgccctccttctcccgcctctgcgcccctggatcgcgtcgcagggactcaggtcttccccaccccttcccaagccttctagcgcagggcctgcggcccagacgtccagggagccggcccctccccggcagcaggccggggcggagcaggagcgggcgggcctgcagggacgcccctgcctagcagccttcgcggaactcccggcagtgttagacgcgttgtgggtcggggagaggggcggacggcggcaccccctccctcgggttgcttctggggcctcagtcggagccgccctcctaccctcgcctcgcatcctctgccaaatccgaattcttccagcccagcttcccgggctctgtcctccatatcgaataataatgacacatatcgaatcgcatggacttatccgacctcctcagaccccgcttccgccctgccccgggcccccacccccccccccgtaccccaggcattcgtgttggaggacggattcccggggccggcaggcaggcctgggcgctgccctctacacacctctgtcttcgctttgcgggtaaagccccctgggggggttgcggacgcgtcgggtttctttttctgtatttgtacgttttatttatgaacggattgcactcgggtcagggagggggcgctgaacccccatcttgcccgccgacgccgggggcctgggatgtccgggattactttccacgccccgaggcccgcccctagctgggagcctctagggagcctcaggccccgcctctccgaggcaggcccctcccctgagacccaggccccgccccygagacccaggccccgcccccactcggttgccaactttcgcccgtctatgccaaagcctcggcggcgaccccgccccaagggcccgccccattggccgccgcctttgtgacgtcactgcatgcagccccacccctcctcccgatcctacccggggctgcccgctccccctccctcttaggtagtccgaagccgactatagagcaataatgcgcactgcatgcgaagctgccgccgcctctagagttactgagaatcaggtatcccctcgccctacccaccccataggcccctagatcagggacgctgcgcggggccggccgcgcatactttctccccacccctccccgacccccacggcagagcccggcggctgtaatggttccatgggcgggggtggggtggttgcccccaagacccctccttcaggcattaatcattcactgaccgttcattgagcacctactatgtgccaggccaattgctgagtccgccaggagcgcagccacctgctgggaggtgtgtttgcaggacaggggtccaaccggcttgggtgggccagggaagaacggcagatgcagagagaccaggtccctaggttcacatgccccctacactcctccccacctcaaccagtccctgctgggcacaactgggctctacctttgagttaggccttttgactccagctgagggggacagatccagggctcctgggcccccacacaggtggccacttctctgatcctctggccaacacacatctgccatgtccagccaggggcagagccatggctggagaagaaggtgccagctgtagcctatggtgtggccagcctcacccccagcagcaagcgtggctgcccccacaaggatgacccaccgctctgcacagcagtgcccacatccaaacaccctacacaaccaggtgtggtgcctgcacagctcccaagctggggcctgcccacctgtgccgcatgcacacgcacacacaggcgcccccacctcaccccaccccatactcctgtctacctacctaaggagaaagctggagggctgtgggcccgtcagggtctcctgcttccccctacaccccgccgccgtggaaagccatgggccccctccctgnnnnnnnnnnnnnnnnnnnnnnnnnnnnnnnnnnnnnnnnnnnnnnnnnnnnnnnnnnnnnnnnnnnnnnnnnnnnnnnnnnnnnnnnnnnnnnnnnnnnnnnnnnnnnnnnnnnnnnnnnnnnnnnnnnnnnnnnnnnnnnnnnnnnnnnnnnnnnnnnnnnnnnnnnnnnnnnnnnnnnnnnnnnncccgcatgtgccccgccgccttgtacatattcccacccggaataggccgggatttttactcgggccgtgcccctcttccgcccccatttggggccaggccggccggacagacggacggacggacagacctccttcctaagcacaatagcaccagctccccggagcaccgcacctccacaaggagaataaatgccactcttgatagaatttggagtgtcgggctgatgtgtcctgggctgggcccacgctgttgggtggctgggagggtcttcccagtctggcagtacctcagaggctggtgctgcaagggtcagcctgaggcctttcacaagacggccctcttcttccactggggaggacaggcttggcaggcccaaccacaggagcatcaggtctgaaggcaaagtagttggcatttcccctggggtaggtggatctgctccacaccaggaacaggagcactaaggggttccagtctaaagtcaggccaagcccacggttggaccagagtgggcagggtaggtatagtaggagctgctgttccccagcctgggtgccttcgctcttctctccctgaaggagctttatgctgtgatggaaggcctgatagccacctcaagccctctgagatgctgttgcaggaaatggggacagtggagagttcgaggtctggcccttttcctgtggcctgctgcccacattctgacccccaggcttcccagatatgctcccccagtgtctgcggatgcctccatggatagctgggttggaccggttccagggaggaggtgcccagggggcagagaggcttctgcaaccatcgcccaagggctctagacagaatgagtagtggaggagataagggacagggaccctttgcccagcaatgtcccctggtaaccaggtaggcaggcatgagccgagaggcccaaagtcttcgggcacatacattcaaaccaggtcagtcctagatccagggccagcaaagctgcccacaccctagcagggacaggggacagacctgcccagactccactagggtggagagcaggggaaccaggtctgcagcatgtcatggcctgtgtgcctggcacttggaggagctgtggtgcaggtgggtgctctctttgggagagcactaccagcaatgacaatggcagacagcaatggccaggaggaaggctcctagcctcactccttccaaaggactccaacagcgactggctgtttctacttctccaggattctgatgcgtagagtgggtggaaggatggaggtggcctccctgaggcctgggatgagctcgaccccccagttcctcccagccacagacacaagtttccctctgaatgagcagcacaggccatagaccaccactggctgtgaactctcctgggacccttgcttctcacaggccttcttggcccacccatggcccctaggccctgggatcagcctgaggccccaacccacttccagccctttattccactagccctggaaggcaactcgcttcgggcttgggccccctcatttgttgctgcccccagcagggtgatctgcatcatgctttcctcgatgacccagccatacacacccttgtccccaaccaacctcacctaccctgaccattcccctcaccctagatcccagggtatagggcctgtctgggcagggcttcacccacctctggagctgctgccccgccacgcccccacccccggtggcaaagcccttccttaatggcccgcccacagccagtgctttccccattggctccaagcctggctctgctcaccaggcccgacccatcctccctggtggtccagtccaccctcccattgtctttctcctgtggccacttgccggctttgagttgggacgcgaccacaggttgagtcgttgatctcctctgcctagcatgaggtgctccgtggccaggtccagacctctctgagcttgctgtcagtccatactcagacaggtctgggcctacctggccacagagtgtgtctgccagcgactgcattcaacaaatgaatattctgagagactgggtaggagatggggctggtcctgaccgaccaaggcccatgtgtgaggggctcttgggtccagtgagggcggccccactcggcaggctacacaaagggcatctgccaggtagctccagcctgcctgatacctggttggcagcaacccacagcggcctgtggtgacaagaatatgtcaccaggggggcaaccaagggggcagccctgctggccactgttggtggaggtggtggaagaggacggagctcagaggcgaggctgtgaccagcccacgggagaggaccccacctcaggaggagcacctgtttgcttccagagaagtgctgcttgcccctgctcaccccagaggaatgaaggtgtttctagagtcagagtcctcagtgaaccctggcatcctgagatccaggatgttctcactccatgccctgtgcaatatgcacaccaagccaaggtgggccgcaactgtggctgttacagttgattagttgcttcatttaacatacaagatgtctggggcagtggctcatacctgtaatcccagcaccttcagaggccgaggtgggaggattgcgtgaggccaggagttcgagaccagcctgggcagaatagcgagacccccatctttagaaaaaataacaacaggccaggcgcggtggcttgcgcctataatcccagcactttgggaggccgaggtgggcggatcacgaggtcaggagatcgagaccagcctggccaatatggtgaaagcccgtctctactaaaaacagaaaaattagctgggcgtggtggcacgcgcctgtagtcctggctactcgggaggctgaggcaggagaatcgcttgaacccaggaggtggaggttgcagtgagacgagatcgcgctactgcactccagcctggcgacagagtgagactgtctcaaaaaaagaaaaaagaaaacaaaaaacaacagggcggttgcacaggccgtgcaaatgcacagaagcctcttgagtcccggcgatccagcggcccagacttctgacatcctggagaggctggcccacgttggaaactgggaggccctgagagttgagggacgtggagctccttgtggagagagtgggtgggctgagaagacaccaccaaggggcctgcgccctcgccctcgccctcgccctcctctcgccgggctctgcaggcccggaggtggagagcctgggagtcgcgtgcaaggcaggcgtcccggtgacgcagggcctggtgcatttctccagcttggtcttctgacctggcccttgtctgacgtccccctaaggcgaagaaaagcaggttcctgccggggtaaccagagggctcgcggagcagaagcgcgccagggacgttactgtaagctgcgtgcgcagaaaccaacgcgctgggtggcgggcgacgcgagccgccgcggacaccggcccggacagctggaccgtggcgcactaggcgcttcctaaatgattgcccggagtgactcgccgagaccccgtgtgtacacaagtgggacgaggggcgggcgcacagcggccaggaagtcggggcccagcgcacccctcagcggaccatcccgctccgtggggccggacaggaccccgggaccacgcgggagcgatgcaaggtccgttcccgctgcgcgcacttgcggcccgcagccccggccctgggagctgccacggctcccagggtgttctgcgccggtgcggccgcggcgactacgactcccagggtgctctgcgccggcgcgcccgcggcgactacgactcccagggtgccctgcgccccgtcagcctctccaggccccgcctcaggtcggccgcggactacaaatggacgagagaggcggccgtccattagttagcggctccggagcaacgcagccgttgtccttgaggccgacgggcctgacgcgggcgggttgaacgcgctggtgaggcggtcacccgggctacggcggccggcagggggcagtggcggccgttgtctagggcccggaggtggggccgcgcgcctcgggcgctacgaacccggcaggcccacgcttggctgcggccgggtgcgggctgaggccatgggcgaccgcggcagctcccggcgccggaggacagggtcgcggccctcgagccacggcggcggcgggcctgcggcggcggaagaggaggtgcgggacgccgctgcgggccccgacgtgggagccgcgggggacgcgccagccccggcccccaacaaggacggagacgccggcgtgggcagcggccactgggagctgaggtagcggagcgcctgaccccctaacctctgacccaagggccccgcgactttccggggttggccgaagcgcgagctccgagtccgagaacatgggccctgggctaagcggggatcggtgtgccctatgggccctgtggggaaactgaggcttggggagagtcacctgacaaggtcactgggtaggggctctggagctggccttggccaggcagaggggagccggcaggtgtcccgcatccagatcctcttgggtctgtgcatcctcaggggctcctgaggagcttttcgaggggcgggctggtgggggcccggccctggacagtgtccccttatatggaaggagtcagataagatctgggcagtttgtggtgataggttccttcttggtgctatgagcggtgccttgcgggtaggaaaggctcccagaggagggctggcctgccagggagggggccagaggagcccaggcctgtccgaggacaggggaatcagcagctgccccggacaaggggcagtgttagaggcgttcttgtccttgcagacccttctgagagtggctgcgtggcccattcattgctccagtggttaggctggcctggagccctgccgatgttgccagagccagcgtctgttgtagggacagagagttgggttctgtgttgggacttccatcctccaggtggggagtggggtatgggggtggtggacacacctgcaggcgtgtgccctgctcagctggatgactgacagagaggggtggagggagagaaccatggccgatgggaaggacttggccagcctgggcattggcttcctccaccaagctggccttgagcaatccccttgccaccctccatcccccctttatggcctttaccctggcccaggggccctcagggctttgttttagagagcagctgagggcctagaggttatcaaggcagaagtgggctgattttggacatgtagttggcaatgatttgctctctcagtgagcaagaacagagctttccttcacggggcaccatggggagggggttgggggagggcaggcactgtcgtggccctcagggtgctcagttcatctgggagataagataacctcagcaagagtcaggcatggagcaacatggacaaaggtcgggcacggaggccttgaaggggccgtggggaggagggtggccctcctgagaggggtgcttgcctgctgtgggcctggggtgctggtgagggaggctggcctaggcacctcctacctgaaaaggaggtgtggctcctggagttaccctctctccaggaggcagggggatggctacatgacctgtggaggacgtgggaattgagatttctttttttttcttttctttttttttgagactagttttgctcttgttgcccaggctggagtaaaatggcacattcttggctcactgcaacctctgcctcccaggttcaagtgattctcctgcctcagcctccagagtagctgggattagaggcgcccaccacacccggctaattttgtatttttagtaaagatggggtttctccatgttggtcaggctggtctcgaactcctgaactcaggtgatccacctgccttggcctcccaaagtgctgggattacaggtgtgagccaccgcgcccggccgggaattgagattttttttagtgtgagatgagggtagtcccagctttgggccaagccgccacctgggggtaggcaggggagagcagtcaccttcttgctttgcaaaccagcaaggctttcctgtacttctgctggtgtgggatgggtgcagagctcgtgggagaggcctggtgagtccctgtccctgccgtggaggtcgggtctccttgggaagaggggcagtagatggagaggtgaggccttcatggggctggaggctgagaccaaaagtctatctgctcctgggtctccaggacttgcaggctatgtgtgcttgtccctcagacctagggatgcagcagggctcggccactggctgtggacactgggctcttctccctgctgtctgcgtcaggccttgctctgcctgccctcctgggacttggcctctagcgcacccccttgtcagcctcacagcctcccctccctccagcttcctgctgctcttggcccagcccagcctttcctctcccgcttcctcattactccttgagctcgggcctcctcccctcacggacacttcctgctcacctagggctgggctctgggtgtgagctcctttcttccggccccgtggcaaggtgaggctgtgaggcaggcaggagagggcacccctttctgctctgcttgtggctcactcctgccaggctctttgcacacacccaccagccctctgctcacaggcaccccagtcggggccatccggtttctggcttctcccagggtgttttgtccctgaggtgtcctttctgactctccctttctctctccagcagggtctgcgaggtgcagggagcctgccccaaccatcttgaacccaggcccagcccagaggccagagtggaggaggcggcagtgagcagagctggactctgccccctcctcattgtgcttggccctggagctgcactgtgtgggccccaagtgtgggactcactgggacctgtgcctttgggcacactttgaacctggagacagggtggcgggtgggcatgtgccaaggtctcagtgttgccgtgagactgagaggatcctgctggctgggtgggcctgggggctgcaggagggagggcaggctgctccgagtcttcttggactagggagtgggtgtagggacagctggaaggtgcagaggcttgggcagatcctccagtcagtgagagggtgataaaggtgctctaggcacaggggcagatcccacctccccatgccgttccatgcagcctgccctgtagcccacatgctgctggccgcactgactgcttggagctctgtgggcactggtggactggggcttcctcctcatgggggcctgtgaggggtaggggtagcgcagtgggggtgctgcctctgggtggggctggtcaggcctgtgaagggcctgaggtgaggctgtggctgggttgaggaaggccttggaagcctgtcaaggggcccctgagaaagcttgtgtaggattgtctgcagtgagctttgggaagcaccaccctttcccgactcctgttttcatcttggagatgggcatggataaagccagcatggtgtccttggtggctcaaagggggcaggggtcatactgctgtgaaacagctgtggttggtaggtcgtggtacaagaaggccaaccctgaggcttgggattgttctgctgaaaacaaatgggctcgaacttggggaagagggggcagtggagaggcccccagacagacagcccagagaggctgctgggcagttgggcctcgtgcccctgctcccgtcacggtgctggggctctggcggtgtctacacccagcctcctggttgtgggcaggcagtgagtggagtaggctggggagatgagccaagggcggtggtcagttgggaagacagctgccaacttggggaggagggaggctctggtggagaccacagcctcactgcatggcccaggatggacctggtgggtggatgcagggcgctcaggctggagctgggagaggcaggggctgggtggagctgcctgcccctgtgttccagtctagatgggcagagggaaaggtgtgagcatcctccctgcctgggggtcttggggactagtgtagacttgtccaggaactgtgtaggtgtagatggggcatgtgttgcaccaaccttggtcttggggagcaaaggttgggcttgttggcattgcctctcggcctccctggccctttgcctcctgggcagggccgtctgactgccgaccccaatcctagccagcttgccttgggtgccctgagggcgtctgcctcatggggctcctgccatggctctcaggcccactctccctgcctaggggctctgaggggcagatgtgcgtgtgcgggagggaaagggaggctctggcctctcctctyacaaagttgaggacttgctcaatgctgtgtgtggtgtcccagtggcacggcagatggggggtgaggcgggcctgcagctagtgtatrtgagccagcactgcttcctaggacgtgtrggggcctggccaagctcttgctgtccttgtcctagctatatggcagtccctctattgggctgggtgccctcttccacctgtgcagtatgctgaggaccaggcagggtctgcctgtgcccctccagcgctggttgggagatcatgggtgggtgcctgcctctgttggaagcytctcagccagcaggcacctagccccgggtgggttcctttcagccccctcagcctgggcacacatcacaaacaagtggaggctacaccggcacacgagggctggatccctgcctctgggaaagtgcatgtcaggctggtgtgtggctggcgcctggcctgcctttgccagtttgagcctgcacgtccaagtgtggggacccctyagytcccgggtgctgggatgggccaactgaatakggtggactcaaccctcaccacttggtccccacagtgctgggcagtgccccctggtccatccccaggttggaccctgcttgtggccccagtgctagtccacagccagagtacatggcagtggccagaggcctctggagagtgaggcctggagtgtccaagctccatgtaggtccagtccgggcagggccagctgggcttgcttctgaccctgacatgctcgtcccgctgcctggaggtgcaggctctgggggtccggagagctttgcccactgtaggtcttgaggccacagtgtggctctgcctggcttctcctcctggttgtaaataaggagtggggcctgagggcagacgaggacactggggtgggggcctggatcctgcgggggtggcgctgccctgctggtgcccactcagggggtgcttgtgttgtgctctgtcaggtgccatcgcctgcaggattctttattcagctctgacagtggcttcagcaactaccgtggcatcctgaactggtgtgtggtgatgctggtgagtgggacatggtgtcgggagcgggtctaggtccaggtggggctctgtcccaggctggcctttgcctgagaacaggctctgtcacccagggtgtccaggctggagcccctstgggctggggtgtgtggagcaggctgcacctccatgtggctgccagcactggactgttggggaggggagtggcagtggctgcccctgctgtggtcacttgggtgcccatgcaccacatacttgctgcttcccattggatcccaggagagycctgcwgatgtggtgtgggcgtggggasgccgaacartgcctggctggarcctgtgtgttgtgagctgggcctgaggggtgcagggcctccagggagggcagggtggagggggtcttgccctgggctggtgggagagtggactgcatgctctgtggacacaaggcctctctggcaggggatgtgagaagagcttcctgtgctacgccacatggcctctgtgggtatggagccctgcaggcctggccaccactctgcagtcctcctggnnnnnnnnnnnnnnnnnnnnaccccagaagtagttggagtctagggctcaaaggggcacctgcagggcaggtcggggacaagggctatctgggcccagcctccccaactcagggctgatgtggctcgaggcctttgaccttcacccaggcgtgtctatctctggccttgggtgctgctcctgtggctacccacgtggaaggggctccacgcacatccacatcccccaccgcccatggtcctagaaggttccctgggggtggccagctgtggaggcccacgagtcctggtggctgagaagctggccaggcaggaggacagtgggcccagcgccagcccagcactcaggagacgcagcccattcctggcccaggttgggccttgtccagcccaggcagcactgtgtattctccccaaccccttgggcctgcctggccctttggcccagccctgaagccttttccctgctttggctcccccatgcccccaccccaggcatgtatcccgctctgggctgcttgttgcattccttctgtggcctgggcctggaggtgggtaccgtccattggcagctttggcttctgcctgctgtcagccctcgggagaggccagtgacagtgtgggccacgtgtccatgcagaaggcctgtgtgtcagccctgcggccgggggaggcggggcagtagcccttgtgtctctgaagcagtcttctctctcatgaagccttccctgaccacccaggcaagacaccctcagtgttcccttgccagcgacccttttccccagcaccagttcactaccgcatgaggcccgagctccgggtggtcagccaggtctgcggcattggggcccagcttaatggaggtgttggtagtgcttgtaagatggaggaggaggttcctgtccttgcagagggaggccaagcacccaactccaggctcgtcccaagagccttattccatgggggctcagtcctgggaagttgctttggagccaagtgtccaaggcttagagggcggcaggaagcagaagaggcaggcggggcacaagccctgggaagcactccaggcccagccccccttgcgacacagctggacactgctcctgcagagaaagagtagacaactccccctcttcagccttggccaccagtagggactggttccttggggctcagccgtgggcaggcctccctgggcaggcctgtattctggggctgtctctggggtgtggttggctgtgggagccttgggtccctcactggctcggctcagcaggagggatgtgagcagatcagcagctggtctttctgctcctgaagacccaggcgtctggcagggttggttggtctggccggttggttccctccatgtgggaccgtctggtgtgatggggacagggagggacttccccttacccagcactggtgttggctgaggtgggtgctgagtctcagagcttggcatggagaccagacagggctgggtctgcaagcctgaggctgccgccctgagctcgggctgggacgtgcccagaggtgttgggaggatctggggtgagtaccctgtggccaggactaaaggggctgcaccctcctgtccatccctcgcagatcttgagcaatgcccggttatttctggagaacctcatcaagtgagtgcctttgccaggtcccacccctgccccacccatggcctgtccaggccccgccccacagccccacctgccacccactcagacccccatccctccacccccaggtatggcatcctggtggaccccatccaggtggtttctctgttcctgaaggatccctatagctggcccgccccatgcctggttattggtgagctgggctctgaggagggcctcgggtggggatcaggctgacgtggccctaaacctgccccttggtgcttctgtccacagcggccaatgtctttgctgtggctgcattccaggttgagargcgcctggcggtggtaagcagtgcccctcacctccgtgtgtgctcaccctgctgtgtgyrctcctgggaggagctgctccccaggcctggcagccctctcccaggcaatgggagccctggttgagtgctctgctccccactccagggtgccctgacggagcaggcgggactgctgctgcacgtggccaacctggccaccattctgtgtttcccagcggctgtggtcttactggttgagtctatcactccaggtgcgcccccatcccaccctgcccatctgtctcgggccagccacgggcatggcctccggctgtggcgctgtggaggcctgagtccacctctcctgcagtgggctccctgctggcgctgatggcgcacaccatcctcttcctcaagctcttctcctaccgcgacgtcaactcatggtgccgcagggccagggccaaggctggtgaggggctgccaggggctggggctgcctgctggggggctgggcagcagcagggccccaccagccccctcccactctgctgtgctcgtagcctctgcagggaagaaggccagcagtgctgctgccccgcacaccgtgagctacccggacaatctgacctaccgcggtgaggacctctgtgggcctgaggtgcgggggacaggctgggcctgttctggtaccaaccccccattcccattccagatctctactacttcctcttcgcccccaccttgtgctacgagctcaactttccccgctctccccgcatccggaagcgctttctgctgcgacggatccttgagatggtgaggttgggggctgggggcagccactggaggctagggggccttctggctagccagggcctcagctggctgctctctgtttcccccccagctgttcttcacccagctccaggtggggctgatccagcaggtaagtggggtagggcagggttgggtgtagctgggcatggctgggagctgacgtggtgccctcctttgcagtggatggtccccaccatccagaactccatgaagcccttcaaggtgagtggctcaggtgctcttgcagctggggtggctggggagtgaccaggagcatggctagctgaagggcttgtttctgcaggacatggactactcacgcatcatcgagcgcctcctgaagctggcggtgagtgcggacaggtggcgcatgcacaggacaggaggggacagtggcatgtgggggaaggttctagaacttggtgcccacccccacctccctgccaggtccccaatcacctcatctggctcatcttcttctactggctcttccactcctgcctgaatgccgtggctgagctcatgcagtttggagaccgggagttctaccgggactggtggtgagtgtccctggggtgtccctgggggctgggatgggccatggtgtgctctgatccccctgtggtctcttggcccccaggaactccgagtctgtcacctacttctggcagaactggaasatccctgtgcacaagtggtgcatcaggtaggtggggtgtgtgtgtgtgtgatgtggaacatggctgtgaacctgaaccgctttccatgccccctcctctgcagacacttctacaagcccatgcttcgacggggcagcagcaagtggatggccaggacaggggtgttcctggcctcggccttcttccacgaggtcagtgctctggggggcatcttgcctcatccctgggcaggggtatgcccacagcagggacggctgacaccccactccctggcatcctctctccctcccatctcagtacctggtgagcgtccctctgcgaatgttccgcctctgggcgttcacgggcatgatggctcaggtgagtgacccccacgtggcctcctcactcgcccagttaccccgcacctgaacccctcggctgaccctccccatgcccagggaccctgaagcccccagccctgtggtcaccatggccgactgacttggcccctcactccctagatcccactggcctggttcgtgggccgctttttccagggcaactatggcaacgcagctgtgtggctgtcgctcatcatcggacagccaatwgccgtcctcatgtacgtccacgactactacgtgctcaactatgaggccccagcggcagaggcctgagctgcacctgagggcctggcttctcactgccacctcamacccgctgccagagcccacctctcctcctaggcctcgagtgctggggatgggcctggctgcacagcatcctcctctggtcccagggaggcctctctgcccctatggggctctgtcctgcacccctcagggatggcgacagcaggccagacacagtctgatgccagctgggagtcttgctgaccctgccccgggtccgagggtgtcaataaagtgctgtccagtgacctcttcagcctgccaggggcctggggcctggtggggggtatggccacacccacaagggcgagtgccagagctgtgtggacagctgtcccaggacctgccggggagcagcagctccactgcagcagggcgggcatggccggtagggggagtgcaaggccaggcagacgcccccattccccacactcccctacctagaaaagctcagctcaggcgtcctctcctggtgctactcctgctgggtgtgcgggaatcggcactctggccctcagtgcaggatggtcaacttgcacccaccgtgctcagcttcagcttgggaagaggtcggccctgggtttgcgggaagtgggctccagccaggatggcccagggatgggcagtccacagggcctttctggtgtgggtctggtgagccgaggggctacggtacacaatggctatgtccatggctattcgccttggggcagggctcggtttggcagcctctttccttcacttggaacctgggcagccaggtgggctggtggctctcagctgccctccacgaggttggggcacccctgatccccaggcctgccttgccctctgctcttctggcaccaggctgggcagtgcagacagcgcagccctgcagccttcaggacaccttgttcccaggccctgcaatccaccaagctggatagatggggccccccttgatggtagcgggaggtcaggggtaaccccagggccctgctgctgccttaccttgctggggtgactgcttgattaaagaccccaagactggaccaggccctggtgtccccagacctgcagctatggcccaacaaggcaggtgtttgaggaggccctgcacagggtcccaggactgcaccaggggcctcatcagcaacctgctgaactggtggtgtgaggggagggtgggctcccttggtggtatcctccctctaccccagtgggggctggtgggccctgagatggaggcatctccttgggccctgctgaggatggcagtagtgggtgagctcctggtggggggatgggtgtggggccgactcctccatcccacatgggctcctgtgcctctccctatcagttggccagtggagctcgagaacaaactgttgctgccagataaagcagcaaagcctgctccactgcccagcgcargcccccttcccttcctccaccaggctgagtggagaaccctaaagctacgggacaggctcccgttccccgtgcctacacagggtgctggctctggcagaaagacagtgtgcccgccccgcatcacctgtccgagtgcgaacaccttgggaagggggttcctggtggtcctgtgacaaccagagacccccagggccaaggtgaggcgcccacccctggtccctcaataaagaactgcaagcacatgctggtcctggggagtcgggcaggcacggagctagctgcaagcatccgtcttcccccaggaggccactgcagccyggcccttctgtgccctgggcccctcctcattgcagcaccacccaccgcaccaccctgggacagaggaaacacatggaggccatagcatagagcctgtctgtttatagatctctgcctgtcttgtccgtccatccactgkgtgtatatatctgtgtatctctgtggagcggggaacgggacagttgtgtaaaaatccaaaatacaattctgactatgaacaacctgcagggtcagtccaggtgtggctgtgaagccccaaccaaaccacaggacacggggttgggggaaggcagactggcaggccagggtgaccctcctgaccagaggtgctgcccagacccgagcccgtttgtcctactggggctatggcggccgacccaccagtgcccaagaccgcgaggctgccctgcctccccaagaccagccctgcactgggggtgggggtgggcggctggcccagctcctccggggcctctaggagacagtggggtccttggctttgggaggctccgagcctgtcagcagggagatggtggggtcctcggcgaagccgtccccttcggagaagtaggagccctctcccagctcaaacagcaccggcaggtcgttgctcccggtgtccacggagccggggtccagcaggaacagcggctgcgctgtgtagtgcaccagctgcttccctgcgggggtgggggtgtcaaggcggtggggggttgggggcagaggtggggccggtgggacttggctcacctgaatccgggctgctgttctctgcctcgggaggcctggggggctcctggggagacaggagctcttggatctgtggggtggagacggtattgtgagcactcccgctggtctcgttccccctcaccccccgcccgcctacgcacactggccaggctgctgtcaaggtcaggcaggctcatgtcgggcacggtcaccgaggggctgaacagctgcggaggagggagggaagtcagaacagcacccgggggcggggcggggaagcggggaggcggggaggcggcgcggggaggcggggaggcggcgcggggaggcggggaggcggcgcggggaggcggggaggcggcgaggcgaggcggggaggcggggaggcgcggggaggcggggcggggaggcggggcggcggggctccactcacgtccagcagggcactggtgtccacgctgaagccgtggctgctcagcatggtctgcaggttatccaggttggagtccatagcatccaagtggtcactgagctcattcctggcccgggataaggcggtacctgaaccagtgccccaggccccacaccccaatgccctcctgtgggagaagggctccccttgactgtaccccccaggctgcacccccgtgtacgcctgcacaggctggagggggcagcgcattcgaggacggcctggaaggcagtggaggctctgtgccctgcaggggtgcggctgggcctatgctgggcatccctttgccatgagggcctgggggccttggtggcagtggacccaggagacaaggggcgtattcagctccagcacaaggatcagggatttcagtgttcagggttggtgaggtttcccgttgcactgggaaaacaggtggggctctgctcagtgtgtgggtggctcagtccctgccctggtgctgctgtggggatgagacccacggtctggtggctgtgaccaagaaagccctaggccacagggcacacctgggctatgggacggacagccaggctgggtcccagaggtgccctggagaccctgcctgacaggaagtgcagtcagcaccgcagtctggatcctgccaacaccagaggccgtgccagagcagggaggcctgtccctgtcatccctgtcacaggcaatgaccacaggcccgtggccaggggagccatgacgacactgagcccccgccacagaggggtctcggctgctgccgcccaggcccgacgctcatgcccggccaggctgggtctggtccacggctgtgtgggagggcccgagcgctggcagagccctcctccctccccagtggggtcagcgctaaccctggctggacttggccatgcggagaggaagaggggcaggggaagaggcgggcgaccctagacatctgtggagtgcgagccaaactgcaagatacaaaaacaagagcccccattgcaggcaggggctgggggtgtggaggccggccctgctcaccatctcctgccatgtgtctgggcagcacgacctgccagggcccgtggcctgtggcgagggtggcggcagcaggaggggtggctgagagcagggcccggcagcctgtccggacatgcccgtggcttctgtggcgtttgggactgtggggtgatctggctggcacctgtctccctccccagccccgagccccgaggttgggggtagggtcctgcctcgccagctgccctgctcagtccactgggacagtcggggctgaagcccagggctgtgcgtccaggcgctgtgggtggggccaggggtgggcggcactcacttgtccaggcaggctacgctgaggcacttttcaggggtggaggtgggcgggggggagggaggccggccctcggtgtccgtgtggcccctggcgtccgtgagggctgtgacggaggcgggggcaggttcactctcccgcaggatggagtcaatgagggcggtcggggacaagagggtgtccacggaagatgggcgcccgggactcgcctcctctacccgggggctctgaggcgggctggggggctcctccttgacacgcaccagggggctgctggataggggcctgcacacgaggggggccaggtgagctggcgtctcggccagccccacctcatccccaactctgccctgggcccacaggggctcgcctcattgggggacaggatggctggggtgatgcggcccccacctctcgtctatgctcccgccgggggaggccatggggctggcaggagccagctcggtgatgtcggagatgatgggtccagagctggccacagcatcaggggcgtagaggctggagctgctgtaggctggggagggggcctgcaatcaaaggcaggaggtccatgcagtgccggcaggggcaacccaccccactgccgcctgcatgcctgggcgggtgccctgtctccggcactcaccgagtaggggcccgagccgtggacgtgctccagggagaactgccggctatacttgggcatggaatgtgctgagccactgtcgttcagcatcagggggctgtggggaagggtgcaggtcagccaccaccccccacctcggggtacccggggcacagctgacagagaagggggacagccctgggccccgggtggtggatgcaggcatccccaaaacctcacatctttctcttcacccccaggatccggtttgactgcaccagtgagatcaggaactgaatgagctgtggagagagaggacacagttaccccggcccttgtggggcccccgccggccctctggccctgcccccaccttgttgacgactttctgttgctgggcatgcttctgccgaaggctggccacctcccgccacagagcctcattctcactgcaacagaccaggctgggtcagtggggcccaatcccatgagccccagggctgagggagccccacagaccctccctgtcccccatgcaggagcaggggtaagtgtgaccatgtctggcctggcccaccccaggatgagaacttgtgtgtggagggactgggggccagggccagggcttgctggtcccactgcccctccctgccggggacacctggtgtcacgtagggtgttggggatggatccatgcgagccaggtgcacccggatcctggcatccatcctggcaaacacctggagggctgccttggacacaggccaggagcagacccttgggccgcccttccaaggcctgagcagccaggttaagggaggacggttcttcaggctgcgacactggctgtcccatgtcctgtaggtgctcagggccctcgccaggcctggaggtggctcaggggtggggaagagctgtccccagccaggtgagcagggccatgaccgcgctcctgctgctctgggaggctgggccctgtcaagcctgtgagtcttcttggtaggccaggtccacgtggccggactccaggaatcacaaagccggtggctcctgctagaccccatgcaggagagtctgaggccaaggcctcctccatgacgtgggggtcaagagcgcctgctgcacggagccgaggaagccgtactggcattggggttcccgcatgcctggagccccaaagtggacgtgagacctgagctggccttccgaggtgggcttgcctcagtttctcaggtgccaccgtgtgttaggctcctgctaaggtttccccagagccgcagggtcccggtgaggaggggctgggggctagctccatgggcccaggcgagtgtgggacagcggttccaggaagggcctgaggtgggtctgaccccaggcccgaggcgggtgggacgggtctgctgtgcaaggcttgtcctcaaaagtaggctggtgggtcccgccaagctcggagccaggcagaagccaatggcccagagggcgctggggatgtgcagagcaggggaccctcccaacccccttctgcacatggaaaacggctggccccagagctgttgcagcagccacgggcggcggggctggggcagaggcccagggtagatgtgcgtggagcgggagggtggagctgagcacctggccccggtcagggccctgcccccacagcacccggggcctcttggtgggcgccaggacccgctgtggcccataatgctggtgtgggacctactgcttcatggccaggagcttggagtccatgcactcctgcttccccttcatcagctgcacgtccgtcagcagcttggtgacgctgtcctggcggatctttatgtcttcactcttcagggtggacacctggattcccgagagggacaggagtcactggagcagcctaggagcttggcaggctcaggctcgtccactgcagccaggtccctcaggaaggggcaggctggggtgggagccctcagggaggggcgggcggggagagctgtggcaggtgagaccgggcaagggtgcagggccggcactcacactggtcactttcctcttgatgttctcaaggagctgctcctggccacgcaggaagcatgggtgctggaactccgtgtcgtctctctctggcttgaccaggccgccctgctcgatgtggaccactttccggaagccatctgcacataacagggaagggggcagctctgcctcagggcgggaccagaacccctgaagagcggccactgctccaggaggctgctgcggggcttggccatggtcagaccctgccctgccccctcagagcccatgcctgggtggccgagtggccttggtctaagggagaccctgtgtccccacagggctccctgcgcccgacacacgtggagtacagctccggcttcacggttcttccatggggaccccaggttcatacccacaaggaccctcccccatggaagaggcggctgctccccggcccccaggcttgcagggtcccacgccatgcccttggccagcacaggacgccccgtccttcatcacagggtcctcctgctggggtcccgccatctgcaggtctgcctcccgcacccctgcgctgcctggaggcagcactcacacatgttgagctgccgcacgaagctggccatgttgttgtgcttgaagtacttgggcagcacctccttggcaaactggccctggtcgaacacgtggaagctgttcccgctctgaaagggagacacatgggtgggtcacgcgtggtggtgaggggcagcgtgcccaagccgccccttccccaggccgccccttctgaaacgcaggcagtgcacgttccacctgatggggctggggccatgggaggcccagggggctggcgggaggcgagttcgttcctgggaccacctgccacacgggcctcatctgtgcagcgtgacctgcatcctcactgtgaggcccaggactgggcggtgggcagatgcgaggccttcctctcagtcggaaagcccctccccagggcttccagagaaggccacgtttccactcacaaagcatccgccgcactctggccacatttccactcacaaagcacccgccgcactctggccacgtttccactcacaaagcacctgtttaagcaggacctttcccttgggaacagcgaaggaaatggagccctaatttcattactcccgaggaaaacacagtcgcgttcagaaatccaaattcagtcttgttttgtgacgtgagacaagaaacagagacagtcaaacactgcatataccttcctcttccatttctctaccgagctcaggcccagagctatcaggaggcgctggtgagggaggcatccctgttggccgtggccgcggtggctcagaggggacatcgaaggcttaggggacagcgagaagcccacacggcggggaaggggggcctgaagcagggccagagaggggtgaggggtgtctgcataggaaggggcggctgactcagtgaagaaactggtgaagggcagtggggcaggtttctccctgc

SEQ ID NO: 95181 - DNA, 34966 bp, Homo sapiens
  misc_feature (1)...(34966): n = A,T,C or G
cagggcagggcctcggcccctcagctaaagcacaggacacgcgggcaggtgcatgggcgccacggcagggcagggcctcggcctcccagctaaagcacaggacacgcgggcagatgcacgggcgccatggcagggcagggcctcggcccctcagctaaagcacaggacacgcgggcaggtgcatgagcgccacaacagggcagggcctcaggcagggacttgggcagccagcagcgtggggaactctgaggaccgccccaccagcccggccggccttgccacctcaggccctgctggatgacggagcacacagaccacagacagcggtactttggaaaacaccctgcatggggcagccagttacgcagtcacagaaacccgagcagggcaatgggcaggacaagcacacactcagcagtgcagaggacctggtgctccaggggccaggagacaagcagcgagaagagaagatggcgcctccctagactccgcagacacctctagtacctttcaagtacttggatatgttattatgcgaaaacattgttttggtttttgaggcagagcctcactctgtcacccagactggagtgcagtggtgagatctcggctcactgcaacctccgcctcccaggttcaagtgattctaacgcctcagcctcccgagtagctgggattacaggcacgcgccaccacgcccagctaatttttatatttttagtagagacagggtttcaccatgttagccaggctggtcttgaactcctgagctcaggtgatccatccaccttagcctcccaaagtgctgggattacaggcgtgagccaccacgcccgctgaaagaatttaataaaaaaatcattaacatgtaaatgtgtaaatccttaatttaaaaagggacagaagacccagaaagatgtacaccagaccactaactgtgctcacgggttaggtgtgagggccctgagtgggagcttccaccctactgaatggtgctgctacaatatctacattattttccaggatgttttatctcataatttttttttgaaacagggtcttgcttgtcacccaggctggagtgcagtggctctatcatagctcactgtgacctggattcctgggctcaggagatcctcccactttggcctctcgagctgctgggattacaggtatgagccactgtgcctggcccagtattgtatcattttaaaaactcaagaaggggtaacgtagttgtccataatcttacaaaccactgccaacacagcacatcattttttctctgtgtatgttagtggtataattaaagcctgaattaagtgtgattttaaatcttttcttcccagcaaacaagccaacccaacacagctagcacacaatgaacaagccatggttccttggcttctatcacggggacctctgccaaggccgtaacttccagaacaccgaaactactgggagagtaaatccttacaaacgatttccagaatgtttagagtaacaaatgctgggctgggcgcggtggctcacacctgtaatcccagcactttgggaggccaaggcaggcagatcacttgaggtcaggagttcgagaccagcctggccaacatggtgaaaccccgtcactactaaacatacaaaaaaaaattagccgagcctggtagtgggcacctgtaatcccagctactcaggaggctgagacaggagaattgtttgaacccaggaggtggaagatgcagtgagccaagatcgccccactgcactccagcctgggcaacagagcaagactctgtcttagaaaaaaaaaaaaaaaataggccgggcgtggtggctcacctgaggtcaggaaatcgagaccagcctggccaacacggcaaaaccctgtctctactaaaagtacaaaaattagccgggcgtgatggcatgtacctgtaatcccagctactagagaggctgaggcaggagaattacttgcagtgagccaagatcacaccactgcactccagcctgggcgacagagtaagactctgtctcaaaaaaataaaaaataaaaaaaaataacaaatgctgtgttttagttaaattatgcttttctcctgttgttctcaataagagtagggtgcatcctcccccaccatcgctgcaacaggtacaatgttaaaccctctacccgtcggctgctcaggcccctgaagccctgtggggtcaggcccagctgggttccgttggggcccccatgccgcctgcttgagccctgccatgctgctcagctccctcctcagctgggtcctgccactggattccaagcagtaaaatccccacctcaaggaaacccaacctgttgccaggagggttgcccgagcatcgtctgacggggaagggcctaggcatgtggattttcagagttcctgggaacggcacgcaactggggatggaaaccagcgtcctagagcccaagcgtgccccaggtgcagtgaaggagggacgccggccttggggttctgagggacggtggagaaggcagtacagtggcagtctcagaaagcccaaggccacctgcacatgggggacagccctcgagggggctcctcgctcacccacctgcacctgctcctcagtggtctttttaatcccactgtggccctcgtcatcaagggctccgtcctctccctcctcgtcgccttcgtcatcatcctcactgctgtcactgccggaatcttccaggcctgagaacacactctcctcgctgtcggagacgccagaatcgctgccggtgctgtggctgagaggagaggtgcagaggagggggggctgcaaggaaacactgggttggtgacaactgcccctccaggcatggggcactgaacactgcagggagagctgcctctcgcccctccagccacccaccagcagctccatgtggcctccaggaccacacccctccagtcacaaacttccaccaaaagcatccacccaacctgagccttcctcatcttctacctccactgacaagacagcctcttgcctttgccatcgacattttaattcctagcacctcacagggaaggggcttttcaaggacaacctcctcctcttggagctcagctctcatcgcaaaactaacactgctctctaccacccactgacactccggaggccctgtggggtcaggctgggctggactccactgggtccctcagacagcctgcctgagccctctccacacctcaccctggcatccaaggccccagagccaagaggtcactagaaaaggggctgggggctggaagagaaatgggtccccaaagggcttttaccacctgaagcagacgcctcctcatttaaccagattgggaccaacgattgatcagtaaattgaaaggattggctgaagagtcacaggaatgatagagactctaaccgcaaccacgcaccaacccacccactcctctctctgagcaggaccacagctgcctctgagcagagccctgctggctgcgtgacaccggcacacacagtgttcgggtccttcactggccttaaagggtggaacaagaacttagactcttaggaagcagttgaaggccaggcacagtggctcactcctgtaatcccaacactttgggaggctgaggcgggtggatcacctgaggtcaggagttcaagaccagcctggccaacatggtgaaaccatctctactaaaaatacaaaaattagctggtggtggcgggcacctctaatcccagctactcaggaggctgagttagccaggaggtggaagctgcagtgagccaagactgcaccactgcactctagcctgggcaacagagccaggctctgtctcaaaaaaaaaaaaaagaaaaaagaaagaaaaggaaaagaaaagaaaaaggaagcagttgaatgcagaattctagattttactgttttcctaatagtttacaagtctcacttaaggtacgacctgcatgtattagctattgcataccgagtgttcacacaatgcctctctcacacagagtcatgatgtgtcttggtattcagtcggctacacaatcacaataactagtggaaatggcatccgtggcctgggcgcaaacaactggctcctgaggaccgtttagtccaagggtggaagtcgcagaacctggcgcctagagtggcctgcgggccattcagcccatgggagccaggatgagttgaattcgcttcacaaagcaatggggcagtttcaacaacccagmgcggccgcggccgagggggctgtgaggggctggctgtccatcccctccaccacccaatttgatgatccccacaaccaagacagggctgagctagcagagagcaacagtgagttctaatacagcaaatgcagcagacactgggttctattcaggttttcttattctcatgtctatcccatgagcataaaaacgcaattaactagcgtatacgtaggttaagcatttactgggagcgcaagccgagcccttttattggcaggatgcacaaatggaacggctggagaggctgctgcaaggggcgccccgtccccactccccgctcccccgtttctttgcttcccggacgccgtcctttaccccgcagtccgctctgcctgagaccccccgatagaggagctgcacccacgcccaagaccgattcactgggcgcgggcgcccaggtgacagaagccgggcccacccgccccagcgcggccacgtgcccgccgggccctctagggacgcgccccgccgccccgcatcgccacagtcacctccggctcgggctcaggctccagttcgggctcagaccgccgcttctccggccgcacgctcggcgccgccgtgcgccccgcaccccgcgaacccgccatgccccaccgggcgccggccgccacccgcannnnnnnnnnnnnnnnnnnnnnnnnnnnnnnnnnnnnnnnnnnnnnnnnnnnnnnnnnnnnnnnnnnnnnnnnnnnnnnnnnnnnnnnnnnnnnnnnnnnnnnnnnnnnnnnnnnnnnnnnnnnnnnnnnnnnnnnnnnnnnnnnnnnnnnnnnnnnnnnnnnnnnnnnnnnnnnnnnnnnnnnnnnnnnnnnnnnnnnnnnnnnnnnnnnnnnnnnnnnnnnnnnnnnnnnnnnnnnnnnnnnnnnnnnnnnnnnnnnnnnnnnnnnnnnnnnnnnnnnnnnnnnnnnnnnnnnnnnnnnnnnnnnnnnnnnnnnnnnnnnnnnnnnnnnnnnnnnnnnnnnnnnnnnnnnnnnnnnnnnnnnnnnnnnnnnnnnnnnnnnnnnnnnnnnnnnnnnnnnnnnnnnnnnnnnnnnnnnnnnnnnnnnnnnnnnnnnnnnnnnnnnnnnnnnnnnnnnnnnnnnnnnnnnnnnnnnnnnnnnnnnnnnnnnnnnnnnnnnnnnnnnnnnnnnnnnnnnnnnnnnnnnnnnnnnnnnnnnnnnnnnnnnnnnnnnnnnnnnnnnnnnnnnnnnnnnnnnnnnnnnnnnnnnnnnnnnnnnnnnnnnnnnnnnnnnnnnnnnnnnnnnnnnnnnnnnnnnnnnnnnnnnnnnnnnnnnnnnnnnnnnnnnnnnnnnnnnnnnnnnnnnnnnnnnnnnnnnnnnnnnnnnnnnnnnnnnnnnnnnnnnnnnnnnnnnnnnnnnnnnnnnnnnnnnnnnnnnnnnnnnnnnnnnnnnnnnnnnnnnnnnnnnnnnnnnnnnnnnnnnnnnnnnnnnnnnnnnnnnnnnnnnnnnnnnnnnnnnnnnnnnnnnnnnnnnnnnnnnnnnnnnncagcctacggggtgctgggtcggcaactattaggagaaagtcaggacttggcacgtgaagtggagggcgttgctgtagtggaacaggaaaggcagtggaaacagtaagacgtcatgaagcttcaggttgatctcaagcccgtttccgaatcccaaatctgggtttcccaagaggagttttgtttttcattccttatggggcatctttattcgtgtttctgtcttcagttgcctggcagcaggcttgtttacatggtccgaccctgcaagaccggacagctccggtttgcagaagtaaatcagtgattgtctggagttggagatcagaatctgctgttcacatcccggctgtgacgtcgtgtccggtgaggggcagagccaccgcctgcggctggcaagtgatgacctgaagaagggccacactggccgagtggggtgactcttgcttgtaatcccagcactttgggaggcggaggcgggtggatcacttgaggccaggagttcgagaccagcccggacaatatggcaaaaccccagctctactaaaaatacaaaaaatttgccgggcgtggtggtgcttgcctgtggtcttagctacttgggaggctgagataggaggactccctggacctgggaggcagaggttgcactgaaccaagatcccgccactgcagcctggcaaagagtgagaccctgtctaagaaaaaaaagaaaaaaaagaaaggccactgatcattgggagcttttggaggcaccgtgaccggcagggtgccaccaagcatgtgtggcctcccaggagctaagaccccagagttcttcaggctctgctgagtgcctcccatttgcacagcctctttatgctgttaggaatgaagaaaagtctaaactgaagctgccccaggcaggaggccaggttttctgcttcttgggtttactgaggctctgctttacctacagagtgtttggaaataaagagaagactggaaatctttgctcttgttagaaacactttgtgtttgtcccgctgacacctctgtgttggccttcccatccccaggtcccattaaggcacagtgcaccttcctggaggctggcttcatttcaccatctcttcattctagaccttggattcttgtgcaaaggaaatactcccatgtttctgtcttcttttatccgtctttttcttttttcttttttttttttttagaccgagtcttgctctgtcacccaggttggagtgcagtggtgcgatctcggctcactgcgacctccacctcccgggttcaagcaattctgcctcagcctcccgagtagccaggactacaggtgcgtgctgccacacccggctgattgttgtatttttagtagagacggggtttcaccacattggacaggctggtctggaactcctgacctcaagttatccacccgccttggcctcccaaagtgctgggattactggtgtgagccactgcacccagcccttcttctttttcttattccccttaatcctcagaagttaaggggaataactcccccattgggggaggggcatccgmgattatctgggatattctaagcttaatcctactagcgtgatctgtcctgtcccgtaatctgcttgctgtttctgcttaaagattatgaggcatgtgggttagggcccaktgtacccttttttgggaccgaggcatgttctgggcagggcttttgagcaaggaaggcaggtgtgatgaggcccgtggccagcctccactccactcacaggtgcaccacctgtggatctgttctccctggggagggatggggagccaactggaatgtgagtgtttggttccacctggtcagtatgaagtggcaatggttggtgcaggacgtagcactgggggcgagcatggcaatgagacagaaacactgacttaaaactggaaggaagcccttctccargccgcgcagggggctgcagagctttccggcgctggctgcctggcctggagaaaggaggtgatcatcccatcctgtgactttgagagcactcacacaagccctgaggactccctgtcagcagagtcccaacagggcaccctcccacaaatctactgcccaggcccagctggctctcggaggccttgagaaggccctggtgctcttgctctctgctgccttctctgggagagtctccttctggctcagagtcttaccaccattctgccaagaaaaaccctccctatttgacacaagaagatgaggcagaatcacaggcatggtgactaactctcaaggctgaataacctgggggagaccgaggcccagaaactggccagtaactttactgagcctggccaggaatgggaccaggtctggaccaccattgcacgtcccctccctggcctgagatcaggactcccactgcagccactggaggcagaatgccgggtcactgcccaggagaccccattggtggggactgtggcagctaccccatccctgtgttgtttgatttcccacccccccctcccaagaccctcattcccatgagcaccccacccacacaggcaagggccttgaggggacccagcaagtcgtggaggacagcacagccttggagaggaaatgtgtcagccacaaggttatgatcccggggatccacataagagcatgggcgtgcacgtgggtggtcctccctcagccagcttctcaacagcttctcccaaaggtacacctggatccagtaccactgagacccaaagacggggttgggggactgaatacctggactgacaggcacctccatagaactgagacccatgagacccgggacccgcagcctccctgccccgtgccctggtgccggccctcagcccagcttcctcgtctgcatgcagcagctcctctgtccaccagcrgaggctcttctagggccttgctgggctgcagctgactcaggagggcaacagcctcttcagagaatttgacagcatggagaaccaaacaaaagcagaaagtgaagcctcagaactgggttcaccatcatcccagttttttacaagctatgattttgtcccatctttattaacaagataaggaagtatgaaaartaatctcgacatctgagatggtgagattacagccccaggagccacccagctggctgaggagcctgagaacaaggcacagccacatgacctgtgccagacaaatgctagaatgatggtcacgcaggttagaacgaacccaggtagacggaggcctcaggatcagggtgaggccagagggggcacctgggtgcaaaatttaaggaagcactttttgttttttagataaggtctcgctctgttgcccaggctggagtgcagggctatgattgcagctcgctgcagcctctgcctcccaggctcaagtgatccagtcacctcagctgagtcactgggactacaggcttgcaccaccagacctggcttttttttttttttctttttaaggttttagtagagacagggtctcgccgtattgcccaagctagtctggaactcacgggctcaagccatcctcccatctcagcctcccgaagtgctgggattacaggcttgagccaccgcgcctggccctgaggcattcctttttaagacctacctgcattcggatggcgctgggagtgggggcctccttagatgtgggctcctggatgcttctctgtcttcacctggccccagcctcatgggtgcagctggaaagactctagaaggatgtgctgaaaccctggggctccctgagactgagtgagctggaggtcaccaaggccctcggcctatcgcgggagagagttccattgaaagccagtggtcaggtggccgctgtggagggtctctgggtggacaattgggagcagagtggtccctgcagtgaggcagggggcagggcgtgaggggtccctgaagtaaggcagggcagggcgtccactcataagcacacgaggagttgcagaagcagagccgacctggccacgctcagtcactcagaccctggccacagatcgtgtccggagctcccacggcaggcagggccacccctgcttccctggttctgagagccgccaagacccagcaggcccactggccccaccctggaagatctggtatttggcccaagatgctggaggccccacagcagcagctgtgagaagtgctgcagggtctggagggcctgatgtgtgcccggaccatagtgcctcctggtgtggccataagaaggcacacagctggggctggtcgtggtggctcacgcctgtaatcccagcactttgggaggctgaggtgggcggatcacgagatcaggaggtcaggagattgagaccatcctggctaacatggtgaaaccccgtctatattaaaaaatacaaaaaactagctggacgtggtggtgggtgcctgtagtcccagctacttgcgaggctgaggcaggagaacggcgtgaacccaggaggcggggcttgcagtgagctgagatcgcgccattgcactccagcctgggtgacagagcgggactccatctcaaaaaaaaaaaaaaagaaggcacacatctgtcctcatacagcttctgtgcatagcacagaaaaaattaaaaaggctctgtgctgtagcctcctgtgtttcctctgccccggatggtgtggtggggggggtgcggtgaggaggggcccagggcacagaagggctgagctgcagtggcctcctggggggaggcagatgcctccggtgccccatgcccacccaactccacaggctagtgtttgctcagtcctttattgagggaccagggatggacagcctggccctgaaagtctctcagttttggaggagtcagcctgtgtgcagggcgagctggagaggggtcggtggggctcacagtgccttcccagaggaagcaagcagctcccatcgggtatattgagggctgttggctccagggtctcctcaaggtctggcaggtggaggggaggctgtctaaggaaaggaggtggtcccaaatgtctcaaggcacctggcagcaagggctgctgctgcctcagcctcctccctgtgaccctgtgggccatggtgagcagcagtagccaccacacttgtgcacggcagccagtgacgagatgtgatgagagatgagggcgattgtgctgctcttggtccttgtgtggcgagaacacgctggaagctcctccagagcggaaacaagaagagtgtttatgagaaaggtgcgggtggctcagatgtggacagaaccagaccagggaacggggccacaaagtgagccactttgtctgcacctgctcgcgcttcctgcctgcctcactgcttccatgccctgactccggtggtccctgctccccacacgtgggccacagctactcacacacgcgctccctttgctcctaaagcctatactcccgggacccggagagggaacagccggccagccgagcccaggagcccagatcaccggtcagcagatacagctttgacttggcaggaggctggaacaagaggcttgtggcctgggctgtggggccaccttgtagaatacggcactgttcacgttttgggccagggagccctttgagaagatactcagagacacagacactttctatgtaaggtgtccctacaggcaggatctcacacacatttcaggtccttcacagtgctgcagaaaatgaggccacaggctccaagtttactgcaagctgcggggtttgctgacacctacacttctcagcgtgtggcatctcgcaccagccaggggcctcccatttccagtggcaggttttcgtgatatccagttatgaccggtgactcctccaagaggtgcctgtggtcagcagaggagggaccttgttccactgaggcaggaagatgagagagacactgggttctctgatgggttcaccagcagaccctgtgaaattcataatggcccctaaggtaggggttgcctgacatgttcaacttggatttaacccttaaggcataagaagccgctgaaaatgttcagacgttacaaaactagggccgggcacggtggctcacggctgtaatcccagcacttcgggaggctgaggcggttggatcacctgaggtcagcagttcaagaccagcctgaccaacatggtgaaaccccgtctctactaaaaatacaaaaaaaaaaaaaatagccaggcgtggtggtgcgtgcctgtaatcccagctactcgggaggctgaggcaggagaatcacttgaacctgggatacagaggttgcagtgagccgagattgcgccgctgcgctccagccacagagcgagaaactgtctcaaaaaaaaaaaaagaaagaaaagaaaaaaccggcgaggactgaggtaaaccacaaaattgtccaggctttttatgtggagggaatttgcagactcacgtgcagagaacccaacaaacccagactttggggcagctgaggcagctagaatgtgtggggtgtggtaccagaaaggaaggagttacgcccaaaacaaagagctccagcaatctgcgtgtgagcccgcttgcatcttgggttggatccgatttgctggtgcacacagtgaaacctcgtggagctggaccaagagcaacttgaaggggaagagtaagtgtaaggggacagatgagcaggactcacacagggccgtggttatttcagttcccaccagccagagtatagaagccactttaaatacaaggagctttcatgacaccttagaggaaacacagcttggaagtggcgcagaataagctgcagaggaaaggccactccaatgccgtggaaacaagtgcaaggcaagccctggaaacaccactgcctgctagcacggagtacacacagcactcttgagagaaggaagccaggcgaagtggctcacacctgtaatcccagcactttgggaggccgaagcaggcggattatctgaggtcaggagttcaagaccagcctggccaatatggtgaaacgccgtctctactacaaaaaattagccatgtgtggtgatgggcgcctgtggtcccagctacttgggaggctgaggcaagagaaccacatgagcccgggaggcagaggttgcagtgagccgagatcgcatcactgcacttcagcctgggcaacagagcaagactccttctaaaaaaaaaaaaaaaaaattcacgtccagaatctaatcagtcatgggcagacaagccaaagcagaaaaatggacttgtcactggagggggtccagtagcaggcccagttttgataggattagccaacaaagacagtaaacaattataaaaatgttccctgtgctcaaagaaataacacaaaaatgtgactgagggctgggcgtggtggctcacacctgtaatcccagcactctgggaggccgaggcgggtggatcacgaggtcaggagatcaagaccatcctggctaacatggtgaaaccccgtctctactaaaaatacaaaaaattagccgggcgtggtggcgggcacctgtagtcccagctcctccagaggctgaggcaggagaattgcttggacccgggaggtggagcttgcagtgagccaagatcgtgccactgcactccagcctgggtgacagagcgagaccccgtctcaaaaaataagaaaacatgactgagaaatggaagatacagaaaagaagcaagttggacaaaatgtcactggaactaatctcccaagtagaagaattccacattgtttactgagatagttccccttcgaggaggtgatgcttaactcctcactccagaagcctgggctttacctagtgaccctcttccaaagagcagagcacagaagcaggaggagcagctttccagtggagacctccagcaacacagcctcaccagggaccatgctcaccatcagcagtgacatgcgtatcactgttgtgtactctttttttttttttttttttttttgagacggagtctcgctctgttgccaggctggagtgcagtggcacaatctcggctcactgcaacctccacctcccaggtccaagcaattctcctgcctcagcctcccacgaagctgggactacaggcacccgccacctcgcccggctaattttgttgtatttttagtagagatggggtttcaccgtgttagccaggatggtctcaatctcctgacctcgtgatccgcccaccttggcctcccaaagtgttgggcgcgtcagccaccgcgcccggcctgttgtgtactcttgataggatgatgagaacagcactctacctctttgatcttcctcccaaaaacatacgtaaccccagctaatgatgaaaaaacatcaaacaaatccaaattgagagacattccacaaactgtttgacgagtcctcaaaattgtcaaggttctcaaaaactaggcaagtctgaaaggtgccagagtcagtgggactgaagaagatgtgacaactggatggattttggatgatgtcctggagcagaggaaggattgggtaaaaagctaaggaatctgattagaatgtgsgtcctagttaacaatgtgtctaatgttcttgagacaactgtaccacacaaaggcaggatgttaatgatgggggacactggtgtagggcatgtattctaaagtaaaaaggtggttcttcagagtcaccggagcggtttaacaaaacattagaaacttcagaagaaaagattcctgaactaaaagcaatggaaactgtccacagtgatgtacagggagaaaaaggactgcaaaaacttagccgagcttcaaggacataatatcatgtggtctaacgtatttgaggttccagaaaacagtggggaagagaatacagaaatatgaccaaaaggctggacacggtggctcctgcccgaaatcccagcactytgggaggctgacatgggtggatcgcttgagcccaggagttcaagaccagcctgggcaacatagcaagaccctgtctctataaataatacaaaaattagccgggcgtggtagtgcctgcctgtggtcccaactactcgggaggctgaggcgggaggatcacctgagtgcaggaggtggaggctgcagtgagccatgatcgtaccactgcactccagcctgggcaacagagccctgtctcaaaaaaaaaattatggccaaaatttttcccaaatttttgaaaagctgtaagctcacaaatccaagaatatcagtcttaagcaggataaaaccaaaaccatatcaaggtacattatataatcaaagtgctggaacaggctggtgaagagaaaatcttaaaagctccagaagaggccgggcgtggtggctcacgcctgtaatcccagcactttgggaggccaaggcgggcggatcaccaggtcaggaggtcgagaccatcctggctaatacagtgaaaccccgtctctattgaaaatacaaaaattagccgggcgtggtggcgggtgcctgtagtcctagctactcgggaggctgaggcaggagaatggcgtgaacccgggaggcagagcttgcagtgagccgagatcgcaccactgcactccagcctgggcgacaaagcgagactccgtctcaaaaaaaataaaaagcatccagaagagccgtgcacggtggtggtgcctgtggtgccagctactcagaggctcgggtggmaggattgctcccagatggggcaacatagcttggccaacatggtgaaaccttgtctctactaaaaatacaaaaactagctgggcgtggtggcaggtgcctgtaatccccgctactcrggaggctgaggcgggagaatctctggaacccaggaggcagaggctgcagtgagccgaaactgcaccattgcactccagcctgggcgacacagcgagactccgtctccaaaaaaaaaaatttttttttgcaactcaggaagacaaccatttaaaaaaaataaaaggcaggccgggcgccgtggctcacgcctgtaatcccagcactttgggagaccgaggcaggcggatcacaaggtcaggaattcaaaagcagcctggccaatatggtgaaaccccgtctctactgaaaatacaaaaattagctgggcgtgatggcaggtgcctgtagtcccagctactcaggaggctgaggtgggagaatcgcatgaacccgggaggcagaggttgcagtgagctgagatcgcgccattgcactctagcctgggcagtggagcgagactccatctaaaaaaaaaagataataataataataaataaaacgcaagtggctgagcatggtagctgacacctgtaatcccaacactttgggaggccagcgcgggtagattgcttccactcaggagttcgagaccagcctgggcaacatagggagacccatctctacaaaaaaaaatgagcctgatgtggtggtgtgctcctgtgggcccagctacgcgggaggctgaggtgggaggatctcttgatcccaggaggtagaggttgcagtgagcccagatcgcgccactgcactccagcctgggtgacaaagcagactctgtctcgaaaaaacatacattgaaaaaggcagaagatttgaacagatacatcaaaaaaaagatagacaaatagcaaataagcacttgaacaggtgctcagcatcgttcgttgtcagaggaatgcacacgaaaaccgcagcgacagcgactagaacagccaggtgctgaggagggtgcggagcccctggaactcacccgtgctgctgagaacacaaatgctgcatccgctttggaaagcagcttgggagttgcatgtgaaattcagcatttaccacacggccagcagttctgctttggttattctactccagagtttccactgggggtcctttatgatttcgtctcttctatcatttttttggtatagatgggggtctcgctatttggattattgttgcaggcgtgtttggggtttttgagtagtggtagtgtctgaggtcagtcagggttgttctggccccagcagggctcttcgtagcttttcctgtgcaggtgaacaagcctgcggtttcacttgtttctcttaacttagaggagctgttgttcccaagagcagtcttgggctgaactttcaaataaaatgagtttcctcagggagcttcagagctctttccttatggacggcctctctccccaggctgatttctctgcaccacccttctgggcactgggtaagacagcagcctctgatcttcttggcctggctttcccagcatgggtgctctaccctactgttttaacctagaaagcctgaactgtatttaaaacttgtggtttttaaggccaggcacagtggctcatgcctgtaatcccagcaccttgggaagccaaggtgggtggatcacttatggtcaggagttcaagaccagcctgaccaacctggtgaaagcctgtctctactaaaaatataaaaataagccgggcgtggtggcacatgcctgtaataccagctacccaggaagctgaggcaggagaattgcttgaacccaggaggcggaggttgcagtgagccaagatggcaccactgcactccagcctgggcgacagcgagactccatataaaaaataaaaaaaaaaattgtggttttgaaaatgctttaattaggtgggagctgtggggagggtgatcagagacctgggtgtcctcagcctgctgtggcgggggtagtctcctctctgaggcttgggcaaggtggaggaagggagcccctggcttcttggccacgtgcaccaggatcttagtctcttcaacttggagtcggtgaggatgtgaaactctggtggtctgcccagcccatgagatccaggaaaccttatttgggaattgaggggagaagggtccccatcttcctgctcccctctccctgagtgtagtacccatcatggtgagctggggtgagagggaaagaggaggctgaggctcagatgccaccaggcttaatgttcgtaccaggtgtcagtagattttactccgtaagtgttcatctgttatatgcgtttaggacagttttgagactttaagtggtttaagctttgcttgtttcacaggaagtacttccatgaagttcctcacattgctgttccagaagtggaaatctctccattttcaaagcatagctttgccggatattgaatttttatgttttgtagagatggggtctcgctatgttgcccaggctggtctccaactcctgggctcaagggatcctcctgccttggcctcccaaagtgctgggattacaggcatgagtaactacacccggccaatatacaaagattgagtggcagggtcttttattttaatgcttttattttatttgttttggtttgtttttgtttctgtttttttggagatggagtctcgctctgtcacccaggctagagggcagtggcacgatctgtgctcactacaacttctacctcccgggttcaagcagttcttctgcctcagcctcccaagtagctgggattacaggcatgagccacgacactaaaatttttccatttttagtagaggcggggtttcaccatgctggccaggctggaactcctgacctcaaacgatccacacacctcagcctcccaaagtgttgggattacaggcatgagccaccacaccaggcattttaatccttttttttttttttttattgagacagagtctcactctgtcccccaggctggagtgcagtggggtgatctcggctcactgcaacctctgcctcctgggttcaagccattctcctgcctcagcctcccgagtagctgggacagcaggcgcccatcaccacgcccggctaattttgtttgtagtagagacggggtttcaccatattggccaggctggtcttgaactcctgacctcagataatccgcctgcttcggcctcccaaagtgctgggattacaggtgtnnnnnnnnnnnnnnnnnnnnnnnnnnnnnnnnnnnnnnnnnnnnnnnnnnnnnnnnnnnnnnnnnnnnnnnnnnnnnnnnnnnnnnnnnnnnnnnnnnnnnnnnnnnnnnnnnnnnnnnnnnnnnnnnnnnnnnnnnnnnnnnnnnnnnnnnnnnnnnnnnnnnnnnnnnnnnnnnnnnnnnnnnnnnnnnnnnnnnnnnnnnnnnnnnnnnnnnnnnnnnnnnnnnnnnnaggatggtctagatcttttgaccttgtgatccaaccaccttggcctcccaaagtgctgagattacaggcgtgagccactgcgcctggccggctcctccttcttattccttctgtctttttttctcctactggagcacctcaattgactgatcttcatgtttgctgactccttcttctcctagtcaggtctgctcttaagcccctctggttaatttttttttttttttttttttttttttttgagacggagtctcactctgtagcccaggctggagtgcaatggcgcgatctcggctcactgcaacctctgcctcccgggttcaaacaattctcctgcctcagcctcctgagtagccgggattacaggcatgagccaccacacctggctaattttgtatttttagtagagacggggtttctccatgttggtcaggttggtctccaactcctgacctcaggtgatccgcctgccttggcctcccaaactgctgggattacaggcgtgagccaccgcgcccggcccctctggttgacttttaatctgagttattatactcttcagctccataattttgatttcgtgcttctttacaatttttatctctttattgatactctctgataagatgtcattctcatactttagttcttcagatgtggtttcctttagttgtttgaacatatttgaaatgattgacttaaaatctttgcctcgtaagtccagtgtccaatgttttggcttctttggggacagtttctattgattgcctttttttttttttcccgtgtatggggtatgggtcctagcttcttgtttctttgcatatctctatttttttttttaactagagttttttgtttgtttgtttgtttgtttgtttttgagtctgttacccaggctggagcgcagtagttcaatcacagctcactgcagccttcacctccggagctcaagggatcctccctcctcagcctcctgagtagctgggatgataggtgtgcgccaccacgcccacttaatttttgtatttcttctagagacggggttttgccatgttgcccaggccagtctccaactcctgagcttgagcaacccacccgcctcggcttcccaaagtgctgggaccgcaggcgtgaaccagcgcagccggctggaaaactggaactctcatcggttgagagtggcagctctggagctcggactcccccacctccccaggatttgtcattgctgctgtttgtcgtggttatctgtcaggtagcttttcggcactaattctgtaaaggttgcgttctttcttgtttatggccactgccgtctctgttcagttaactgagataggtggtgatggggcagaaatgttcttgaatgcctggggccagtgagtctcccgtcttttccgggggctgtgtgtgtgtgtgtgtgtgttggggacgccttcagcacttggccaggcagtggacaacccaactgtatgcctgacttcctgcttacacagagcctcaaggtcagccagaagtgagagctcggggctggctcaggtctttcctgagcacgggcacggctcacacgtgtacacggctgcgagatgtcctggaatatctcagagcttttcagagcccctagtggcacctccttctccccagctgccaggcactgcctcaggcagccacagcgttcaaaaatcacctgtaaaggtttcaacaggcacacctcggcaaacagcttttttattcaggagagcttcaagtcaaatcagagacagccttgggagtggactcttaggtcagatgctgacagtcctctgggaatggggccctggaggagctcaagccctggcccaccccgcagcggctgccaggacgctgttcccacggggactgcagctgttggtttttaaggctgcagatggagtgggaatagggcatgtaaaatgccacaaagcctggctgggcacagaggctcacgcctgtaatcccagcactgcaggaggccaaggtgggcggattgattgaggtcaggaattcgagaccagtctgggcaacatggtgaaaccccatctctcctaaaaatacagaaatgagccgggcgtggtggcgcctatagtcagctactcgggaggctgaggcaggagaatcgcttgaactcgggaggctgaggcacgagaatcgcttgaactgggaggctgaggcacgagaatcgcttgaactgggatgcagaggctgcagtgagccatgttggtgctggtgcactccagcctgagcaagaccttgtctcagaaaaaaaaaaagttcacaaagcccactgttcttactaagattcagctgtttttcttgaataaatgctccccgtgctactgtaattctttggttaactttcagagttctggaaagttggcttggcgctttycgccgtctctctcctgctgccttggggtcctttccgtgaccgtttccctccctgacacgtgtacatccctgtgtatttcacatctctctatgctggaaagaggttctccacttctagtgccacaccacgggggtctttctggctttttccctgtttgcatctgcagctcccttccctggcagggagaaacctgccccactgcccttcaccagtttcttcactgagtcagccrccccttcctatgcagacacccctcacccctctctggccctgcttcaggccccccttccccgccgtgtgggcttctcgctgtcccctaagccttcgatgtcccctctgagccaccgcggccacggccaacagggatgcctccctcaccagcgcctcctgatagctctgggcctgagctcggtagagaaatggaagaggaaggtatatgcagtgtttgactgtctctgtttcttgtctcacgtcacaaaacaagactgaatttggatttctgaacgcgactgtgttttcctcgggagtaatgaaattagggctccatttccttcgctgttcccaagggaaaggtcctgcttaaacaggtgctttgtgagtggaaacgtggccagagtgcggcgggtgctttgtgagkggaaatgtggccagagtgcggcggatgctttgtgagtggaaacgtggccttctctggaagccctggggaggggctttccgactgagaggaaggcctcgcatctgcccaccgcccagtcctgggcctcacagtgaggatgcaggtcacgctgcacagatgaggccmgtgtggcaggtggtcccaggaacgaactcgcctcccgccagccccmtgggcctcccatggccccagccccatcaggtggaacgtgcactgcctgcgtttcagaaggggcggcctggggaaggggcggcttgggcacgctgcccctcaccaccacgcgtgacccacccatgtgtctccctttcagagcgggaacagcttccacgtgttcgaccagggccagtttgccaaggaggtgctgcccaagtacttcaagcacaacaacatggccagcttcgtgcggcagctcaacatgtgtgagtgctgcctccaggcagcgcaggggtgcgggaggcagacctgcagatggcgggaccccagcaggaggaccctgtgatgaaggacggggcgtcctgtgctggccaagggcatggcgtgggaccctgcaagcctgggggccggggagcagccgcctcttccatgggggagggtccttgtgggtatgaacctggggtccccatggaagaaccgtgaagccggagctgtactccacgtgtgtcgggcgcagggagccctgtggggacacagggtctcccttagaccaaggccactcggccacccaggcatgggctctgagggggcagggcagggtctgaccatggccaagccccgcagcagcctcctggagcagtggccgctcttcaggggttctggtcccgccctgaggcagagctgcccccttccctgttatgtgcagatggcttccggaaagtggtccacatcgagcagggcggcctggtcaagccagagagagacgacacggagttccagcacccatgcttcctgcgtggccaggagcagctccttgagaacatcaagaggaaagtgaccagtgtgagtgccggccctgcacccttgmccggtctcacctgccacagctctccccgcccgcccctccctgagggctcccaccccagcctgccccttcctgagggacctggctgcagtggacgagcctgagcctgccaagctcctaggctgctccagtgactcctgtccctctcgggaatccaggtgtccaccctgaagagtgaagacataaagatccgccaggacagcgtcaccaagctgctgacggacgtgcagctgatgaaggggaagcaggagtgcatggactccaagctcctggccatgaagcagtaggtcccacaccagcattatgggccacagcgggtcctggcgcccaccaagaggccccgggtgctgtgggggcagggccctgaccggggccaggtgctcagctccaccctcccgctccacgcacatctaccctgggcctctgccccagccccgccgcccgtggctgctgcaacagctctggggccagccgttttccatgtgcagaagggggttgggagggtcccctgctctgcacatccccagcgccctctgggccattggcttctgcctggctccgagcttggcgggacccaccagcctacttttgaggacaagccttgcacagcagacccgtcccacccgcctcgggcctggggtcagacccacctcaggcccttcctggaaccgctgtcccacactcgcctgggcccatggagctagcccccagcccctcctcaccgggaccctgcggctctggggaaaccttagcaggagcctaacacacggtggcacctgagaaactgaggcaagcccacctcggaaggccagctcaggtctcacgtccactttggggctccaggcatgcgggaaccccaatgccagtacggcttcctcggctccgtgcagcaggcgctcttgacccccacgtcatggaggaggccttggcctcagactctcctgcatggggtctagcaggagccaccggctttgtgattcctggagtccggccacgtggacctggcctaccaagaagactcacaggcttgacagggcccagcctcccagagcagcaggagcgcggtcatggccctgctcacctggctggggacagctcttccccacccctgagccacctccaggcctggcgagggccctgagcacctacaggacatgggacagccagtgtcgcagcctgaagaaccgtcctcccttaacctggctgctcaggccttggaagggcggcccaagggtctgctcctggcctgtgtccaaggcagccctccaggtgtttgccaggatggatgccaggatccgggtgcacctggctcgcatggatccatccccaacaccctacgtgacaccaggtgtccccggcagggaggggcagtgggaccagcaagccctggccctggcccccagtccctccacacacaagttctcatcctggggtgggccaggccagacatggtcacacttacccctgctcctgcatgggggacagggagggtctgtggggctccctcagccctggggctcatgggattgggccccactgacccagcctggtctgttgcagtgagaatgaggctctgtggcgggaggtggccagccttcggcagaagcatgcccagcaacagaaagtcgtcaacaaggtgggggcagggccagagggccggcgggggccccacaagggccggggtaactgtgtcctctctctccacagctcattcagttcctgatctcactggtgcagtcaaaccggatcctgggggtgaagagaaagatgtgaggttttggggatgcctgcatccaccacccggggcccagggctgtcccccttctctgtcagctgtgccccgggtaccccgaggtggggggtggtggctgacctgcacccttccccacagccccctgatgctgaacgacagtggctcagcacattccatgcccaagtatagccggcagttctccctggagcacgtccacggctcgggcccctactcggtgagtgccggagacagggcacccgcccaggcatgcaggcggcagtggggtgggttgcccctgccggcactgcatggacctcctgcctttgattgcaggccccctccccagcctacagcagctccagcctctacgcccctgatgctgtggccagctctggacccatcatctccgacatcaccgagctggctcctgccagccccatggcctcccccggcgggagcatagacgagaggtgggggccgcatcaccccagccatcctgtcccccaatgaggcgagcccctgtgggcccagggcagagttggggatgaggtggggctggccgagacgccagctcacctggcccccctcgtgtgcaggcccctatccagcagccccctggtgcgtgtcaaggaggagccccccagcccgcctcagagcccccgggtagaggaggcgagtcccgggcgcccatcttccgtggacaccctcttgtccccgaccgccctcattgactccatcctgcgggagagtgaacctgcccccgcctccgtcacagccctcacggacgccaggggccacacggacaccgagggccggcctccctcccccccgcccacctccacccctgaaaagtgcctcagcgtagcctgcctggacaagtgagtgccgcccacccctggccccacccacagcgcctggacgcacagccctgggcttcagccccgactgtcccagtggactgagcagggcagctggcgaggcaggaccctacccccaacctcggggctcggggctggggagggagacaggtgccagccagatcaccccacagtcccaaacgccacagaagccacgggcatgtccggacaggctgccgggccctgctctcagccacccctcctgctgccgccaccctcgccacaggccacgggccctggcaggtcgtgctgcccagacacatggcaggagatggtgagcagggccggcctccacacccccagcccctgcctgcaatgggggctcttgtttttgtatcttgcagtttggctcgcactccacagatgtctagggtcgcccgcctcttcccctgcccctcttcctctccgcatggccaagtccagccagggttagcgctgaccccactggggagggaggagggctctgccagcgctcgggccctcccacacagccgtggaccagacccagcctggccgggcatgagcgtygggcctgggcggcagcagccgagacccctctgtggcgggggctcagtgtcgtcatggctcccctggccacgggcctgtggtcattgcctgtgacagggatgacagggacaggcctccctgctctggcacggcctctggtgttggcaggatccagactgcggtgctgactgcacttcctgtcaggcagggtctccagggcacctctgggacccagcctggctgtccgtcccatagcccaggtgtgccctgtggcctrgggctttcttggtcacagccaccagaccgtgggtctcatccccacagcagcaccagggcagggactgagccacccacacactgagcagagccccacctgttttcccagtgcaacgggaaacctcaccaaccctgaacactgaaatccctgatccttgtgctggagctgaatacgccccttgtctcctgggtccactgccaccaaggcccccaggccctcatggcaaagggatgcccagcataggcccagccgcacccctgcagggcacagascctccactgccttccaggccgtcctcgaatgcgctgccccctccagcctgtgcaggcgtacacgggggtgcagcctggggggtacagtcaaggggagcccttctcccacaggagggcattggggtgtggggcctggggcactggttcaggtaccgccttatcccgggccaggaatgagctcagtgaccacttggatgctatggactccaacctggataacctgcagaccatgctgagcagccacggcttcagcgtggacaccagtgccctgctggacgtgagtggagccccgccgccccgcckccccgccccgcctccccgcgcctccccgcctccccgcctcgcctcgccgcctccccgcctccccgcgccgcctccccgcctccccgcgccgcctccccgcctccccgcgccgcctccccgcctccccgcttccccgccccgcccccgggtgctgttctgacttccctccctcctccgcagctgttcagcccctcggtgaccgtgcccgacatgagcctgcctgaccttgacagcagcctggccagtgtgcgtaggcgggcggggggtgagggggaacgagaccagcgggagtgctcacaataccgtctccaccccacagatccaagagctcctgtctccccaggagccccccaggcctcccgaggcagagaacagcagcccggattcaggtgagccaagtcccaccggccccacctctgcccccaaccccccaccgccttgacacccccacccccgcagggaagcagctggtgcactacacagcgcagccgctgttcctgctggaccccggctccgtggacaccgggagcaacgacctgccggtgctgtttgagctgggagagggctcctacttctccgaaggggacggcttcgccgaggaccccaccatctccctgctgacaggctcggagcctcccaaagccaaggaccccactgtctcctagaggccccggaggagctgggccagccgcccacccccacccccagtgcagggctggtcttggggaggcagggcagcctcgcggtcttgggcactggtgggtcggccgccatagccccagtaggacaaacgggctcgggtctgggcagcacctctggtcaggagggtcaccctggcctgccagtctgccttcccccaaccccgtgtcctgtggtttggttggggcttcacagccacacctggactgaccctgcaggttgttcatagtcagaattgtattttggatttttacacaactgtcccgttccccgctccacagagatacacagatatatacacmcagtggatggacggacaagacaggcagagatctataaacagacaggctctatgctatggcctccatgtgtttcctctgtcccagggtggtgcggtgggtggtgctgcaatgaggaggggcccagggcacagaagggccrggctgcagtggcctcctgggggaagacggatgcttgcagctagctccgtgcctgcccgactccccaggaccagcatgtgcttgcagttctttattgagggaccaggggtgggcgcctcaccttggccctgggggtctctggttgtcacaggaccaccaggaacccccttcccaaggtgttcgcactcggacaggtgatgcggggcgggcacactgtctttctgccagagccagcaccctgtgtaggcacggggaacgggagcctgtcccgtagctttagggttctccactcagcctggtggaggaagggaagggggcytgcgctgggcagtggagcaggctttgctgctttatctggcagcaacagtttgttctcgagctccactggccaactgatagggagaggcacaggagcccatgtgggatggaggagtcggccccacacccatccccccaccaggagctcacccactactgccatcctcagcagggcccaaggagatgcctccatctcagggcccaccagcccccactggggtagagggaggataccaccaagggagcccaccctcccctcacaccaccagttcagcaggttgctgatgaggcccctggtgcagtcctgggaccctgtgcagggcctcctcaaacacctgccttgttgggccatagctgcaggtctggggacaccagggcctggtccagtcttggggtctttaatcaagcagtcaccccagcaaggtaaggcagcagcagggccctggggttacccctgacctcccgctaccatcaaggggggccccatctatccagcttggtggattgcagggcctgggaacaaggtgtcctgaaggctgcagggctgcgctgtctgcactgcccagcctggtgccagaagagcagagggcaaggcaggcctggggatcaggggtgccccaacctcgtggagggcagctgagagccaccagcccacctggctgcccaggttccaagtgaaggaaagaggctgccaaaccgagccctgccccaaggcgaatagccatggacatagccattgtgtaccgtagcccctcggctcaccagacccacaccagaaaggccctgtggactgcccatccctgggccatcctggctggagcccacttcccgcaaacccagggccgacctcttcccaagctgaagctgagcacggtgggtgcaagttgaccatcctgcactgagggccagagtgccgattcccgcacacccagcaggagtagcaccaggagaggacgcctgagctgagcttttctaggtaggggagtgtggggaatgggggcgtctgcctggccttgcactccccctaccggccatgcccgccctgctgcagtggagctgctgctccccggcaggtcctgggacagctgtccacacagctctggcactcgcccttgtgggtgtggccataccccccaccaggccccaggcccctggcaggctgaagaggtcactggacagcactttattgacaccctcggacccggggcagggtcagcaagactcccagctggcatcagactgtgtctggcctgctgtcgccatccctgaggggtgcaggacagagccccataggggcagagaggcctccctgggaccagaggaggatgctgtgcagccaggcccatccccagcactcgaggcctaggaggagaggtgggctctggcagcgggtgtgaggtggcagtgagaagccaggccctcaggtgcagctcaggcctctgccgctggggcctcatagttgagcacgtagtagtcgtggacgtacatgaggacggcwattggctgtccgatgatgagcgacagccacacagctgcgttgccatagttgccctggaaaaagcggcccacgaaccaggccagtgggatctagggagtgaggggccaagtcagtcggccatggtgaccacagggctgggggcttcagggtccctgggcatggggagggtcagccgaggggttcaggtgcggggtaactgggcgagtgaggaggccacgtgggggtcactcacctgagccatcatgcccgtgaacgcccagaggcggaacattcgcagagggacgctcaccaggtactgagatgggagggagagaggatgccagggagtggggtgtcagccgtccctgctgtgggcatacccctgcccagggatgaggcaagatgccccccagagcactgacctcgtggaagaaggccgaggccaggaacacccctgtcctggccatccacttgctgctgccccgtcgaagcatgggcttgtagaagtgtctgcagaggagggggcatggaaagcggttcaggttcacagccatgttccacatcacacacacacacaccccacctacctgatgcaccacttgtgcacagggatsttccagttctgccagaagtaggtgacagactcggagttcctgggggccaagagaccacagggggatcagagcacaccatggcccatcccagcccccagggacaccccagggacactcaccaccagtcccggtagaactcccggtctccaaactgcatgagctcagccacggcattcaggcaggagtggaagagccagtagaagaagatgagccagatgaggtgattggggacctggcagggaggtgggggtgggcaccaagttctagaaccttcccccacatgccactgtcccctcctgtcctgtgcatgcgccacctgtccgcactcaccgccagcttcaggaggcgctcgatgatgcgtgagtagtccatgtcctgcagaaacaagcccttcagctagccatgctcctggtcactccccagccaccccagctgcaagagcacctgagccactcaccttgaagggcttcatggagttctggatggtggggaccatccactgcaaaggagggcaccacgtcagctcccagccatgcccagctacacccaaccctgccctaccccacttacctgctggatcagccccacctggagctgggtgaagaacagctgggggggaaacagagagcagccagctgaggccctggctagccagaaggccccctagcctccagtggctgcccccagcccccaacctcaccatctcaaggatccgtcgcagcagaaagcgcttccggatgcggggagagcggggaaagttgagctcgtagcacaaggtgggggcgaagaggaagtagtagagatctggaatgggaatggggggttggtaccagaacaggcccagcctgtcccccgcacctcaggcccacagaggtcctcaccgcggtaggtcagattgtccgggtagctcacggtgtgcggggcagcagcactgctggccttcttccctgcagaggctacgagcacagcagagtgggagggggctggtggggccctgctgctgcccagccccccagcaggcagccccagcccctggcagcccctcaccagccttggccctggccctgcggcaccatgagttgacgtcgcggtaggagaagagcttgaggaagaggatggtgtgcgccatcagcgccagcagggagcccactgcaggagaggtggactcaggcctccacagcgccacagccggaggccatgcccgtggctggcccgagacagatgggcagggtgggatgggggcgcacctggagtgatagactcaaccagtaagaccacagccgctgggaaacacagaatggtggccaggttggccacgtgcagcagcagtcccgcctgctccgtcagggcaccctggagtggggagcagagcactcaaccagggctcccattgcctgggagagggctgccaggcctggggagcagctcctcccaggagcgcacacagcagggtgagcacacacggaggtgaggggcactgcttaccaccgccaggcgcytctcaacctggaatgcagccacagcaaagacattggccgctgtggacagaagcaccaaggggcaggtttagggccacgtcagcctgatccccacccgaggccctcctcagagcccagctcaccaataaccaggcatggggcgggccagctatagggatccttcaggaacagagaaaccacctggatggggtccaccaggatgccatacctgggggtggagggatgggggtctgagtgggtggcaggtggggctgtggggcggggcctggacaggccatgggtggggcaggggtgggacctggcaaaggcactcacttgatgaggttctccagaaataaccgggcattgctcaagatctgcgagggatggacaggagggtgcagcccctttagtcctggccacagggtactcaccccagatcctcccaacacctctgggcacgtcccagcccgagctcagggcggcagcctcaggcttgcagacccagccctgtctggtctccatgccaagctctgagactcagcacccacctcagccaacaccagtgctgggtaaggggaagtccctccctgtccccatcacaccagacggtcccacatggagggaaccaaccggccagaccaaccaaccctgccagacgcctgggtcttcaggagcagaaagaccagctgctgatctgctcacatccctcctgctgagccgagccagtgagggacccaaggctcccacagccaaccacaccccagagacagccccagaatacaggcctgcccagggaggcctgcccacggctgagccccaaggaaccagtccctactggtggccaaggctgaagagggggagttgtctactctttctctgcaggagcagtgtccagctgtgtcgcaaggggggctgggcctggagtgcttcccagggcttgtgccccgcctgcctcttctgcttcctgccgccctctaagccttggacacttggctccaaagcaacttcccaggactgagcccccatggaataaggctcttgggacgagcctggagttgggtgcttggcctccctctgcaaggacaggaacctcctcctccatcttacaagcactaccaacacctccattaagctgggccccaatgccgcagacctggctgaccacccggagctcgggcctcatgcggtagtgaactggtgctggggaaaagggtcgctggcaagggaacactgagggtgtcttgcctgggtggtcagggaaggcttcatgagagagaagactgcttcagagacacaagggctactgccccgcctcccccggccgcagggctgacacacaggccttctgcatggacacgtggcccacactgtcactggcctctcccgagggctgacagcaggcagaagccaaagctgccaatggacggtacccacctccaggcccaggccacagaaggaatgcaacaagcagcccagagcgggatacatgcctggggtgggggcatgggggagccaaagcagggaaaaggcttcagggctgggccaaagggccaggcaggcccaaggggttggggagaatacacagtgctgcctgggctggacaaggcccaacctgggccaggaatgggctgcgtctcctgagtgctgggctggcgctgggcccactgtcctcctgcctggccagcttctcagccaccaggactcgtgggcctccacagctggccacccccagggaaccttctaggaccatgggcggtgggggatgtggatgtgcgtggagccccttccacgtgggtagccacaggagcagcacccaaggccagagatagacacgcctgggtgaaggtcaaaggcctcgagccacatcagccctgagttggggaggctgggcccagatagcccttgtccccgacctgccctgcaggtgcccctttgagccctagactccaactacttctggggtnnnnnnnnnnnnnnnnnnnnccaggaggactgcagagtggtggccaggcctgcagggctccatacccacagaggccatgtggcgtagcacaggaagctcttctcacatcccctgccagagaggccttgtgtccacagagcatgcagtccactctcccaccagcccagggcaagaccccctccaccctgccctccctggaggccctgcacccctcaggcccagctcacaacacacaggctccagccaggcactgttcggcctccccacgcccacaccacatcwgcaggrctctcctgggatccaatgggaagcagcaagtatgtggtgcatgggcacccaagtgaccacagcaggggcagccactgccactcccctccccaacagtccagtgctggcagccacatggaggtgcagcctgctccacacaccccagcccacaggggctccagcctggacaccctgggtgacagagcctgttctcaggcaaaggccagcctgggacagagccccacctggacctagacccgctcccgacaccatgtcccactcaccagcatcaccacacaccagttcaggatgccacggtagttgctgaagccactgtcagagctgaataaagaatcctgcaggcgatggcacctgacagagcacaacacaagcaccccctgagtgggcaccagcagggcagcgccacccccgcaggatccaggcccccaccccagtgtcctcgtctgccctcaggccccactccttatttacaaccaggaggagaagccaggcagagccacactgtggcctcaagacctacagtgggcaaagctctccggacccccagagcctgcacctccaggcagcgggacga

SEQ ID NO: 95182 - DNA, 103332 bp, Homo sapiens
  misc_feature (1)...(103332): n = A,T,C or G
cctgggtgtgtagaatgtggtctagaaaggagggcatgaattctgggtggccattcccccttgcccttgtgggctccctaccttgggtggtatgcagctaaaggaatgccagagcagaacttctgcccagctctaagggtaatattgggtcaaggtattaatttccccaagtgctttccttctagattgccttggcctacatgtttccttcaagcaaatgtcatagctcctcttaaaatgaactctctctacagaactttttaattcctcatgtctttggatttggggataaaaacagccctgggggccgggcgtggtggctcatgcctgtaatcccagcactttgggaatgcaaggagggttgatcacgaggtcaggagctcgagaccagactgaccaacatggtgaagccctgtctctactaaaaatacaaaaattagctgggcatggtggcgcatgcctgtaatcccaactacttgggaggctgaggcaggagaatcgcttgaacctgggaggcggaggttgcagtgagctgagatcacgccactgcactccagcctgggcaacaagagtaaaactctgtctcaaaaaaaagaaaaaaaagaaaagaaaagaaaaaaagaaacagccccggagtactaatattatgcttactctctgactaccacctgcccagtctctttattaaaccttcaccaaataccttaacttggatgtaccatttgtttcctgtgtgagcatgcccaatacagctggttccttaagtgagattttacagcaaaagtgaattcgacatagccttgaggggaactttcactttctaagtaagaaaaaacagaatttagaaattgaaagggcacaaaagattatagaatccaacctttccaccctatgtcaatacactggcttcttcctttgatattttgacatggctgaaagatattcttctctttgaagtttttcttagtttcacaccttctggtgttctgtcacatgctcgcagatattgataatgaatctgccatgtaccttatgatgattcacttctcttcctacttttctttagtcaaatttctgtgagctctttattcatacaatgcattgtgaagtcattgtgctttcacttgatgggaatgcatcatttgcttagtattataggttttctcttctcttttctcattagtccaagacaaagtaatactatttagtgctatagcaatcataaccatgaaggcaaatttgagccctgaaactctgtggtagtatcctgttttcaaagagttattcagatgaaccagaatatattacattactttttggggaggaggtggtaaaatatgtacattatcttcattgaagtggtttatcactctctctctctctctatatatatatatatatgtcagattttaccaaactgtacacctaattttttaaaaaaagtcagtacaggccaggtgcagtggctcacacctgtaatcccagtactttgggaggctgaagtgggaggattgcttgagcccaggagtttgagaccagcctgggcaacatagggaaatcccatctccacaaaaaatcaaaagaaacagaaaagtccatacaattatgtatcaattacaaatttaaaaatatttaaaaagtcatttgtctttttcattcttgttccgagtaaccagtgctgttttccaatggttaaatgatacaatgtctttattacaccagctcctgagagctgattgtgtacaacattcccaactctgtttagaggtgtcatgtagatagctggaactcagccatggtgaagtatttacacaatgaaaattagcaaaatcgaggctttttcatgaatagctggttaaacgattaccagcccatcactagctgttaacataaataaacaaagactcattgcagtcctataatacatatatatttttgacatggggtctcaggttgaactcaaggttctggactcaaggggatcctctggcctcagcctctcaggtagctaggactacagatgcctgttaccacgcctgacagtccttaattttgtgtgtgtgtgcgtgtgtgtgtctcactctatcacccaggctggagtgcagtggcatgatctcagctcactgcaacctctgcctcccaagctcaggcgatcctcccacctcagcctcctgaatagctgggattacaggcatgcaccaccacacctagctgattttttttttttttttttttggtattcttttgtagagacagggtttcaccactttgcccaggctgctctcgaactcctggactcaggctatcctcccgccttggtctcccaaagtgctgggattacaggcgtgagccaccgtgctgggcctcagtccttagtctatatttgaaaattttattttattttttatttttttgagacagtctcgctccgttgcctaggctggaatgcagtggtgagatctcggctcactgcaacctccacctcccgtgttcaagcgattctcatgcctcatcctccagagtagctgggactacaagcgtgtgccaccacgcaaggctaatttttgtatttttagtagagacagggtttcgctatgttggccaggtcctggcctgcctctgcctctcaaagtgctgggattacaggtgtaagccaccacgccaggcttcagtccttaatttttaactgtgtaaaagaattctgagaccaaaaagtctaagaatcacttggtacagtgattgcttatctatggagcgagaaagtcttactaggggaaaaattaaaaaaaaaaaaaaaaaaagggactttggacttccagacactcgaccctatcaaatcttttgcagattcatactgttgccttcaccaaatgccaccactgccattctcccatgggggtcattgttgacccagtctttcccccaaagaccaagagggtctggggttgaatgatgagcttcttcttaaatttgaagagcccaaaggctgctaggaaggaaggggctgcaacctcccctagcaaacaccaaagatctatcaccttacgtcctatagctacttgtggacaaaaaatggaactttaaggtactgctaggaaaagaatggcatcagatcaagttttccagataatggattccaactccagcaagtgggataagaggttcatgacacaaatatatttgtattaggtgaatcaatcaccaggataccaagatcggttactttcacaaactgctctgaggcaacttaaatacggaaggaacttcagagccagctcttcggctccaggctcctttttaactacttattgtggtgtggaaaatatcagcttgctgaggatttatcatcttaatagagagctccttgggaaggaaaagggtgaaatttaaaaaaaggatcttcattaaagaatagggagttgattatgttgcagaatcgtatcttcttgttttgcgacacgttggaaacataaactttagagctttttcatctccactgcacagaggtctgattgcttctgtttaaaaatggggatctgctgatggatttcagccagcttcttcaggtctatgtctgaatacatgattgtttcttccttgagagccctagcagcaaaggttcactacagtgctgtgtccccaggcaacataggaggctttgtcatcttgggcaggagaatgtggccacatacacctgattatcaagagcctgaagcaattcccagtgggctggtccagtggtcaaactgaaagcccctggataaaccaacagctggcagcctttccgtgtgtagatttgtgcaagctctgcaaaccagtgtcatagcagatgccccgactcattctgcagtaaggagtatcaaatgtggagaaactgttgcctggactcaacattgtggattcttgaaacgtcatttttccaggaacaccagtgttaagcagatggacctttctgtgctttactagtaaagttccatgaggtgcaaacacagcataggtgttatctaatttcccagcatcctcttcagggatggaacctctagtgaggttgtattcctttgctacttcagaaagcttctgtgtggatttaccaggaattttcgctgcatattcaggaaaatattttgtgccatatggagaattaaagcattccaacaaagaaaccattttggctccttgcgttgctgtctcccggacaaggctacaagctcgagtgttgttatctgatttgatgaagaaacttgaagctggatgagggccaagtggaaagttgccctggctctcctgggaagcaacagcagcagcactggctgagtgcaggtgtccctgtattacttttctaagtcacagaaacataaaacaaaaatgttaaagttatcctaaagtttttttttttttttcatctcgctctgttgcccaggctggagtgcagtggcacaatcttggctcactgcaacctccgcctcccgggttcaagcgattctcctgcctcagcctcccgagtagctggaactaccggcatgcgccaccacgcccgggtaatttttgtattttcagtagagacggggtttcaccatgttggccaggctaatctcgaactcctgacctcaggtgatccgcccgcctccacctcccaaagtgctgggattacaggcgtgagccaccgcgccggcctcctaaagaattcttaagactctcctcccccagtacatctgctaaccttaagttgagaaatatggattttcgggactgaattgatgtgagaggtgagggaagaggaaaaatcctgatacgacgactccacaatgtctggtctgggagtgcttggtgatcctattaactgaaatcaggagtaaaaaaaagaaaagatagatgcaggagaaatgatgaggtcagttttgttcagtctcaatttgggtttcctacagtacattccctttctggtagaataagctggagttggagacatttggtagacaacaacgtctgtgaaaccgagaatgttgatgtgaccatacaggaagaacatgcaaagctaagtaagaagggaagtttgtcgaggaaaaactgtcggtgaatgcaactcctggagactagcagttagcaaggagcagggtggggacggggagaggagaggtaaggaagccaaaagaggacaaaatttaagaagaatgaaatgggcaacgcagaccaagtaagataaaaacctaaaagaattacttgtatttggtaattaagatatgatagtgatttcactccactgaaattgcatagtaagtgaaatttcagtagtgtgggggcaaagtctgatcacagtgcttctaagagcagagaagtgaggaaatttcgtagctaataattcaagactgttttgctttgttgtaaaaagcgtagttggaggggactggacttgaaaacaatgcaataaacgcgaggtagggaattgagggaactcacacttcacaccgaatggcctcaattttctttgtactatatgaggcaaggtcctctgtagagactaagaagggcagagctggggcaaatggctttggaggcgtgctgaatgttgggagaggaagcagcccaggaaataggcaaaagggaaactcagaggtgccaaggacccggctgagggggtttatgaatacaacgtagcaccaagctcaaggttatgtgactttctcttccaattctgccctgcagagcgtaagacgcagaaaatgcagacgaaggttgacttctacttaaatccctatccccgaaagtccagacgtacggacccgaaggcctgtggccaaatcatgcgtgggtgcctactacagatttatgaaaagcagagaagggccagcgtgtttgccttctaaggcgtattgttctgtagcgtcggcatcctcaggcgttcacgtaaatagagccattttttacaaggagtagggataaacctggtgataggatgagggactacgtaactttctttctctccagatccatcccgggggaggctgggcgggcgggcggctgctccggtccaggggtggaggtcggggccctgacccgacgcagccaggcggaagcgcggctgccattggaggctgcttttacctgcgcggggcccggggcgcaaagtccgaggcgccggggggaggaggcggcggacggcagcgcaggtgggcccgcgctctcggccctgcaagatgcccctgaagctgcgggggaagaagaaggccaagtccaaggagaccgccgggctggtggagggcgagccgacgggcgcgggcggcgggagcctctcagcgtcccgggctcccgcacgcaggctggtcttccacgcgcagctggcgcacggtagtgccacgggccgagtggagggcttctccagcatccaggagctctacgcccagatcgcgggcgcgtttgaaatctcgccgtcggaggtaaggcgccaggtgctcaggctctcccgcctctccgccgcgccgcgccgcgccgcgcgtatttctgtgggcccaggagggttgagcggcgtttcccggagcgcgaaatccgatgccgtgttgagtccgccgggggcgtcccgggggaaagtgagtgtgccttccctggaagggaaaatttaacttggcaggaccgcagaaagtcacagtcccccttgctccgagatctggcctttgggaagcgggttgagggaggcaacctttcttccgcttgcaaatgtgtttgctccagatgtcccggattccgccggccgttcaaggcgtgagcaccttcccagactcgagatctggcggggcagattaataccctccacttcatctggactttactctcctgtttcctccgcaggcgtgagagtcacgcaggtcatctccctagattaacgggggaaaaaaaaaatagaagtgccttgcaggtgatacccagattaagtgggggggaaaacattgaagagccttccaggtaataccaaacggaggcccactttcccccaatctgtcatttctaacatcagcaccagaaaccctttggtggtatttccaagaagtttaaaaagctgggctgttattccaagagtggataacctagagattcatacttaatcacgtgggactagttaacaaaattttcatgaggaagatcagctcttttacatcgtatccttaaaaagggactgaaatttgctttaattagatttcatgggggcctggaactaagtttgacacaggcatgacctaaagcactagtttatgtgaacgtttatgtgaccactttatttgtgctaacccaagtgaactgcaaaggtaggtgtgaaaagttagctcaacaaaatattttgtccacatttctaggaaaagcatataattttgttgccctggactcagaggagtgcagagagctgtctttgaggcctacagcggcacctggagttctttaattagttgtttatcaggtctgttcaagggaaattgaggtcaaggcaaaattccaagaggagacgaaagagagcttaaagtgtaaccctttgttctttcgaagttcccaggcactaaggggcaaatcgcaaacccatctgtgaattatttgtattgatataggatactaataatacttcacatttatataggattttttttttttcaaaaaacactttcacaggacactttcctttgatctctaggggaggcaggtggcaggttaaatacgataacttggacatggagccaggttctaccctttactagctgtgtggacttgaatgagtttaacttctctcagttttcgccatctgtaaaatagagattagaatatttgtcttgaagagtattgtgaagagtggagtccgtatgtaaacgtatcagattgcatagtttatggttagggcttaatacatggtaactaatatgattaatacctaacagttaaatgaaggactgaagtacaaagtgattggcccttagccaaggtcacatacctagcaaaaaaaaacttgactgtaatttaaacttggatcttctgattcctaagctagtgagcttgttagcatacttaactgacaactttaaatgtctttgctgtaaccagggacttcagttttagttacagatggtcctgggtttatgatagttagacttaagatttttgacttcgccatggatttattaggatgtaacttcctggacttaagatttttccactttatgggtttattggggtattaaatgcatttttgacttatgatatttttgactcacaatggatttattgggacataacaccttggtaagtagaggagcatgtgtattttgcattaacacttctcatcattatatatgacattattctgagctcaaggtacatgattttattcaatctacttaatccctaagaagtaagtattattattaatatccccacttcacagagaggaaacagactttgaggttcagaatttttccagaattacacatagcaagtggcagagcctggatttgaattcagtgtattctttttttttgttttctgtttttcttttcttttttttttaatgagatggggtctcactctgttgcccaggctggactgcagtggtgcgattatagctcactatagcttcaaactcctaggctcaagcaatcctcctgcttcaccctcccaagtagctgggactacaggcatgtgccaccacatctggctaattaaaaaaacttttttttagagatgtggtttttctgtgttgctcagtgtggtttgaaactcctactctcaagtgatcctcctacctcagtctcttgaataacacagacacggagccattgtgcccatcttttttttttcctcccatgaagctatattgttacccaagttttccagagtctcagcaatagcttggtagccacgttcaacattttcagtgcactgacttgcaaggtcagtttccaagataatatacacgagttgttttcatgtgttagatcaaagtttataacattttataacccgggtatatgggtaaaaccccagttttaccatgtttatgcatataaccaacattaatgcaagttttccatctggattagaaaaagttaattatatgcagaataaagtattggtcatcatagcatagtacgcataatatttcagtggttcactctgaaacagaagtaactcactaaaatgaaatgcacaccaaggagattccattttcatagcccatttccccagcaagcaattacctcagcaataatgatgtaaacaactttttttggttggtttttgttttttgagatggwgtcttgttctgtcgcccaggctggagtgcagtggcacgatcttggctgactgaaacctccacctcctgggttcaagtgattgtcctgcctcagcttgcctaatagctgggattatgcaccaccatgcctggctaatttttgtgtttttagtagagacggggtttcaccatgttggccaggctggtcttgaattgatatcctgacctcaggtgatctgcccgcctcggcctcccaaagtgcgtgaaccaccacgcccagccctgtgatgtaaataacttttgagatgtcagtggggacaaaaacatttgccccccttaatgggattgaatagatagttaactcagaagtcctgccttttttctagagtggtggctgtaaggatataaatagcactacatgaagagctagccactctttattgaggagaaagggaaaagacttgatgtcaagtggagcagataatcagggcccataatgtgcccrcagctgtgctaggcctgtaagcctacagtgtgttcactccatcctcaccagaatcttttcattttacaatttagtgaagtgagactctgagaagttaaataggctggtatgtggctgagccaggatttgaattctggtttcctggttctaagtctattacatagcagctgtgagattcttggtagctgcattcaaattccaaatacgaacccagaaaaacctctttttttttttttttttttttgagatggagtctagctcygtcgcccaggttgaagtgcaacggtgtgatcgtggctcactgcaacctccgccttctgkgttcaagtgatcctcctgcctcagcctcctgaatagctgggattacaggcacacgccatcatgcctggataatttttgtgtttttgtagagatggggtttcaccatgttggccaggctggtctcaaactcctgacctcaggtgatccgcccacctcggcctcccaaagtgagctgggattaccgacgtgagctactgcacctggccggttccaagtctattacatagcagctgtgagattcttggtagctgcattcaaattctaaacactaacctggaaaaacgtcttttgtaaacaaattttttttttcaataaaagcctcagacttaaccacaaaaatatttattgcctcaaaaagatgttgatgtgagactgacagttgtggacttcagctagtgttttgtggtccctgaaggaataagctaatgaaggctgtgaatcagttaagatttgttattaagttgagacagatggccagttatgcaaaaatccctcatatctgatgccttttttcaaaacaattaaatgaacaattcagtaaaaagaaaaaaaaccctgtaaattaatctcatctaaagaacaattaactcctacataaatgcaaagactcttcttgagaaagtttaatacataccatctttttttttttttcttttttttgtgacgggagtctcgctctgtcgcccaggctggagtgcagtggtgctatctcagctcactacaagctccgcctcctgggttcatgccattgtcctgcctcaacctcctgagtagctaggactacaggtgcctgccaccatgcccggctaattttttgtatttttagtagaggcagggtttcactgtgttagccaggattgtctcgatctcctgaccttgtgatctgcccgcctcagcctcccaaagtgctgagattacaggcgtgagccaccgtgtccggccaatacataccatcttttaaaatatccaggttacatgaaactctcgagctatggtcatacattttgttgaaggggcattttgaatatttgactactgtaattgtttggcaagtagtttttaccatgatatattttcctaattctctattatgtggaaatattgtaggaaaaaataatgaatgtgaaaacttaagaaaagacgtataataaaaaaaagaaccccactttgctcaatacattcattttgtaaaatgtaaaaaaaaaaagaaatgatgtcatcattattgatccttggacattaaaagaataacaaagaaatattattaacaaaaaaaagataarttttatagttagaaattttacatgtccagaaactggaaattcagatgcagtttctctgcagaattcagaaattacttccttttacttgtttagattagtttgcgtgtgatattagataccaaatagttcattgaataataaatgagtaattcagtgacttattctctccccatacataaagcagtcaaagaaagcagagtacttgagaagcagaaaaggcaagaagtgttattcttttttttttgaaatggagtctcactctgttgccaggctggagtgcagtggtgtgatctcggctcactgcaacctctgcctcccgggttcaagtgattctcctgcctcagcctcctgagtagctgggactacaggtgcatgccaccatgcccagctaatttttgtatttttagtagagacggggttttgccatgttggcctgtcttgaactcctgacctcaggtgatctgcctgcctcggcctcccaaagtgctaggattacaggcatgagccaccgcacctggcgtagaattgtgatttttaaggtgagattttatcctcacaagcatgctgttatttctcttaaacagacaaaccttcttttgacacctgttcccatcccctgtattaccacctcatttctcctttttagcaaaactcttcaaaagttgctgtctctgagatacaatttgtatctcattttctgctctaaacctttcatggcttcccctctcacttggaacaaaccaaaatactatgatgggctacgggctctgttacctcttcagaatcgttgttccttctgctccagccagactggtctccttgaatgctggagccttaagacttttgcattggtttttgcctccgccagaacctcttcctacagaatgcccttccttaagtctgttcaaatgtcatcttcttggtgaggctagcactgatcatctctaggtgcaacactccctgttcccttctctgcttaatttttctccgtagcatactatcctatgtatatttaacttattttgtttatggtctgcccccttgccccaatagaagctccacaaaggcaaggatttttgtctttgtttactgatgtggccctcaagggcctagactttgcctgaaacatattatagttggagtttaaaaaatagttgttgaataaaaggatcctcaccaattcagtagttaaaacctagtgtctttagcataaagctttagtattgattacaatactaatatcttatgtaggtgttaattttttttatgttctgctatgaggaaagagactagcctttaggtgggggtagtgaggaacatcactcatatctttaaaattttttgaaaataaatgtatatatttaaggtatacaacacgatgttttgatataaatagtgaaataattattacagtcaagctaattaatatatccatcttagaaactatgaaatttgaggctctgtttgcaagcawagtcacttcctaaatgagttacagcatatgaggagctgcttcctgaggcttcccagaagctgcttccttttctcaacttgctgacactagcactgagctcttttgaaagtcaatattctgtatttatgtggtacttctagaagacatgaaatgttctgcagactttatcatttcccagcagtgcaaataactggcaagtggaactgttatctttctggttcacaaatgggaaactrggacgaatagagaaaatagggttttactgatttgcatatagcaccccctgccctggaaaaacaagttacaaaaatctacaaaaaatgaaagaattgggaattgggtgtgaatattactattgaggtctgaggaatatgaagtaagcccgtcaaaattgagtagaaaaagtgtgagaagcagtccctgacatctggtaggggccttggcacttgcaggaaggccttggcattctgttgcacataaacaattgcacagcatgtcaacagcagataagactgctctgactgtggtaatttctcctaccttacagataggtttactaagattcctggtcatagaattgcacccatttcctgacagcaccctatccagaacaaacccatgctttggaccctctcccaaatcacctaacacaagcccaaatcctttgtaatgtctctttctgaaacccccaggatttcccatagagtgctgtcaccctcctcacaaggagcaataaactgcaggtgagaatccctggtggtctttgcctggaaggtgttggcagttgtcacttgtcactgttgggttattacaatgcagattctaaagaggcagcctgaatttggtttccctgactccactcatcctcttttagtattttaatgctgtgatcataccagtctaatcttagcactttggaaggctgagaagggagaatccttgaagccaggagtttgattgacaacagcctgggcaacatagtggtaccctgcctcttaaaaaaaaaaaaaaaaaaaagccaaaaaaaaaaaaattagccagaggtggtggtacgtacctgtagtcccagtattcaggaggctgaggtgggaggatcactcaagccggagtttgaggctgcagtgagctatgattgtgctgctacactccagcctgggcaacagagcaagactgtctaaacaaacaaaaacctgcaaggggctcctcattacttacaaaccaattactaccagccaaacaatgtctcatattcctgtctgcctcttgagtcctctcctatgcccactgttccaatctcacttcttaataatcccctttacattcaacaatatttaactgtttcattccattgtgctttttctcatgctgttctttgttccagtaactcctactcacttttctagtcctgtaatttcctccaagaagcctaccctgtgaatccasaaatctggataccygctattgcatgatttttaacatagcatttgcacataagattgaatttagttactcctctgtttcttcctgagggctgggacttttttcctttttaaatcttgttcttagatggttagctagatggtttagctgctccttaaaagtttactaaataaaagtagataatggatatagtaggagagaaagctgaggatatagatagtagtaagactacaaatgtccttgaagttgtatggattttattctgtaggcaatgagaataactcagatctttttcggaagaagcaaggatccctgacacatattttacaaagtagaagcacactcaaccattcattctctgtattttctttctaaataatattcagtttaaatggaatataatggtattttctggatttacatcataccatctgagaagttataaatatatcacagtcattatgtaggcttgatatcccctcctgagcaccagcctcatttttatatgaaaaattcaggcaagaaaaacatgactcattttgagaagtgggaggagaatccaaccagctgccttatagacctcattgctgtcaggagggtatgaaatggataagactgctgttgtgctagaagtaccctgaagaagatatctgaacaaccctaaaataaagtttacacccttgggcaggggtagactcctcttcaaaccctggctacctgtaggttaatagccagccccttcacattctcccacctgcaatcaccaacccagctaccctgagtggagtggaaggctcttgcaggttatcttgggcaatttgtatgtatgtatatgtctgtctggctgctgtaacagactatcaaaaactgagttgcttctaaacaacaaaaatttattgactgggaagtcctagattgatgtgccggccatgtggtatcttgtgggagcccacttcctggttcatagacagccatcttgttgcatcctcatgtaacagaaggggaaagggagctctctctagggcctcttctatgcaggcactaatcctattcctgaaggcttgaccctcatgacccagtcacctcccaaagaccccacctccaaataccgtcacctggtaggaggtgggggattaggcttggggacacacacatgttcagtccatataaatatttatattaaaatgtatagggaggtaaggaagcttaggacagcttctgcagctgcacagtcaggttccatggacagttggaacgttgctcattctgttcaggttaaagcagtagctttatactgtagagaactgagagcaagtctagttgtccttaaccttccatctcagcctctctctctccctgcttattctacttttgactgattctttcttctcatcctcttgactttgctcctcccattattacctcaccccactgtgtctttgtgtttctttacctctctactttctgtgccctgcctgtgtatcttattaaacttcctaagaaagagtctttgttgtgtcagggtacagcacaggtgggacaggacccttgggcctgtgggtcaggttcatctctgctccagcctacagggtcatgtggtacagaggtaggtgagcagtggataaggagtcctgcaggagagagctatgcacatggtagatattctgagacatcttgatttaggggaacgtaaatggcagacaccttccatggcctgtttagaaaacgaaagtattttccgttctctatgacctttatgcattgttctctttatctggaaatctctcccctactctttccctgttaactcctacttgtgctgcaggacttgcaggtcattacctgaagcctccccactacctcaggactgggttctgtgcctatcctctaaacttccataactcttatcagactttatggtcatcattgctttaatgtctgtctcttccataagattgagagccactctgggcaaagactggcagttagtatgcagtaaaacttatggctgggcatggtggctcacgcctgtaatcccagaagtttgggaggctgaggyaggaggatcacttgagctcaggagttcttgaccacctgggcaacatggtgaaaccccgtctccacaaaaaatacaaacaaattagctgggaatggtggtgtgagcctgtagtcccacctactcgggaggctgaggtgggagtatggcttgagtctgggaggtggaggttgcagtgagctgagattgcaccagtgtactccagcctgggcgacaaaagccctgtctcaaaaaaacaaaagaaaaaattattacagaaattttaaatacatgcaaaatcaaggaaatagtgtaattaactccatgtgcccagcttcgacaattgtcaacatttgccaacatttcttttcttccctcattaacaaaatttttattaaatataacacaagtagagaaaagcacataaaacaaatgtgtaaattaatggataaattgaacacctttgtaaccacacctgtgtcaggagatagactttatcagcctcctgagaaccttccatgtgccccttcccacttgcacccaagagtaacaaccatcctgactttcatggtaatgaatcccattatatagttttttcatttatgtgctttcctaaacaccataatttggacttcttttaaatatgtttttgagtcttttttaatctatagattccccttcgtcttgttctctttccagtgtatttgttgaagcagccagatcttttaccctgtgtgtttcacagtttgttttttgctgattgcattcctgtagtctagtttggcatccccagtcactgtatttcctataaattaatagttgtagtctaggtttaatcagttggggtttgatttttttcccgatgagacaatatcaaaagtgtagttaaaattttatattgaatgaataaaatcaacagataaaataggggtcttaccttttaaaatgtcatcagttctattctactggaatagactccatcccattttgaaaagtctctcctatgttttttatttcagttgtctgtacggtgaagcaactgtgtttttctataaccctctgaatgtatggctgggactatctgtgagcccttcatccctaagaaaccctctcagctataccctcagcagagccagatgtgcttttcctacatctgaatgctggcagaatttttctgatgcataattgtacatatttatgggatatgtgtgagattttgatataggcatgcaatatgtaatgatcaagtcagggaatttagaattactggtggaattytaatttttcaaaagaaatcactgtggagatatttcttcctgttatgtgtataaagaaccaaatacagggaagaaagaactaaaaaccctgtaataaaaggtgtgtaccatgtcaaaaaagtttactttgatcatttgtacatgttatgaatttatagctggaaagagtgattataatacagttttaaaatggaaggtagataatttaggcatgttcaatcttattcttcattagaaaacttattggttattggctttgtgccagtcactgccccaaatgttgggatacatcaatgaataaaacagacaataatccttggccacatggagcttacattctagtcctccatcctatgagatgggtacttcttgagtcaatgagactgaatgcaatagacattgttgggttattctctgaactcttataaattataggttttctttttatacccacatttcttgccttaaggacctagaaaaaaggacctagaagcttttgctaagcaagaggaaaacataagtatgtttatactttttgctggaaaatgttccatcatttatatggccactcttaatacctcctctgtgccatatactcttaaacctcccttctgtttggaagcatggaattatagtatagcttagtggttaggagtgccgcttactatctctgagaccttgggcaagttattggctgctctttgtttctgttcctcatctgttaagtggggttaatgatacttgtcatcacaaaaggttgtcgtgaggggtacatgaaaaatcatgtatgtaagatctgtgcctggcacatagtaggtattttttaaatggtagttataattgtagagttggaagagtctttattgtattctaacttttgaacttgtttaccaaatagacaaccatctttagttacttttaactgatttttttttaattgaaggattcactcagagcgcttattaggagttcagcattgtgcttgatgctgggaacttaaaggtgaagatgacatagccccatcctccagtggagtgtggttcaatgacaaacaatttgacaagctagtgtgggtttcctaaaatgtgttccaagcaacatgaatcccttgacatattatagaaaaaatgcctccagttgtcaaataactttgggaactgtattttgtaaattcatgatacatattaatggctttgagaagtccactaaaaatttaaatatccaagaatcttggtgtttattattcccttcacttatttgagtatcgtgctctcccttttttcctgcataacaaacactccgtggaccaatattccaagatatatacttcaaaaaaatgctggtatgttttttcaaaaatgattcatcagttattctgtgataaaaagggactctatggtaactcataacgttctgttatagtgaatgcccatttagcaccaaagaactctgccaaatagcttccatttcatccttgtcctttactgatcgttttgctgccctgtcctcctcactatccaactttgggcaagtcttccctcttgttggggtgggtgaactacaccagtggttcccaaagccagttgcctcttagaatcaccttggtgacctttttaaagaacacaggcttctgggcttcacccctacagattttgactagggcctgagaatgttgtcattttaaaaaagcttccctgatatacttaggtggctggcctgtcatccattggtagattgtgtgtttgggagccactgaattaaatgaagagatccaaggtcttttctagcttgaatgttcctccagagcttgtgcattcaattaaaaatattccagtgtcatctttatgtacaaagtattgagggacatacaatgatgactatgacagtgttttgcaagtggcttgactatagaaatccttgaaatggtagagaccctggtgtatctaaagtcatttaggctgggtgcagtggcacatacatgcctgtaatccaagtactttgggaggccaaggtcagcggatcacttgagttcagggattcaagaccagcctgggcaacatggtgaaatcccctctctacaaaaaatacaaaaatgagtaaggcatggtgatgtgtgcctctagttccagctgtagtcccaagttgaagcttggataggactcgggaggcagaggcaagaggattgcttgagcccagggaggttgaggctgcagtgagccatgatcgtgccactgccctccagcctgggtaacaagagtgagaaaaaacaaaaaacaataacaaaaagaaaaaaagaaaaaataaataaagtcatttagagatcacttcttgttagagacgtgctagacagagaatttaaaactgaagtgccaatagcactctgtgaattagagattaaaaaatgaagatgtagtatttttgaacttaatgaggacttttggaaaatagaattctatgaatataattcagtaaggcatagtagtataaacttgacataagaatttttttagaagctgaagcatattttctgcttttctgacatcaaatgtaatgtttggaaatttgggatggtgatatcacacaaattcttttatagttgtttcaaagctttataggtaaaggatataggtgggctgtaatcaattcgtaagatctattcctaatctaacctgtttcatctctcttttttttttttgagacccacagtgatcatcacttactgaagcctcaacctcctaggctcaagtgatcctcccacctcagcctcccaagtaactaggattataggtgtgcaccaccatgtgtggctagtttttgtatttttagtagagatggggttttgccatgttgcctaggctggtctcaaactcctgagctcaagcaattctcctgcctcagcctcccaaagtactgggattataggtgtgtaccactgcagccgaccgaccctctttcatctcttgattttatctcagtgttaactgcaacctacctctcaagtcctcctcttcccattaacctgttggctctcagttaatgagggcatccataatgtttgaccagaggctgccaaaggaaagtgatctcttgcttttgtgctgcattcatttactgaagttactagcagaaattactctctataaagctgaagtccactgtggagctacacagtaaatgattattttagttgaaaaagtaaggtatataaattgaatttttacatggtaaacatccaaaagatgtgggccacccagaaccatctattgtaaccactttctttactgtccttccagaaaaatactctataaatgtgtgtgtgtgtatatagatagatagatagataggtagatagataaacattcatatctgtgkggggggtatatccccccactttatcttcttttttttttttaactcaattaagagcatattgtattctgttctgtatggttggtagtgggagaagaacaggwgtagccctaagaaagaaatgctgaggcctgggaatggcagtcactgtatccttgcagtgtctcatagggccaccagggagtccttgtgcaaggagagctgccactgtgtctttaatggtgattagacaaattttaataatttctaagaagtctacctgtttcctgaaagggtttcctgtgctgcctttgtttccctgtgtcttcttggtgtaaacccccatcacctgatataaccaaacgtgttccttgacactgcttattcagagagaagtaactaacaaacacctttgggctagttgctcacttagacaaagaaaagaggaagccaattgaaggtggacggctctgtcactgcttgtctgaattgggatccaagaaactggccttcattactcatctcagaaactctagccctgctgtttggggtgtgtggagtattctgaggtttgggtgattaaaatgtggagtgggaagttgaagggacttagagctttgtcagtggtagaatggtttttttttgtttgttttttttttgttttgtttttgcgatggagtttccttctgtcgcccaggctggggtgcagtggtgcgatctgggctcactgcaacctctgcttccagggttcaagtgattctcctgtttcagcctcctgagtagctgggactacaggcgtgagccaccaagcccagctaatttataatgaagtgttctttacactaattttaaacaggccccagtttcaagtgattttcctgcctcagcctcctgaggagctgggattataggcgcacaccaccatgcccggctaatttttgtatttttagtagagatagggttttgccatgttggccaggctggtcttgaactcctgacctcaggttatctgcctgcctcggcctcccaaagtgctgagattacaggcatgagccactgtgcccagcctgaatgtttgctttttagaaacatatttgaccctctgtaggtggtgtggctaagaggcttaagaactcaagcattcagaatgtgtatttgctatgtgtataaaaatctccctggagataaatcaaagcacatggagagggatgactaaaatccaggctctacatctcagtctataaaagtcacaggttcttaagttacagtgttaaagtagccttaaagggatacacagtaacaaagttgaggaaatgataactgtgtatctattcttaaaacagkttacatatccatatatttcattaatgtagtagtggytgtataattggcgttaacactatgtccctcatgatccagggccagaaccttaatttaaccacctgaagcttctcacatttgatactagcagtgtgttctgggtgtggttgggtattaggtgctggtcatgattcctgttatttccttccttcttctgtgttctctgtgctttccccttcctttctccattttcctgcctgtatgtaaaagtgggtggaggaagggaagcatttcttaagaattgaggagaagggaattactgtgttttttctttttctttttttttttttttaatttgagagggggtctcagtctgtcacccagactggagtgcagtggcaccatcttggcccactgtaacctccacctcccaggcttaagtgatcctgtcacctcagcctcctaagtagccgggaccacaggcgtgccacagtgcccagctaatttttttttttttgtatttttggtagagatggggtttcatcatgtggcccaggctggtctcgaactcctgagctcaggtggtccacccacccaaagtgctgggattacattcatgagccatcgtgcctggccaaggaattattgttgaacacctattaccacttaacctatgctatcttaacggaaatggtaattcttgctagaaccaccagaaattattacaatctatagaagaagcaactggagcttagagtaaaagtaaattactcaagtttcacagcccagagggatatctttgacttgaggtctatctgacgtcaaagtctgtattctttcctttacgtaagtgattcttaaccttagcagacccaaaggcttcctctaataacaaatattttgtgataccgtctttactttcctgaaataggattttaaacaatgttttctacctatacgcataattgattccttaactctaatattagaaacaaacttggattttaatatccaagtatttggaaaagttatcttaaaaggcatcaagcagctgggtgcagtggctcatgcctgtaatcccagcactttgggaggccgagacgggcaggggtcaggagttcgcgaccagcctggtcaacatggtgaaaccccgtctctacaaaaaatacaaaaattagctaggtgtggtggcatgcatctgtaatcctagctactcgggaggctgaggcaggagaattgcttgaacctgggaaatggaggttgcagtgagcctagattgtgccattacactccagcctgggccacaagagctaaactccatctcaaaaaaacaaacaaaaaaaaaaccaaaacaaaaaacatgaagcagttgcttgtatctacttgtagtgaatacatttggatttgaaaagagtaagaataagatgagattcaggttgggtgcagtggctcatgcctgtaatcccagcactttgggaggctgaggcgggcagatcacttgaggtcaggggttcgaaaccagcctggccaacatggtgaaacccatctctactaaaaatacaaaaatttgccgggtgtggtggtgcatgcctgtatttccagctactcagctactcrggaggctgagrcaggagaatcgcttgaacctgggaggyggaggttgcagtgagctgagattgtgccrctgcactccagcctgggtgacagagcaagactctgtctcaaaaagacaaaaaaaaaaaaaaaaaaagatgggattcaattgattgtttttgtctctttttcctcatattcaacattttaaaataagagatattaatgtttgtaaatgstcatagaattgccatagtgcaacaacaggagcagactgatataaatgttttatgttacaaatccaaataacatgggcagcattgctgtcaatgacttgattttctgaaacgataaataactcttggtaaggcactgcataaaaaagtacagtcttcccttgatttacatggtaattgcagcccatagaaattcagaataaaaaatacgctgtgtgtaacacagaattaggggctaggcttaaatagttgatagtttccccccatccttccagcatgaatgtctaataggacatttgagcatcatgtggaatacaaagcagttcttcatgaagctgggcttctcaagcattgcaattcaaacagaatccttgacccatgccctgcttccctcaaatgccagtggtgccatacaatcattttaacaatcaaagagaccccttgatatttccacctgtttccttagaggccagtattggctgtcacctccagcaatactgttttatacttggttgctagaggttaagtaattgtcctacactgtgaagttagaagatgataaaaagggaggtgcgggagtgagtggggatgggaaacaataagagggcgaacaaggagaaagacgtcctgttggttttgtacttttagttttaggatccatctttttaaaaatgttttttagagagagggtcttgttctgtcacccaggttggagtgcagtggtacaatcataactcatgcaacctttttttttttttttttttgagatggagtctcactttgttgcccaagctggagtgtggtggcacaatcttggctcactgcaatctctgcctccctggttaaagcgattctcttgcctcagcctcccaagcagctgggattacaggcacatgccagtacccttggctaacttttttgtatttttgtagagacrgggttttactatgttggccaggctggtctcaaactcctgacctcaagtaatctgcctgccttggcctcccaaagtgctgggattataggtgtgagccactgtgcccggccctcactgaaactttgaactcctaaactcatgtgatcttctcgcctcagcccctgagtagctaggactatagacaaaagccaccacacccagctaatttaaaaaattttttgtagaggtaggatctcattatgttgcccagggttagtcttacaggactgtaattaaaagagtagaacaygtgtttggcttgttaaatttgtgatattcttcctatgcactgacaatggtcaagctgagaaccaaatcaggaatgcaatttcattcacaattaccacatgaaaaaaaaaatacccaggaatacggctaaccagggaggtgaaagatctctacaaggagaactatggaacactgcccaaagaaatcagagatatcactaacaaatggaaataggaagaatcaatatcattaaaatggccatattgcccaaagcattttatagattcagtgctatccctattaaactaccaaggacattcttcacagaattaaaaaaaaaaaactgttttaaaattcatatggaaagacaaaagagcctgaatagccaaggcaattytaagtgaaaagaacaaagttggagacgtcatgttatctgagttcaaaatatactatagggctwtagtaaccaaaataacttggtcctggtacaacaatagatatatagaccaatggaacaaaaaagagaacccagaagtaaggctgcatgcctacaattatctggtccttgacatacctgacaaaaacaatagggaaaggattccctattcaataaatggtgctgggatgactggctagccatatgcagaagattaaagctggaccttttccttacaccatatacaaaaattaaatcaagatggattaaagactttaacaaaatccaaaattataaaagccctggaagacaacctaggcagtaccattctggacataggaatgggcaaagatttcatgatgaagacatcaaaagcaattgcaagaaaaagcaaaaattgacaaatgggatctaattaagctaaaaagcttctgcacagcaaagaaaactatcagcagagtaaacagacaacctagagaattggagaaaatatttgcaaactaggcatctgaaaaaggtctaatatacagcatctataaggaaagttacaagaaaaaaaacccaactccattaaaaagtgggcaaagaacatgaacagacacttttcaaaagcagacatacatgtgaccaacagtcatattaaaaaaagcttaacatcactgatcattagaaaatgcaagtcaaaaccacagtgatataccgtctcatacaagtcagaatagttattattaaraagtcaaaaaataacagatgctggtaagattgcagagaaaaaggaacatttaaacactgttggtgggagtgtaaattagttcaaccattgtggaagacagggtggtgattcctcaaagacctaaaagtagacataccatttgacccagcaatcccattactggatatatacccaaaggaatatagatcattttactgtagagacccgtgcacatgtatgttcattgcagcactattcacaatagcaaagacatggattcaacctaaatgcctatcagtagtagactggaaaagaaaatgtggtccatatacaccatggaatgctatgcagccataaaaagaacaaaatcatgccctttgcaggaatgtggatggagctggaggttattatccttagcaaactaatgcagaaacagaaaaccacatactgcgtattagcacttataagtggaagtgaaatgatgagaatgcatggacacatagaaagaagcaacagacactggggcctagtggagggtggaggatgggaggagggagaagatcagggagaataactagtgggtactaggcttaatacctgggtgatgaaataatctgtacaacaaactcccatgacacaagtttatctgtacaacctgcacatgtaccccgaactttaaatgaaaaaaatcatgtaaaattgagtagcgattttagaaaaatttgtgatgtctcaatcttttgtaatatcttgaagtgtcacctgttgctgtggctatttgacaggtttatagagtcctatagcaggtgcaaaagttagggtggaatgatagggaagcatagggtttgagatcagatggggaggagggtttcagggtagggtggcctgtcctgggtttgattcctgtagatgacaccttctagccattttctcactaataaaatgtacaatgaattaccttataggtctgttgtgagaattaaatgaaatagcatgttaggtgtccagaacaatggtacaatggttcaataaatgttactcctgttttcctcaaaaaagatgctggatgacacttatttttgcaaatttttcttttctttttcttttctttcttttttttgagatggaatcttgctctgttacccaggctgaagtgtagtgtcgtggtctcagctcaatgcaacctccgcctccctagttcaagcgattctcccacctcagcccctgcgactagctgggattacaggtgcccacgaccatgcccggctaatttttgtattattagtagagacagggtttcaccatgttggccatggtggtcttgatctcctgaccttgtgatccatctgccttagcctcccaaagtgctgggattataggcgtgagccactgcacctcgcctcaaatttttcttataatttttctattctagaccaggtacagttttcattctcccaccctttgcctacatccagaaaataagaacaaatttaatgtctatctctgtagatggtcctcagtctaaactacctgtttggattctgttatagtaactaacccggactctctgtggatggtccttagtctaaactacctgcatggattattttatagtaactagcccggactcttctgatgagggctctttcaatcaaatttagtataaacctaataagcaatttcagtcaactaagttgaacatttcagttaaacttgggcaataatacaatttattcagaattgttttgtattgcatttgtcaatgcttattcttctaagccaaaaaaaaaaccttttagtaatacaygtagttcttcatgtcgtatttctaggcatagagagtacctgtgacagaatttgtttcagcatataattctgttattctacttctttcccccactgaacatttagagttaatatccaactctccccatactcattaagtctcctagaatcttggtcattatgctcaagttgtggggacttgtattttctcccaagaagcccaggattggggcatgtggggaagattacttcaataccaagggatagaagaactctaccactgcctttcctcaacatccaaatcacatgactttccttttatcccatgctgtcttagtctcagcatcttgaagtgggagcattcttatttgatcagcttaatataaacaggttagtgtaaaattgatatttcaaaccaacccagatgcttcagagagtgaaagagatagtatctataattactctggaacaacagggataaactgggacctagagttatcccagttataaccaaactgcttgctagaaaaggagaaagaagaaaaatatgatgtgagaaagtttatcatataattattaattgccaacaatatataagccattttcctggggaataaggaaggttttgcattataggcattttttggaaggctagggagagggagtatgtgtgctcataaaaatagaagcaggtagcaagggctcagtgtcagcacccagactggagccaggagactggtactcctcatcctggctctggcttggtgacacattcctgggagttgaggatggagtccygtggtagcctgtcagcttcttcagctcctgcccctgcttggtcttctccctctcttttctaagtgctctgcctcccctagcaccgggagtcttgcaggcaggaatggcggtaatgttggcaagcagagagttggaagaaactgcttggtgagagtagggaacaggttgctgataatcaacaactccgagcaaaggtcagtcagccagggcagtgcctgggtatctccaagtctgtgacagaattctgttcttggctgctcttcaccctttcccattctcagtttcctgggcttattctatccctggggcaggagatggttcaaaattgaaaagcctgaacctagaagaatcctcacatacactccagattgagggctaacctcacttgtggattcagtcctgtcaggcccacccataggtgaattttcttatgctctcaaacttcctgatgaaacatataagtgtgtgaggtggtcagtgaatttgccttcacccttttctcccagatcatttggctccctcatctagggaaccctgtagtacttttttttttttttttttttgagacagagtctctatctcccaggctggagtgcagtggtacaatcttggcttactgcaacctctgcctcccaggttcaagtgattctcatacctcagcctcctgagtagctgggattacaggcacctgccaccacacctggctaatttttgtatttttagtagacacgggctttcaccacgttggccaggctggtcttgaactcctgacctcaggtcatctgcctgcctcagcctcccaaaatgctgggattacaggcatgagccaccgcacctgacccctgtagtacatttttatgatgacttttaggtgttttagtttagaagaaacatctttctctctcaagatgtttgatattttctcaggtggcccatattttccccatagagtgctcatctctttctgtcagaattcctgttgtagggtgtagtaaggaatagactgtcttcccccatcactccctctgacacctgaatggctcaccatgcttactttccaattttccatgattcatttgggtggtttttaaatatcacactctcttcagacatttcattgtaggggttagaattcagcctcgtgggccaaaaggaacacagtgctctacgaacttctgccaaacaaattttaaagttttgtttaaggatccttttgaggtctaatggcaatcttttacaagttatatttgtatatttggtaatttggaacgtttaatccacaaatctctttactaataattataatgtataattatgatgttttataaaccatcctattccagcatataaaatgtcccctgttatagtctctctttgcctgtttagaatctcttccatctttaatgttaaacaagaggaggcttttaagaagataagtggttcagaaagcatggaaaatttaacagcacctgacgggggaaatagcagtgatttatgatgtctttcaaattggcatgmaatgttgcagcattattagactaggataagctcaggtatctcctctgagtgtaaaaagattgtgggagaggatgatatatatatatatatatggctatatgcatttgatttattttattcgttggtttagtatttgtgtaatgtccacaaaggcaagacttacacctattccaattctttatccttttcttatgtctcaaggattgctttgggattttgattttcttggatacacagttccctttattatatttcattagtaaagaaagtgttcttttggttatgctgggaagtcatttggtagattcaaaatatgaatctgactgtttttctttttttggatagaattcttatttgtcatattattttactcattagtaatactgaaaaaagtagttctactggagaagagcacaaagagtgatgattcaccttttatttaaggcttgccactgctgacccagggcagctaatttagaagtgaatcatttatagaaagttctacacagttcaggacagagctttatacaatatactcatgaaggtctaaatagagcatacggtatcaggtttctaaatatctgtcttgtcgccaattttatgtcttttccagcctgtgaaacttgtttctagatgactgtagctattgacaagatgaagtcaaaggcactgtatatatataatgatgcatattttaaaactaatcctagaaatttagtacatgcattatactgggaaaataataggctgagattttaaattactgtgtttataatacaaagaaacaaatgtaactagtcatttttaaaactagttggaataaattttaaaatcatttataataatttaaattaaataatgttattgctattttgatatttatgtttggcttttaaagtctaattataaatagttatattatgcaaactgtcttactccttttagaaagtgaggggtttattaaatgaacacaatatatttggttccatacagagtataaaactgtatagtctcttctagaaggtttttttttttgctcctcctcctcttcttcctcttcctctccttctttctcctcctcctccttccttctccttcttcttcttcttttttcttcttcttctttcttcttcttttgtttcttcttcttctttttttttttctttaagaaaagaagaggtcccactgagttgcccaggctgtctcgaactcctgagcgcaagtgatcctcctaccttggctgggactataggtgtgtgctgtcacgcctgtcttctaaaagttttaaattcaaagctgtgtttatatttacatcacagctacagtatcatgggttagaaaaagcccgaattctagttctgactttgtcattcgctagctgtgtgaccctacacaaatcacttaacatgtctgagctggttttcttttctgcacagggcatattgatacttgtcttcaagacctgactcacaaggatttagttcagctaacgcattaggaagtgaccagtaacttagatgtccccacacagataatagttgtcagagaggcattgccgggaaaacaccctggagttggacaaccagggttggagttccaactgcaccaattactatatatgtgaccctacacaagccattttctcctctaaacctttgttttctaatctataaaaaaatggtattatgatacatctcacataaaattgttgttgataattaaatgaggtaacatatgaaagtagctggtacattaatcagtgtttcttggaccttaatgttgattttgaaaaaagtccttgctgaccttcctctccccagctcatttactttcacgatacagcatttcactggaagtgggagccagtatccaaactgtgtacaaataagagagatgagcagtttcccagtctatgcatataattgaagactagtttgagttctagaagttccttgatatgacacatttaccaaatattttgggggcaattatgtagcataagacactcagctttttggaagagttttgagcaatgtgattctgtccctgtggcttaggtagagctgatcctttcttttcaagcacttagggtacatgactatttttttttctcccccataattattttattcttagtttcaggttgtttttaattcctataactttaaggacagtaatttagatggaggtcaaataattattattttttctctttgaagaaaagtctttgagacttagataataagaacaacccagataaaaccttagtcactaacaaaggaaccataatccaggtggttttcttatgtataaatatgtggtactaactcctgaggaaagtatggtttcttttctctcttattattatttttgagacagagccttgctctgtcgcccaggctggaatgcagtggcatgatcttggctcactgcaagctctgcctcccgggttcatgtcattctcctgtctcagcctcccgagtagctgggactacaggcgcccaccaccacgcccagctaatttttttttttgcatttttagtagagacggggtttcactgtattagccaggatggtctcgatctcctgaccttgtgatccgcctgcctcggcctcccaaagtgttaggatcacaggcatgagccaccatgcccggcctttttttttttttgagacagagtatcactctgttgcccaggctggagtacagtggcccgatctcagctcactgcaacctctacctcctgggttcaagcagttctcctgcttcagcctcctgagtagctgggactacaggtgcacgccaccacacctgcctaatttttaaatttttagtagagacggggtttcaccatgttggccaggctggtctcraactcctgacctcaaatgatccacccatstcagactcccaaagtgctgggatttcaggtgtgagccattgcacccagactttctctttattttctataatgacattggctgatatttctataatgtttatttgagatacagtataaaaaagtaagcaaaattttgggggtagattgagatgtaggagggtagtcatataaaaataataatactgcttatgtttaaaatcacatatacaaataatgtaactctagctgcataagcccataatttgttccagagatctttggaacatgtagaatctttggccagctcagttcctgtttaaggaaggcattcaacaaaagaaagttggaagtggacttcctggcgttttaaacatgaatttgatgtgttttgggagagatttgttaacctgtttgtggaccagaatatcttttgaaacactaatgacaaataatttatttaatgctattcacaaagcacattgtggagtatataatggtgccaccagagaaaaagcaatattaattgatattaatggctctgtgcgatagttcaaacttttatcttcctagccatattgagtttcaatgatgaataatcataaccatgtggtaagaatttgaaaatactgaggaaagtagcaatttaatataaatgcacagcaagaaaactgtctgcaagttattcttcaacaacaacaaaagttgaaggatagtttttttatgaggagaaatgcaatctatcctggttatgatattaaaaaggagcaaaatctgatacttcaggaaagttcatgcactttaagaagctttcaagcataagtataaatatcattgttcatgaagccctgtattccagtaataataataaaaacctttaaattgagcctttttatttatttacttattttttagagataggatcttgctttgtcacycaggctagagtgtagtagcacatagcacatagctcactgcagtcttgaactcttgggttcaagcaatattcctgcctcagtcctaagtagttgagactacaggcatgtgtcagataattatttttttattttattttaagaggtgtagtctcgctgaggcgactaggctggtcttgaactcctgaccttaagcgatcctcccacttcagcctcctgagagctttttagtttaaaaagtatatttatacacttactgaatttttgtaatgaccatttgatgtagaccraactttaataatgccacaatttacgtgaggatcaaggaggccaaatgactcaactaaaccccctgagactgaagggtacataattgaaactagatccagaactcttaactcttaatccattattttcatctcttacgtttctttttctcttctttctatttaacacattacaagaatgagactattccagtctatcgatttatttattttactgatattggaagtaaggaggagagattgtctgaaakttttgttaggggtgatagaatatgaaattaggatgccataatacctcagcgtattaaaagaaacacaattcaccatgtactttagatattttttaaaggataaaatgagatggtaggcagaaagaacttttaaactatgaagaattataaagatacaaggcataatgattctatcagttaggaaccttttagttgaaagtaacagaaaatccaacccaggatggcttggtgaaatttattgactcaygtaactaaacattctgggataggactgtgtatcagacagcgtgttttcagctgcaagtaacagaaaactacttactcaaactggctaaaccaagataacttaacttattattttacataaaagagagctgtgtgtggtggcttgtgcctgtaatcccagcgcttttggaggccaagcaggaggatcgcttaggcccacaagtttgagactagcctgggcaacatggtgagaccatgtctctatgaaaaataaaaaaattagctgtgtttggtagtatgtgcctgtggtcccagctactagggaggctgaggcaggaggatcacttgagcctggggggttgaggctgcagtaaaccatgatcacactactgtgttccaaccttgatgacagagtgagaccctgtctcaaaataaataagaggtagagtgggctccaaattggttaactgagcaactcaccgatgtcaccaaggacttaggtttatttcttctttttgctttgccattcttggcattggtgtctttctcagctggcaggaagatggtggtagaaattcctagaccacacacagataaggcaaaatacagaggaagaaagggactgtctctttctgtgtttctttattaggcgtgaaaaaatattttccagagcttcctggacatcttcctcctatatcttataagctggcattgggccacatgcttacacctaaaccatcacttaggctagttcacttttatgcctggaatagggggatgtgagtcattttcctccaaagtgcttgcaatctgtacacatctgggaattgtgttaggaggggaaaagagtggacaatctccagtgcccacccctgactgtctcgaagtaagactggagccagaggctctgctttcctcatgtcagcgttgttgccaggcccactcttctaatgtttgcagtgataactgcagtcattttagacctcatataatttagaagaagtgagggacacagaaccaccgtttggtagcttctatggaaaagagaagaggattctttccccaaacccccaataagttcattcttggattttcttggcctaaattggtagtcattaagcaatttaaacctgaggatgtggtcactcccacccaagctaccatatggcttaaaatggggaagagaagtttccaaaggaaaattagggggaaagggaatagatactgaagatgttgatgtctagcacaataataacaattcaaggccctccatcttctggccccaaagggcaatagctttctccttcaattagtctgtcttccatatagatgaggcagagtgataagcatgcagtccccaatctttatggcaccagggactggtttcatggaagacagtttttccatgtattgggacaagtgggatggtctctggatgaaactgttccacctcagatcatcaggcattagattatcataaggtgcaggcaatctagatccctcgcatgtgcagctcaccttagggttcatgctcctatgagagtgtaatgccgctgctgatmtgacagaaggctgaactcagtcagtaatgcttgcctgcctgctactcacctcctgctgtgtggcctggttcctaacaggccaagggctggtaccagtctgcagcctaggggttggggacccctgcaataagacaaataagkctagtaagataaaatccctacctactaaaaggttttattttaattttattttttttgagatagagtctcgctctgtcacccaggctgaggtgcagtggtgcaatctcggctcactgtaacctctgcctcctgggttcaagcgattctcctgcctcagcctcctgagtagctgggattacaggcacctgccaccatgcctggctattttttttttttatttttagagatgggttttcaccatgttggccaggctagtctcgaactcctgaccttaggtgatctgcctgcctcagcctcccaaagtaatcccaaagcctgggattacaggtgtgagtcacygcgcccagcctaaagacatgagattctaaagctgaactgcccaatgttgtaaccactagccgaatttggatactgagmactttaaatgtagctggttcttccaaattgagacaagatgtaagggtaaatacatgctggatcttaaaaacttaatttaaaaaatgaaaaccatcttaataatttttacattgattataggctgaaatgacaatattttggatatactgggttatatagttttaaattaaattaattcagctatttcttcttacttttgttactgtgactattagaaaatttaaaattatttagcttacattgtatttctattgggcagtgatgctctagaaaatgaaatagtcatgggtactccatcagttatggaaataggcaatgatggcagtaaagcaacaaatacagattaccccagaaggtgttaaggatttcattgtacaatgaaaaacatcattaagattatatctactgaatcagtcattttccttacgttgtgtgataccttgttacgagtttactttccaaatcttttttgatttagtttagtttgtccgtcagagagtgttatattttaaaaaaaagttaaatgctgcctttcactgcctgttgtgtagcgtacttagattctggaagcaaatatttcttagaggagcattgataatatggccacttcactgttagttttattgttttcatatgagtatgagtgagggtatgaaagctcacagtagcttcttaaggttccttctgacttaaatgttcattatcttttgatgagtgaatgagcaggaactttgcattctttagaaactagtgtatcacggccgggcgcggtggctcacgcctgtaatcccagcactttgggaggccgaggcgggcggatcacgaggtcaggagatcgagaccatcccggctaaaacggtgaaaccccgtctctactaaaaatacaaaaaattagccgggcgtagtggcgggcgcctgtagtcccagctacttgggaggctgaggcaggagaatggcgtgaacccgggaggcggagcttgcagtgagccgagatcccgccactgcactccagcctgggcgacagagcgagactccatctcaaaaaaaaaaaaaaaaaaaaaaacctagtgtatcactttcttattttgcagttcaaaatataaaatctttgaggatgcttgaatttctagacctttatcatatacttagaggtatatttgctgatagttgtgcattgatactgtgatagcttcttattctcccgtgaagaactgatctgaagtcatggagctttagttacctgctgctcttattccaccttgcagtggctatcacattcctacaggttttcaacacagcttcccatgaagttccattcactgaaagatatagctggctccattccttacagaaaaaagaaactaatgccctgcttgccaacttttggctgtctagaatggaatgttattctgcacgggaggaagcacgatggaaaagggttcttctacctgcaggaaatctaatgtttgctttgtagtgaagcatgcgaaaagttgaaagaaaggaagcaaaggaagaggcttggtcattagaagttcagtttgtgtgagatttcctttttttcctttttgtttttctctatcctgttataccatcatggtattttaattttttttttcctagstaatgggtaaattgcttttatattggtgtttgggacccactgtgaataccatggacagattcaccggaaaaaaaaaaaaaaaaaacaacaaaccaaggaggagaaaaatgttgtttcttctacttacttcccatcattttgtgaaggagagtcagaaaagctgttttctacacatactcccttctccctcaacccattcacagtgatttttgtcagcaaactaatatgccattgattttacagttaggatcagaaatatgcaccattcttgacttaaccgatttttttccccctgagaacaatatcatttttacactagagaatatgtgcaaaaacttattatctacaaagctgaatgtattttgcccttgccgggaacataaagggttaaattgaaggctcaacaaagactgggatgaaaagaggacaagttggggggccatagttgtttcctgtaggcattcactgttttgtagccagtggcatttttttttgtcctcatcactagctcctttaacacacctctgggatttgctctgagcttggctgaacactcttgacctttgattgtatagcagggacagctttattttatgaagctcttctgattcagacacattttgacatggcctaaaaagccattcagtaagtagtaaatgcaccctatttctgagtgggatgcaggttatggatgtgttaaggctcaatcaaggttctgttaggaattaggactggtgtgaaactccaggatactgggagagggttgagagtgaggcctgaggtaaggatccgggatggaggaagaggcttgcaatgcctgtggtggacattatctgataaatttcatttagtgatttcggcatgaaacagccatattaaaatgccctttctggcttattaaatagaagctactcagtacatgtttgttgaacttagcttcttaaccgatgataccttttcaaccctgcttctcttcttctataatttgggccccacaagttacccagattatggttgacaaacttgagtagcactgcacattttagtcaagtgagtcatatttttgaaggaaaatgaggtcaaataaagacttggtaaacataaaaagcccctttgaaatctccacacaacttttcaccatttggtttcttttttgctctctttttactgtcacatgaattggtacaagttgttttaaaatctccagaccccaattccatggcccccctcccccctttttaaattgggttaatagtctttaaagtccattttagttctaaaacatactgattttaacacctcattcactaaataaattgctttttttcaggcactataatgcaagataaataaaattgtctatatttaaaaatgtatttaccaactttcaaatataggcttgcctatattttaattgtagtgtatgcatgatgcagacctttgggactataacctttgatttcagcattataaaatgtcaggtcccttggcagaaaccactttaaaatgggtgagacctgaactcaaatccttggctctgacaagtactggctgtgtgaccttaggcaaattacttatttttaccaggcttcagtttcctcatttgtaatatggtgataccaatgtcctttataaagttactgtaaagatgaagtgagataatgggatgtaaattgtctagcgtgaagcctggcctacaggaaaccctcaatacatgttacctaatgctactgtctgaaaatgtgtcccagaatctctctagccaacataaaaacacattttatgatgtaactctttacatcataaattgaggagtatttcagtcaataaatgtttataaataaattaacrgtcagatgtattccaagtggaaatggacctgacattttatttttctttgcagatcttatattgcactttaaacacacctaaaattgacatggaaagactcttaggaggacaactaggactagaagatttcatatttgcccatgtgaaaggaatcgaaaaagaagtgaatgtgtataaatctgaggattcacttggtctcaccattacagataatggtgttggctatgcttttataaaggtaagttttaaaaaataacagtgtaacctaattgaggataacatttaagaaaatctaccaggccaaagaaagttagaaatgatcttcagagtgagagcccgctcagcaaggatgcatgaattggtaatgtttcactttcattttaaaaatgttcagatrtcagtttgtgtttactattttcttaatttcttccctttagtttaaacttcccctagaatttagaactaactgaaaggaaagtctaaccctggtgcctactcattatccatataagcttttccatgtctgtaggttttaacatctgatgaatttctggcttatttccattgaattagtgttatttccaactgttcctagttttgactgccttatttacttctttaaaaatgcccttcaaaattttaggaagtatataaagttggatctctgtatctgtaggttctgtattagtggattcaaccaaccacagattaaaggtagttgaaaaaatggcatctgtactgaacatgtatggcctttttacttgtcattatttcctaaacaatacagtacwactgcttatgtagcattgccattgtgttaggtattataatctagagatgatttaaagtatatagaaggatgtggataggttatatgcaaatactacaccattttataccagggacttgaacatcagtggaattttagtattgatggtgtgtcctggaaccaatcccccatggatacccagggccaactgtaattcctttattcaaatacaaagagagcgatatagagcttcaaaggcaagataaaagtttgaaatggtgtgaaactaagaactgaggagaaaggtagtctcatctcttaaaaataacaactctattattgtaatagttataatagtaacagacttatattgaatgcatgtactaggcactttgcatacaatttctcacttaattctcacaattctatttggttggtattatgttttttctttgtatttatttttttgttgcagtataagacatttttaatgtacagcttaatgaatgtttacatacttatccctgtttaaccatcacccagatcaggataaattgcatttctgccactcagaaggctcatttgtgccccktcccagtcaataatctttccccgcaaagtagccattattctggcatctattgccatgaacttcatataatcatatattatatactccactattttcggcttcttttgctcaaaaagatgcctatgagatccatggataggtactatttccaaccytattttacagatgtggaaacaggctcaggaaggttaagtagcttgcccaaagttatacagctggacacattcaggatttggatctatgaggtctgacttcagagctggcacttctattcactcgattaagaattaatgatagatttcatgcaacagggaatattttgtgcctttattttgtccaaatcttgatttgctgatgcattgtcaccattaaataatctyagggaagttatcttcttaactgtaaatgggactttcgctacccacttgatagaatggctatttttagctctgcaaaagatatgactgtgctgaaggttgagtgagtgaccaaatggaaaatctgtgactgggaaagtcatatgggattatccaagggaagctcaggacatgaggcacaggcagcagagaagggcttggaagtttcacaaacgtgtgtggatttttaaaatcttagcctctgacattcagagcttgtctttctattttttaaaaaatgctttgtcaaacatgtgcctgactcagagtactagtcactagccctgtggagatatagggcatgttagcaaaggagaaagcaaggcrtaatctaaactgccaacatatagttcaacttagaagagagatgcacattatactgtatacatggttgatgaaattttttaaaaattgggagaggataatttcaaacttacataaagattgcaataataatacaaagaactcccataaatcatttatccaaatctccaatttttaccatttgccatgtttgagttttttgttctgtctcatacacacatatatatatatatactctttaccccttagtacttcagagtgtaattactaagaacaaggatattctcttacatataactacagtacaattatgaaattcatacagtctaatattgatataatacttttaaactaatctatagttcacattgtagtcttatcagctgtcctaattgtgttcattattttcccctcatacaggtccaatttaggatcctgtatttcatttatgtctttttagtcttctttataatctagaatagttgtcatgtctttttagtcttccttaatctagaatagttcctcagccttttataggatgtccctgaatttgggtttttctgatgtttcctcatgttgataaatagattgtgcatttttggtaggaaaattacataagtgatgctgtgtccttctcagtgcaccacatcagaaggtacatgaaactggtttgtctcattgtttgtgagattaacttttgtcacttgtctgaggtagtgtccactagtctttttcactacaaaattattttcctttgtgatacgtaattgtggagagatgctttgatatcatgaaaataccctgttttcttacttgcatggcacaaatttagtatctgttgatgagtcttacctgaattaatttttcctataatggttgaaaaaatgatgatttttctaattccatcactccttatatgtttctctgaaagcattttatggtagggaaaaagctgcccttatttattgtcaacatgggtacatgacttcgtgttttactgaatggtttatagtctgttactatcaattatattgatgctcaaatttcctgagacttggcctgcaggaacccctgtaagtgggcccccatgtccttttgacatggctcctatcattttattgagtaggttcttactttctagaacacaacaagatattctagacccatcttgtatctccttttcccctgacctagaatcaactatttctctcagaagctctgatttttactagagatygatagtcaagttctggtgttagctgtgctcatacactgaagtcaagttctggtgttagctgtgctcatacactgaagtcaagttctggtgttagctgtgctcatacactgaagtcaagattgatagtcaagttctggtgttagctgtgctcatacattgaagtcaagttctggtgttagctgtgctcatacattgctattggagtgcattatttctagatcctttcagtggtasaattagagaacatgtttattagaagttatgaattgggccaggcatggtggctcacacctgttatcccagcactttgggaggctgaggtaggtggataacttgaggccaggagttcgagaccaacctggccaacatggtgaaactccatctctactaaaaatgcaaaaattagctgggtgtggtgcacacctgtaattccagctacttgggaggccaagacaggagaatcacttgagcctgggaggtggaggttgcaatgagccgagatcatgtcactgcactccagcctgggcgacagagggagactctgtctcaaaaaaaaaaaaaaaaaattacgaactcgtaacgatgcttctaattgtcatcctgccccacagggttatttcttggcttccccatcaaaatttttactttcaaagtcattaaaatatttactcattgtagagatctttcaccttcctggttagctgtattcctaggtattttattctttttgtgacaattgtgaatgagattgtctttctgatttggtgcttggtttggctgttggtgtataggaatgttagttagggatttttgtacattgattttgtatcttgaaactttgctgaagttgtttatcagctgaaggagcttttgggtcaagactattgggttttccagatacagaatcatgtcatctgcaaacagagatagtttgacttcctctttccctatttggatgccctttattgcttttttctgcctgattgctctggctaggacttccaatactatgttaagtaggagtggtgagagagagcatatttgtcttgtgctggttttcaaggggaatgcttctggcttttttccattcagtataatgttggctgtgggtttgtcatagattggtcttattattttgatgtatgtatacctagtttgatgagagtttttaacatgaagggtgttgaattttatcaaaagccttttctgcatctattgagataatcatgttgtttttgtctttagttctgtttatgtgatgaagcacatttattgatatgcttatgttgaaccaatcttgcatcctggggatgaagcctacttgctcatgctggattaggtttttgatgtgctgctggatttgatttgcaagtattttgttgaggatttttgcatcagtgttcagcaaggatattggcctgaagttttcttttttggttgtgtctctgccaggttttggtatcaggatgatgtggcctcatagaatgaattggggaggagtccctcctcctcagtagtttctataggaatggcaccagcttttctttgtatatttgatagaattcagttgtgaatccatcaggttctaggcttttttttttttttggttggtaggttatttattactgcttcaatttcattattggtctgttcaggaaatyagtttcttcctggttcagtcttgggagagtgtatgtgtccaggaatttattcatctcttctagttttctagttagtgtgcatagaggtgtttatagtagtttctgatggttatttttatttctgtggggtcagtggttacattgtcttcatcatttctaattgtgtttatttagatcttctctcttttcttctttattagtctagctagtggcctgtctatctaactaatttttttcataaaaccaactcctggatctattgatcttttgaatgtttttttttttttttgtcttgttcagttcagctctggttttggttatttcttgtcttctgctaactttggggttgatttatttttgcgtctctagttctcttagttgtgatgttaggtagttaaggtttgagatctttctaacttttttaatgtgggcattatagtgctataagtttccctcttaaaactgccttatcagtgtcccagagattctggtatgttgtatctttgttctcattagtttcaaataatttcttgatttctgccttaatttcactatttacccaaaagtcattcaggagcatgttgtttaatttccatgtaattgcatgggttttagcaattttcttgacttctatttttattgcactgtggtccaagagtatgtttggtatgatttcagttcttttgcatttgctgaggagtgttttatgtccagttataatatgtggtcaattttagagtatataccatgtggtgatgacaagaatgtatattctgttgtttttgggtggagagttctrtagaggtctttcagatccatttggtccaatgttgagttcaggtcctgaatatctttgttaattttctacctcaatgatctgtctactactgtcagtagagtgttgaagtctcccactattgttctgtgggagtctgtgtctctttgtaggtctttaagaacttgctttatgaatctgggtactcctgtgttgggtgcatatatatttaggatagttaggttgtcttgtcagattgaacccttttaccattatataattcccttctctgtcttttttgatctttgttggtttgaagtctgttttgtctgaaacaaaacagggataggattgcagcccctgcttttttttgttttccatttgcttggtagatttttttctccatccctttattttgaatcttgggtgttattttgtgtgagatgggtctcttgaagacagcataccgttgggtcttggttctttatccagcttgccactctgtgcattttaaatgggacatttagcctgtttacattcaaagttagtattgatatgtgtggatttgatcctatctttgtgttattagctggttattatgttggcttgtttgtgtgattgctttatagtaacactggtctatgtgtaagtatgttttgtattagctggtacagtgctcagagaaattagagaagagacaaacacatggaaaaatatcccatgcttgtggataggaagggtcaatatcattaaaatggctatactacctaaatcaatttgcagattcaatgctattcctatcaaattaccaatgacattcttcacagaactataaaaaattattttaaaattcatatggaacaacagtgacaaaaaagcctgaatagccaagataatcctaagcaaaaagaacaaagctggaggcatcatattacccgacttcaaactgtactacagggctacagtaaccaaacagcatggtacttgtacaaaaacaggcacatagaccaatggaacagaatagagagcccagaaataaggctgcacagctacaaccacctgatatttaacaaagctgacaaaaataagcaatggggaagactccctatttaataaatgatgctgggatagccatatgcagctaagaaatgatgctggctagccatatgcagaagactgaagctggacccctccttacaccatatacaataattaagatgaattaaagacttaaatgtaaaattcaaaactataaaaactctggaagacaatgtaggcaatatcattctgaacattggaatgggcaaagatttcatgacaaagacaccaaagcaatcagaatagaagcaaatattgacaagtgggatctaattaaacttaggagcttctgcacagcaagagaaactatcaacagagtaaacagacaacctacagaataggagaaaaatatttgcaaactatgtatctgataaaggtctaatatccagcatctttaaggaaagttaccagaaaaaaaagacaactccattaaaaagtggacaaaggacatgaacacttttcaaaagcagacacacatgtggccaacaataatattaaaaaaaaagctgaacctcactgatcattagagaaatgcaaatcaaaaccacagtgagataccatctcacaccagtcagaatggctattattaaaaaataaaaaaataagttgctggtgaggttgcagagaaaagggaaccctcatacactgttggtgtgagtgtaaattagttcagccattgtggaaaaccgtatggcaattcgtcagctaaaagcagaactaccatttgactcagcaatcccattactgggtgtatacccagaggattagaaagcattctaccatraagacacatgcatgtatatgtttactgcagcactgttcacaatagtaatgacatggaatcaacctaaatgccaatcagcagcagactggataaagaaatgtggtacatatacaccatggaatactatgcagcattaaaaagaatgagatcatgtcttttgtggcaacatggatgtagctggaggctattatcctcagcaaactaatgcaggaaggaagagaaaaccaagtactgcatgttctcacttataagtgggagctaaatgatgagaacttatgaacrcaaaggaggaaacaacagacactggggtctmcttgaccccagtcatagtgagactctgtctctacaacaaatagaaaatcccttaaccccaacatagtgagactctgtctctacagcaaatagaaaaaattagctgggtatagtggcatgcacctatagtaccagctactcwtgaggctgaggtgggagaattgcttgagcctggggaactcaaggttgcagtgagccatgatcatgccaccactctcagcaagacactgtctcttaaaaaaaaaaaaaaagtcaaactataaaaaatacattcagagatgtgtcactccttctcctaactcttctatcccattacttttccacactccttagagataaccaattttattaatttctgttttatccttcctgtgtttctttttgccaagataagcaaaatggaatgtttcatgagtttgcatatcaccatgtgcagagaccatgctgtgtgattataattttaatgtatgtgctgctgaagtgagcacttggtatgtttttaacttggctggaaataagagtaggttaaagtcacagtaggacagtgtggtaggtgttcaaatgagggtgagcattccacggtgagagaggcattacagtgcggtgcataggggcatggactttagaatcagataggcctgctttcagtcttagccagatcacttatttactggctgtgtaayattggccaaggcattaaacttttctgagccttctctcaagtgggaatgttagcacctactttatagtattatttgggggtataaatataatgacacgcttaaaatgtctgcagtactcacaattaatagctaatattttaatawtagttctaacaataaactattacataattaggagagatcaatggcagaaaaatgcattttatagttttgtatggttcacacagatgaaactggtttttttgtttgtttgtttttgtagagacaaggttttgccatgctgctcagttgagcagggctcaagtgatccctctctctaggcctcccaaaatgctgggrttacagggatgagccaccatacgtggcccagatgaaactttttaggtgaaaaaacaacctacttaaatgttcatgattttattatctaagtctcaacatttctaagaacaaaaagtatataaataccttaatcagaaaattaagagcatacttataacaaaacctgtatatagttaaggcagcagctggaaaatgttttctgtaaagggcagatggtaaatattttgtgctttgtgggttatatggtctttgctgcaactacttaactaagcccatgtagcacaaaaacagttacagataatacttagatgaatgagcatgcatgtttcccagtgagaacttactcatagacactgtaatttgaatttattataattttcacatcataaatcttcttttgatttttttccgaaccattcaaaaaggtaaaaaccattcataactcatgggccatataaaaacaggtggtggcccatggtggagggtacacatcaccctggagttctgctgtgagccatagtttgatgacacctggtttaagagaatagacttgtactttaattaattaattaatttacttacttacttatttattgagacggagtctcactctgtcgcccaggctgtagtgcagtggtgtggtcttggctcactgcaacctctgcctcctgggttcaagcgattctcctgcctcagcctcccgagtagctggggttataggaatgtgccaccatgcctgggtaatttttgcatttttagtagagacagggtttcaccatgttggccaggctggtcttgaactcctgacttcaggtgatctgcccgcctcaccctcccaaagtgctaggattacaggcatgagccaccgcaccaagctgagacttgtactttcaaatttaaaataaaaataaggatttataacatgcaattaagaaatgaggctaaattgatttttaaaaacccacctgactttgttttaaattgaaatagtttgactaaccacaaaactgtcattctcagaatatctccttcagatctttatgatttgccatacttttgctttagtagaaccacattttagagtgatcatttcgagaaatatgatacttacatatttctaacattttacttgttcatttgcccaaactaagaatcagcaagactggaaatataggaagtcaagggggcagaggattacaggatggaagctaggatctgagcagaggtctgtgaagccagaatagacatgatgatttgtgaaaacaggtactgtttgagatctggagaccatgatgaggtgttgatgagaaacagctttagtagaaataaggaaacggaaaatggaaaaataaggctgtcaaaaaaaaatttcagagttcaaaggtgatagattattttggacatttataacccaaaactttgtactttaggtcagaagaccttgggttctataccttttttaaaaacatttttaattttaaaaattatgtcacctctgtttaagacctaattctgttgtttattagctgtgttatcttgggcaagccatgtaattattgtggcttaaattcctcattcattaaatggaatgataaatatccttttcctaggcttattgtgaagactaaatgagataactatttacaactgtatgactgttagcttattattatgggcgaggtttgaggacagtgttggaaggatcagcaacacaaatctcaaagttgctgatcatggcgactggacatgtagctcagagtctggtgcttaagattttagggagagtggagccgataaggcggccgcaggggcggagccaggggcctttgcctggcttggtggctggctctaccttccctgttttcacctcccgctgcgctaatggctcccaaaggcagctccaaacagccgtccgaggaggacctgctcctgcaggatttcagcggcaacctctcggccaagtccttcgcgatcttcttcgggaatgcgttcgtcgtgtctgccatccccatctggttatactggagaatatggcatatggatcttattcagtctgctgttttctatagtgtgatgaccctagaaagcacatatttggtagcctttgcatacaagaatgttaaatttgttctcaagcacaaagtagcacagaagagggargatactgtttccaaagaagtgactrgaaaactttctgaagctgataatagaargatgtctcggaaggagaaagatgtaagaatcttgtggaagaagaatgaagttgctgattctgaagctacaacattttccattttctattaacarcactctgttcctgttcttggtcatttttgcttcttcttcgttttgaagaacttcamccccacagtgaactacattttgtccataagtgcttcatcaggactcatcgccctcctgtctactggctccaagtagaccatgtcagcttcaccccccggctttgtgtctgtgggtggcctgtggtatatggaaaagtagcagggtgttcaggatgggagacacacaagatgtttttatagtctagagcctttaaaaaacccaagggaatgtaattgaaaggggaaaaaaaagattttagggagagtrtatgctgccctagacttctgctgacatctgtgatgagaaggcagaattctctaaatatatgggatgaacataatggaagatattataataatgatctgaaatggttggaaacctctatgtttaataatgtaaatcctatcttccaataaataaataaatcttctctaccttttgcaccatcaagcttcaaagacaggtgaaagttcctgagtgttatagagaatagtataagtaactcagtaaataaagtatagcattaatgcctctcttttttccttcttattcctttgcatctgattagtgcctttggcaatattattaatctctgtcaagttattttatgattatcaaagcacattaggtttcagaaacttgtctccattgctccygtattgtttattctgcccactttggaggctaaggctcaggtaacccataaaatatataatccatgtctccaactttgcttctttatctggttcatcttctccaagtttcctatattgaytttcctgtgtcttcattccagattcttatctgctgcctctgatagtgaaatgtgctgtgacttttctcttgctacctggattctcaccctgctgtctgctctgacttccggtgactgcctttcttccctctgggcactcttctggttgctgaggcatctctaggattactgaagtgactcatgggcctctgcaaccctagatttctgttactctgacctttaattccctggtgagattcaggtgtgtcttcaaagtctttaacttttatataatgcttattttaaataaaattgtaactctaaatcttaagctaaaaatactgtgtggtgagactctgaaatttgtatggtgtagttgaccaaataaaaaaataaattcaagatgtatcaagagataaattagaataaaaactaagaaaaaaaatcaaagtatagattattgaattctttgatgaattatgaattgtgtaaaatatttaatagttttttcttctttagactctagtcttttctttaatcttgtttatttttctatgacagttgagaaactctagttgtactgagtgattcccattgtttctgttagcgatataagtttaatatgggtttctaataaaataatgtyggtagattatgaaacttctggtatctttgtttaactatttctaatgacagtgagctctgtttaaattggcattattgtgacatttgcatatagcatgttaacagycactattagaatgaatgaacatagcaatattcttaaaatttgggataaaagagaaatctattttgagttttgatttataataatgcaatttaaacattaaaaatgcttaaccttcctaagttattcttgttcctgatgacaatatgacggagatgctggaggtagttgagatcagttttctcctagctcttggacacaatgatcaatcaccctgctgattcagaagatgttatacttccacctagcaagggtaaagaatacacaacctttattacacaatagcagccactcctgatattgctatcattcctatgaaggatttgggacttctgagacagattatggccttcattttgcctcattcctcatcactgtggaagaacttgtacatcctctgcagggctgttttctgcaattctggaagatttttctggagctcctgcccctaaaatcctttcagaaattcttggtgccatcttgggaatactagataccattttgatactttaccctacagatgtattgtagagaagtaagatagatttaagaaagaccaacttgaagtttctccttggsgtcctacattctgttcatctaaaatacataaatgaaaaacaatagcatcaaatcacccttactggctcccaaaatgataaccatacttatcttttattgggtatcaggcrtcttagctaagatggtattattctttgtgtctttgcatctgtaactaaatgcagccaattgaaaaagctcaagctctattcttatgtgatgggcctcaattgaaatgattcagtaatcactaatgaagggactttgcagatattgtgctaggcacagacatgcagtagtgaataagaccatctctgtcctcaaggatattagtttagtaatggagactgagaagtaaatgaacaatcgcactgtggtatgttgaatctggcaaattacttgatcttctgaagctttaatcttcctgacctgtgacatgagaatctcataaaggttgttagaattaaatgaaataacaaatgtaaagtgcttagtttagaattcagcatatacagcaaaacgtactgtagaagcatgagagtggcaccttacccattcttggtggagtgggttgggaatgtcaggaaaagcttcccagaggaggtggtgtatgagtgagctgaattctgaatgataaggaagacgaagaatggttggaggtaagatagtggttcttggttgctcagtcttccatctctaactgagcatcagactgcattgttatgtcaatacattgtatttaatgtctcaaaagcataaaaagtactgttacacagtttttttttaaacctgtagcatctgatattcccaggcagtctcccatccaagtactaaccaggcccaaacctgcttagcttccaagatcagatgagattggtrcattcattacacagttctattttatattatgttatcatcaatttcctttcagagaattaaagatggtggtgttattgactcagttaaaacaatctgtgttggggatcatattgaatccataaatggagaaaatattgttgggtggcgtcactatgatgttgctaagaagttaaaggaattaaaaaaggaggaactctttactatgaagttaatagaacctaagaaggcatttggtaagtcaggggttggtgggcgggtgtgtgaaatgtttgctttccctggtttatctttctaagggaaatgagtactgtgatatggtgctatgtgcttttagtgtcttcttatctaacatatcagttaaaaacatagaaaatggtagcactacttataagaaagacaactattgaaggaagaaaaaagagaaaattattgccttgtaaaaggacattttccaaacatttgaaattacaaagtctaatgtctagtgactgaatttgatgtggctgttcctatctctgagaacagcacattgtattgttttcattttgctgagcagtaagatttttgactgagcttttaaaccataataactgttgctcatggatctcagcagcaaaaattatagttatatacagaatggtatttaaaatagttatctagtccattttaaagacccccttccccaatacctttcctccattggcattttgaatttggcagcatgggatggtatgaaattatttccactttggggtgacatctgtacttgcttggttttagccatgacagctgtattccaactgttgttcaatcacccagggctatctcatctacagaaaaatgtgccagcttctctcttaccacccagaactattttaataagccaaaccaaggcctagcattcatcagcgttaaaatatctgtagcagaatcatctcaggcttgctgttactcatcatgaccccacgcaccctatgttctttcctttgttcacagaacataaatattccatttagtttgtctctaatgccattttctcagggcagttattggaaataatggaagaatgcagtggatctggggaattatgttttctgtgtcttagcaagtaagtgacaggtcctaggcatgtggaattagaattttttctctgcttctacatgcttctgcaccatttaacagaaatacaagtgtaggttatattacctgtgggaggcagttttccagaaggtgtaagaaaaagatgccttataccagtacctcctggagggagcactctaggaactacctctgtagatgctgtgattctgcctggtgccttgcagcatctgagctcacttctcacagaggaaggaaagcagcactcaggtttctatccagtaactcctttcaagatggcttcatttggtaacctaactccccagatagcatggtgaaataaattgacagggtgtagatggtttgagataaatattcttatttgatttagactctttgtaaatcaaagccattctattagcataactcaagaaatctatttttttctgtattgatctccactacataatctgtttccagagtaaatttttctgttttttttttttttcccattgtctgcatctagatcttttggtcctcatgtctttgtagaaagttattgatataccttaacttggatgctaggttggtgatagtcttaaatgttgcaaaggtcgttgtatttagctattattgttccatgattagattttcccttcagtgttgtagacatgagtagagtcagtatacttcactgccttatgtacctaactactattgaaccggctgttgcctcatgaaatcaatggacacatttgcaaagtaccctgagtaggattttcctaatagaggtatattatttgagcatcctgaattctggtagggctgttggttagaacatccagagattgactttggaggaataagtttttattttccaaggtttctatggaagtttaactcaagctgctggtctttatgcattttctgtgctgtggattgattcttgactctgggccctagtgtgaggggtttctttcttaaaagtaagcctggctgctctgcctgtcctccagccctgaatttttctgcttattgttttgcctctgggataaagacaaagctactttgtttttcatcctttggcttcgtcccagtgcttagctctttgccagagaggggagcatatatcagggggtacttggggaatcaggcttcccccaattctcttggttctaatcttatcttttgctatgtttcctttytttttttcctgtattttctggcattattattgactcagggccaagaattcaaatttcatagtccttcatgattgtctgattctctgtcctcttggatttctaccaggagaagggccagtcttagtgaggcagagttttctctgcattcagataggccaccttggctgtagctaagtcacttataggattttaacaaaagctgtcagaaatggctatatacaccaatattttgacattttcctaccaacttccctaaagacttagcctggagaggcatgtggactatatcccaaaacacaagaggaaggagcatagttggctgctttgcaatggcgtaactaggactgcaagcaccacttctttgtagtggttagggaaatcctttctgcctgccttcatttccatattttaggtccaccactagctacactccacttccaggggccattatatgtgttaatattctttgatggagagctacgtaataaacactgtctaatttcaggagaaggcatttattagagactaccatgtaggtcccagaaacagtcaattgagccttgacaaggtcaggaaccaagcctgtttcaggggtgtgtgtaccaggaaccattcatggcactggctgaattgactcttggcaattattttctrttttcatatcacttcactcaggattcaaattcctgggagaggtggagcaagtaagtaggtcttgtacccatcttgataatggggaaggcaggctatatgatacacctaccaaaatcacacataacatgaagggataaatttccttataggtaggaaaaaagtagcagatgcccattttgctatttcttctaagctgttatatcttgttctgcagccacagcagtattgattttctcttgattttgaatctgactgtagccatgtatgatatctgtcagtctgggagtattggaatggatttggagggagaagcgtattgtcaattgttgtgggtgtttgaccttaaggattttatttttctgctatgagttgggtgccacatacatagctgtttggcagtggactatctagagatgatgacagcatccaactttctttcagagaaagagtaaagtcacattttccttggtgctggccatcagatttggaggggaccaattttgactatacttaccaattttgactatacttaacaattttgactataattaccaattttgactatacttctaggaagatttttaattatctgtaaattatttttaatttatctatctcacaaattatttttaawttatctatctcacaaattattragactcttctgtgtttcaggtactctgtgtggcatagaaaatactaaggaggaagactaagttatggctcctgcctttcgaggagctcatggtctaacaggaggctgttatgggctgaattgtgtccttcaaaattcacatgttgaagtcctaatcttcactaccttagaatgcaactggatttgtagataggggctttaaagatgtaaytaggttaaaatgacatcatttgggtgggccctaatccaatatgactggtgtacttattagaagaggaaatttagacacagacacagggaggatgccatttgaacatgaagataactatctatctgtaagtcaaggagagaggcctcaaaagaaaccaaccctagagaaaccttgatcctgaacttctggcctctagaactctgagaaaataaatttctattgtttaagccacctagtctatggtactttgttatggcagcactaggaaattatagaggataataggaaaaaaattacagtaccagttctttgactatggaagtagaccttgggcttcctaataatctagaaggtacaggtattttagcattcctctggccttgggaagatagcaagagcatactaatatgtttccattcagacatttgttgagtaattagtatatgcttgtcttagggtattagttgccctagacaataatagttaccatttattgaaagcctactgtataccatcaccataccacctgcttggtacatgcatgaataagatccagatctaggaactcatgtctagtgagaagagatggatatgaaaaaaataaataaatttaataaaggcgattagaggtgctaaaatatactggatgtgtaaaggtgggagacatcaagtgtgcttaagaagttcaggaaaagctttcttttcttttcttttctctttctttttttttttttgagacggagttttgctctgttgcccgggatggagtacagtggcacgatctcagctcactgcaacttccgcctcccaggttcaagcgattctcctgcctcagcctcccgagtagctgggactacaggcacgtgccaccgtgctcggctaattttttgtatttttagtagagacagggtttcattgtgttagccaggatggtctcaatctcctgacctcgtgatctgcccacctcggcctcccaaagtgctaggattacaggcgtgagtcactgcgcccagccaggaaaagctttctaaggaaagagatttgagttgagtctgaaggtatgaatggtgcttacttagtggatgaattggggaaggttgtcctaggaagtgggaacagaataagcaaagttacagaggtacagaatagcatcatgtatttgggaacaccttgtttgccagtgtttttggttagaggttataggtggtggcgtcacaggaaatgaagctcaagagtcagtagagaacaaatatatcaagggccttatatatgaagacaaagactgggcaatgaagaggcagaggggtaacatggtgagtctttaattttacaaagatattttggagactgttagataaagggatataagatagagtttaggagatcataaatgttctattaacaataatagctataatttgttcagtgtgagagacatgaattaaggcagtgcctgtaggcatgaagagaagagaaatggtttggaggaatagatggtggtgtgctggagccatttgtacacatctcttcccaactcctccttcattgacatcaggttaattgttttaaatgagctataatgggatatttataaaagagaaataggtaagccctgtaagtcagggctctttattttaatttttttagtgcagagagctgattgttaaatgtacctgcacaccactgaataataagattgaattggtaacctgttggacatagaagtaaaggaaggagagactgcaaatgatgacctcagatttgtggcttcagggagggagtatgctgtcattctttgagatgaggaaagctggcaaagaaatagatrtgggcgaggagataggataggaaagaaattataaatacaattttggactaaatgaatttgaaatctgtggaacgattcagttagacttgtacaaaagggctgggtgcggtggttcactcctataatcccagccctttgggaggttgaggagggagggtcacttgaggtcgggagtttgagaccagcctggccaatgtggtgaaaccctgtctctactaaaaatacaagaattagctggaaatggtggcaagcacctctagtctcagttgctcgggaggctgaggcaggagaatcacttgaatctgggaggtgggggttgcagtgagctgagatcacgccactgcactccagcctgggcaacagagtgagaccctgtcaaaaaaaaaaaaatacacacacacacacacacacacacacacacacacacacacatacacacgaggtagatgagcattgataattggggcctagagaatgagatttatgagtaattttctttgattggtcgcagaagctatggaaatagattcaatcactgagagtgataaaaggaccaaaaacagagcagtgaggggaacatcagcatttaaggggcagaaagagaaggaggagccagcactgaggaatggccagacatggaggacctggccttctgggtagcctttatccaagtactcaagatcaagtcacttgtcccacgagcagatgttccattgcactttcccaagttggctgtggggctctgagggaggaataaaggccattagaaaatgtaccctcagaatcttctgtgctggtcagaatttaaattactgtttttcaaccagtaggtttcaaccagtgtgtttagaacacaaagtagaatagagttgaaaatattgtgctttgtacattgcaaatattgtttcagttacaaataaatatgtgtatttcagttttattatctttgtgtatatttatgggtcatgatataacgtatgtattttttactgtgggtcacagaaaaaaacatttgaaagccactggcttaaatgactcccttgttgaaagtttgtagttgaatgggaaatctttcccatacttaacatggttccccctggtcagctggttactgattcaaattttccttgttctagccatgagctgatggcagcattcccagtccttatcaagtatcggctggaatgtctgtagtggtattttttagggcatggctcacttcctttctccttttgccaatgaaaaggagcatggctttacaatgagctcaaccttgcagagtttgccctgtaaacctagattttcccaaggccatgaaaatccctcttccatttaaatgactctaagaccagacaagaccaactcatttgttttcctataaggtcttttaaatgcagaaaaagaacaaatccataaagctttgatttggttttacttaaatgagtctcgacttcatttatcctgcaaatttccaatttgtgattcttgcgtgccctttatggaaagaggtttgaggaaggaggcctgaaatatttctgtaagagttttcaaaagcaggaagaaaattggaagaagaaacttacctcctaaagcatttatggtctttattttagggttggattttgtaacagatcattgggttatatcttcttttagaagattcatttctgtgcggtgtatccatcagaataggatgttaagtatgtgaagtgcatcttagtcttttgagtcattcacagctggaaaactcggacctcatcttcgtgattcagcttaactgatgtactcacttcaaaggctaagcctatttgatattaagagataaactgtggcttttaagttttatatgactttttggatagacatttcaaacatttaaaaattactttttattattcatgctgtatctagggaaaaaatttcaatcaattaatacttttggtaccttttcatatatactgaattctacaaaatatatttgggaatatgaaaaaagttacaaaagagatgataaatttcagtagttaagtgtgtagtctctgccagggactggcttatgatatgtgacattgggtaagttatttaacctttctgtgccttggtctcctcatacaaaatgtgaagatgtgtctaccacattgagctgttgtgaggattaaatgattaaacatgaaagaatcatagagcagtccctggtatatagtaagtcttcaataagttatctgttattattactattattataaaggtgtatccttttctttaaggaataattttagaaacaagataaacccactgaaacaggaaaagcaatgtggatgaattggtgatcaacaagtatttgttgagaactctggcactgtttggattctggaaagacagatggcaatatcacatctcatatcaactaaggaaatatgtcagtacatcataatagtagctgccattcgcttttcctaggactttctaagtaggaaatcatttagtccttacaaccaacctaaaaggtgaagcagtttgcccaaggttacagctagtgagcgagggaggcacacttctaaaccaagcagtcagcctccagagccagctctctaacagctgttacagtgagtcaacatgcttgctgtcctcagggaacttacagtttacataaagaggcagatacattaagaatcaagtaattctactaacaataatagctaccatttgttgaatgaaatatagtatagcagtgaagagcatagactgtgagctcagttacttaggtttgattcctatctttgctgcttttaaactgtgtgatttggggtgttatttaacccctctataagcctgtttacttacccataaagtattttgaggatgaaatgagttaatgtatgtatgtgcttagaacagtgttatgtaattgcaacccattgtgactaggactactgctattatggcctgacttaataatcctcatgccattcctatgagggtttttcagctaggtaaactgaggcttgggcagttaattcattaagactgcccagtggcaggcgtaagtgtgggcatagcactccagtcctgtttgctctcgaggcttgtgctctgaacattatgtgttactgcttcttcagaacataatgcagaccatgatgcatgctatagtgcagatttaaagagtgaagtttatctgagcgctgacttgtccatgattgggaggggttctaaggcttagagagtgatagggattgagaggtagtaagattggaaagaaactccctcaacaaagaaagctatgagacaggtgatttatggcaggtcccaccagtaacagggatcaatgtcctgttctcatgaaaggcgacaggacatctgatagaatggcataaggatattagagcttttaagtgctgtggctttgcgatctcaggtgaaaggcccttgtacacactgggtgtgggtgtgggggtggcctgtgagtgcacacactgacttggacgtagagcttcatggtctggtctatgatggacagagtgcagcatcagccttttgaagcctgggagatggggagaggccttcaaagcaaaaccaagagtaaatttctcaccaaacctgtgccatgccagtggtgtgtagaggggggagagggggccgggggtggtgctcaaagtcagattcaattaggcatttcttacattcagaattgtggagtaaaatttaaaagccactacagaaatctgtagcaaatcaggctgcaaaagccgctcaggaccctattaataagagctctgaaaactcttatttttcagagctcttattaatagctctgggttctggtggggaacccaggcttgttttacagagtaatagggaatcatttagatgatattagaactgaagaatgacatgatgaagcagatatttgggaattaagcccaggagaccaatgtggctatatatgactagaggataaaccatgtaagaggctgttggaacagttcaggaggaaatgatcaggactgggattaggggcagcagtgggaattcaaaggaaataaaaagtgtgagtaatattgtaagggtaaaaatggggtaggaggtggattgatgacacttagctaaaggggagaagggagaaggttcagaagcaaatgtcactcccaagatttctatcctaggagcctgtgataacaatgatgctataattggaaatgatgcagttgggatgtagaaatggtttgggggacagtcagggataaaagttcagtttcaggtgtattgcattttatctgacagtgatactctctttcatgtattttttggcaaagtaagtgtacacagtgacagattttgaggggcagagcatactgtcgatcatcttattatgtagtagagtttttcctggcctcttcgtatctagctacactttggcttagcatttgtcacaaagatactatgggagaagatgaataaaaaaatccaagttcccttttgtggagtgtcacagatgtgttagacaagtgctgagtgtaattgataaattggttttcaaggtagagacccagctggatacctaaatatagatcctttctactctagttgtaaacttgcattaaaattttttttatcgaatgctcagtttttaatctgagaaaaatgaaattattataatctataatactaaaaactttgtaagctatatttttcaagacatttaccctaaacagtgattgatgtcttgtaactgtaatttttttttttttttttgagatggagtctcactgtgtcaccaggctggagtgcagtggtgcgatctcagctcactgcaacctccgcctcctgggttcaagccattctcctgcctcagcctcctgagtagctgggactacagacacgcaccaccacgtccagctaattttttgtatttttagtagagacggggtttcaccatgttggccaagatggtctcaatcttttgacctcgtgatccgcccacctcggcctcccaaagtgctgggattacaggcatgagccaccttgcccgaccagaaccgtaatgttttttaaggaccatttagagttaataacaaccatgaataggaggtacataatagttttcaactgtttttaagcttattaattaaaacagcaatgtgagatgaaggggtaaaaaatgatgcttaaatgtaagtggcttttctaatctgaatagtatgactataatgttatttattagaaaacagcaattatataaataatacatattctccccaagagtatttttacaacgggaattgtcatttaattataggaaaatggatctaataaattatgttaaaaatcgtagtcagagtatgttttcagataagttaggcagataagcaatttgatttatgtgtggaaaaatgtttgtgaggctgggcgcggtggctcatgcttgtaatcccagcactttggaggctgaggtgggcggatcacctgaggtcaggagtttgagacagcctggctattatggtgaaatcccctctctactaaaaatgcaaaaarttagccgggcatagtggcagtctcctgtaattccagctacttgggaggctgaggcaggagaatcgcttgaacctgggaggcggaggttgcaatgagctgagatcgcgccactgcattccagcctgggtgacagagtaagactctgtctcaaaaaaaaaaaaaaaaagaaaaaaatgtgaaaaggcagattacggcagggtgtggtggctcacgcctgtaatcccagcactttgggaggccgagatgggcggatcacgaggtcaggagattgagaccatcctggcgaacactgttaaacaccatctctactaaaaatacaaaaaaattagccaggcatggtggcaggcgcctgtagtcccagctacttggaaggatgaggcaggagaatggcatgaacccagggggcggggcttgcagtgagcagagatcgcaccactgcactccagcctgggcaacagagcaagactccatctcaaaaacaaaacaaaacaaaacaaaacaaaaacagattacaacacaacgtgctgtaatatcccagttttgcaaaaactttttaagtgtagaagaaaaataccttacagtggatttttaattttatttatttatttatttgagacagagtttcgttcttgttgcccagggtggagtgtgatggtgctatctcggctctctgcaacctctgttgcccaggttcaagtgattctcctgcttcagcctcccaagtagctgggattacaggcatgtaccaccatgactaattttgtatttttagtagaggcagggtttctccatgttggtcaggctggtctcgaactcgcgacctcaggtgatccacctgcctcggcctcccaaggtgctgggattacaggcatgagccactgtgcccggcctaggtggcgagtttatggacggcttttctttctctttccttttaatttcttctccctccctccctcccttcccttccttccttccttactctccctccctctctttctccctccctctttccctccctttctttccctacctttttccttttctttccctccttccctctctcccttgctctcccccttgctccctccctccctccttccagggtctcactctctgagggtggagtgcagtagtgcagtcacagttcactgcagggctcaaaagatcctcccacttcagcctcccaagtagctgagaccacaggtgcaggccaccaacctagcgaatttttcagtgttttgtagagatgggatctcactcctttgcccaggctggtcttgaactcctgggctcaagcagtatgccagccttggcctcccaaagtgttaggattacaggcatgacctaccatgcccggctgactttttttctttaggcttatattttccacattttaaatataaaacaaacacattaactttcataacaagaaaacaattattttaaaaaggaaggctggccaagtgtggtggctcatgcctgtaatttcagcactttgggaggctggggcaagcagataacttgaggtcaggagttcgagaccagcctggctaacagggtgaaaccccatctcttctaaaaatataaaaattagccgaacatggtggcacgcacctgtaattccagctactggggaggctgaggcatgagaatcacttgaacctgggaggtggaggttgcagtgagctgagatggtgccaacgcacttcagcctgggcaacagagtgaaactctgtctcaaaaaaaaaaaaaaaaaaaaaaaaaaaaaaaaagagctagcattctaggaagtaraaraaacttattctacgtattgtagctttacagttttcaactatatgatgctcctcattaaacaattttattataaatagttccatgtgaraaatgtggtaraatatgttatcaactctttacatttgcaggatctgttttggtaactatttttcttaactttgtaaagtctagggggaaggtccaggctgtgtaataaaccagtaataaaggtgaacaataatttttatttcttgaattcccatgataaaatcatattatagggtaaaataagtgaaaggataaaacgaaatattttagctatcattctttgttaaaagaacgaccttttacctttccaaattagagtctagaggtttgtaatctttttttgtaacacagtctcctctggattaaaggtatgaactttttccccagagatgcacattaacttgtgcctgcaatttcagggagttatgaaaacagcgttggggctttcttaaatgacatcttaactaaagaacaagaagatttctggcacagttattgcacttctgatatgcatcacaccctgttctgtcttatcgacggaatggttgagccacctttgtgtgcttgtggggttcattcatatgtgggcagctcttttgatccaatagacaacaactgacaccttcatgcaggtggcatcagtatatgcctccttttccttgcctttggtctgtctcagcaccctactaattgtatttttttaaagcctattctaaagaagcttcagaaatattggagagaggaaggatgcagggagaaagggagtgtcgttaaaatcttaaattctgagacacaagctagattttgtgtcagctatcctgaggagtgtgtacataggttgtgggtgaatgtggggtagggagcatgtgtttatggacaatgctgttggtatgtatctaagcattggaaggtcttttcagatgggttgcctcattacttggacagaattctttatctgtgaggtttctttcatttggagaccatggtaaaccctactaaactggcttaagcagaaacgggaattgtacaaaccagcagtccatgagtgatgctggcattagcaaagctctgtgtggggcccatacaatgtgactaggactcagttccttgccttttctctcttctgatgtcctgtctgatgtacctgattcatcatttaggtatcatcatattaaggttagctccacactgtgtcccaagatggtggtcagcaactgctgggaccatctgctttcttattcatgcagagcagaaaaggagagagactttggctcagaatttctagcaaaagtcctgagatttattctgaccttgcggcctttagtcacatgcttgcctctgaaacaatcactgtgatgaaggggatcagtttggcttagcccattcttgtgtcccatatctgaagctaggagcagtcagcttcccctgatccgcagtgatccttaaatgaccaatgggtgctaaaacaaccaatgagagttatttaccaatggcaactcataacttttaatagaatgcaaaatgaggtagtgtttctagggtggacctgcctggccttttattccagctctgcccacttacctggttgtctgtgatcctggtgaaatcatttcacttttccaagccttggtttcctgaatcatgaaattaggataataatcatacctatctcataatagttttatgagtattaaaaacatgtagataattttatatgctgttacctgggatatagtcaatgcttggttaataaaaaggcattacctttgacttaccccaaataatttaccttgactatccctagatgaatatagtgtgtttttttttcttttgaaataaaattggtcttgaagaataatgctagtttagaaccaactcaaatgtccaacaatgatagactggattaagaaaatgtggcacatatacaccatggaatactatgcagccataaaaaatgatgagttcatgtcctttgtagggacgtggatgaagctagaaaccatcattctcagcaaactrtcgcaaggacaaaacaccaaacactgcatgttctcactcgtaggtgggaattgaacaatgagaacccatggacacaggaaggggaacttcacacacgggggcctgttgtggggtgggggaagggggagggatagcattaggagatatacctaatgtaaatgacgagttaatgggtgcagcacaccaacatggcacatgtatgcatatgtaactaacctgcacgttgtgcacatgtamcctaaaacttaaagtaaaaaaaaaaaaagaaacagcctataatgcttgataggtagccatctgtagagggaacctctataccttgagagatatctgaaaatgggggcagaaagccacaaagcccaggtagagctgttgactctaattattattgctttgtagaaatgtgtcattctccaagagaaaccaaaaatttgaatttttatgagaaatcacccaatatttaaaaggttgcaactaattaaaaaatttgaaaacactgcacatccaacaaatatgtctgtatactatatgtaactgtgaactccctgtttgtagtcttgtcctgagagaattgtccttaatgccaaagtcctttgctctggtgacatgcacactaaacctctcaggtaaccctgtgagtagaaaacttcaaaggaatcatttctggaagggatagagaacgaatgaactgagagttgcctaggtgggagggacttggaaatgtaacctctccattcatcgcttttggaatctttgaacttgctgaactatatagcctggaacactttcctctctctactcctcccctttacccatctagccttgctgtctttacctgtgatggttgagtctctgcttatgaatcactttctccaggaagtctcaggcatgtgagaatgaagcatgggagcccacttgggcctttgataacatctctccctatggattaataaactgatttggtgagatctgttctttgtgaatttggctagtgtgaatcaatcsctaagattcagatcagctctgggaacactgaaaaaaataagcattcctgggtctgcaatactgaggattgctggtgcgcacatcctgccgagtgctgctgagttgccatctggcccaccctttgatatttctcttggtgctctgtaacttcagagatggaaagtacagaaactgttggttgaatttgatgagatagctgagttcaccctgcatgggtggttaggggagggagctgcatgtttacttttctgggatggagtggtgatatggatggtcacttgcccacatggtgtgataaaactgtaataggggatattggggcggcggggggtactggacagagaccacagagtccaaggattttactcttttctctgggcccctcagtgggctcttcttccccttcctcactagaaggagcccattacaaagtgccctgtgaggggctgggcttacactcatccactttagaggacctcagatggagcaatgggaggggccatctgttgtttccaccctcctctaaattttagggagaaatcatactgttttaaagaagaaataaaatagaataaagaagagacctttgcccctggcctttcaagtgacagctttctgaacattttacgaggagcctttgcatgtttcattttttagagagaaaatctatataagttgttttgttaggagacagtggaagggcacatttccctctctccaggttgaaacacaccagcagaagcaaattataaactctagcagcagcgttctattaacgtgagccaggccaatgggcaaagcatctttcatacagtggtcatttgagtacttaaaactatgctgtaaataggtgtaaatattttgtaaataagaacttattcctcaagttcacacaacttgcaaggtgaggaactggggttttaactaaggtgctctgattccaaagtccatgttcttaaccacaacactgtggataacagtacagattgaaccaaaatactaattttcttataagtaatcccagtagatatcagtgatcagaatgcaattgagagcattacttacaagcatcgtgataccacatttgaaaacagagtgatggtagagataatcagacctcagtactaaagtccttgtaagatgttttaagagagccagataatatgcttttgagaagtcaggaaaattttatcagggtctcactttcagcagagatctaatcagaaatattagaacaactttcatttcacagtttggaactgaaagtaattggtttgtttcctttttgtcaccaaaatgccactcattatttttttctcctacctcattttcacacaggccctcagcccactacagtgttccccctttacaactatttccagatgttctcaagggcttcacatgtgctccaaggaagtgtgatcctgttaggcaaccttgttgaccttctctgtgtccatagcatcccattcttccctctgggcatctttgggctatttcttgttcactgagcaacttggatacagcagtgtccatctgtgcccacttcatgttgaaatyatggtctctgcccaggccccataggtgctgctccatactccaggccaaccagggctctcatgggaccagaacaaggcctcgttctgtgcggaagtggggagaatatacagcctccccactgcttggtccttccgtcagttgaggatctaagccgtgttgcatgtgctactcctgaaaacagtgcttttgtcttctgtcagcacttctttccctagggccgaggcacaggctgttgggaggaagacagatcctttctgccttttccatttccctttctctctacctgagcttcatcaaatagcaaaaactaggggtttgcttgtttattgaaaatgtcagttaaaataggctcttgtaaagaatgatatatgtrtatataaacattttattttaatttaaaacatagatgtgaatagtgaacagcattcgttatttgggtgatgggtacacraaaagcccagacttcaccactagcagcatatgcatgtaagaaaccggcactcgtrctcccgacatgaaaactaaaaatcaatgtttaggttcatagcaaaactgaacagaaagtacagaaagttcccatttctatgttttaaaacatagaagtgtacattctyttatcactcttaatgtaaaaggcctttgagtagaggacacaaattggaattctaagatgtctgtcttatgtaatcacaaccttaatgcatatgtgtgggttctatttcattaaaaaaaaacagatatgtgaaatgatggctgtttaaaaatattttttcttttcaatcatggttcactgcagtctcaaactcccaggcttagatgatcttcacaccatagtctcctgagtagcttggactacaggcatgtcccatcatgcctggctgatgaaatattttgtttttcttttctttttttgagacaaggtcttgttctgtcacccaggctgaagtacagtggcgtgatcacagcttactgcagccttgatgtcctgggctcaagcaatcctcctgcttcagcctcctgagtagctgggactacaggtacatgctaccctgtctggctaatttttgtatttttttgtagagatggagtttcaccatattgcctaggctggtctcgaattcctgggctcaagtgatccgccacccttggcctctcaaaacgctgggattagaggcgtgagccatggcacccagcctaaaatttctaatagagacagggtcttgctctgttgcccaggctggtcctgaacttctgaggtcaagtgatcctcccgccttggcctgctaatgtgttgagattacaggygtgagccactgaacccagccaaaaatattttttctaatctcctagagtcatcttgcccatacctatttttttttttttttgcaactcattcttatggagtctatccaaggcagtcaaccatcaacctagttttcatagcattaataactccttgttttacactcatttcatcagctcatgtacttttaaatcaaagcacataattagagtaacagatacaattgccacaaaaaggtctgggaacaaacctgattgcttctaggctatgtgcaactccactgtgggagcggttaggcacccacaagccgtgcattcctgtgccctaagtgacgtatgacaggcggacggccagtacactcaactgggagccctggtgcatctagcgagtcagctagctagctgcaggtgcaggctggttaccagtgcctactgtatccactgcatccctgtcatagctcagccccaagagaagccttgtgcagatccgttcatgtgaagtgactgatttagggcttggcctggttggccagacgtgcttagacaggccagcaccccaaaagtaggccaggctataaatatatgtggtctccaaaacatttcaaaaacacaaaacctgttttttcccctgtggatgaacaggaccatcctgcttgtttttgtctataaacagattgatttatgtacctggatcataggctcatagacaaacacggcttctgtttccttagaggtgaaaacygccctctggaggctggtccaagccagaatttaaaatttaacttttgctttggtgccaccaagtggttagctttgagatggcttggcaaatacataatgataaaaaaaaaaaatctgggatgtataggaggagctcagaggatttttagggcagtaacaccattttgtataatgctacaatgrtggatatatattataatatacatttattcaaattcatagaatgtgtaacaccaagagtgaactctaaactatggacattgggtgattatgatgtgtcaatgtaggttcatcagttgtagcaaaagtcttactctggtgttggaggttgataatgggagaggctgtgcctgtgtggtggggatagggagcatatggaaaccttctgtactttctgctcagttttgctctgaacctaaaactgctctatcaaaaaagatttattaatgaaaagtcttctatgctacatacattttcccttctggctaccagtgttgcaggtaagagcaagataagatagaaacgtcatgtagagaggccagctgacttcttgggcagggatgatacaayctttatgaagccccacactccagaggctgggtccttagctttgtaagtcccagaaacctttttatttttatttttttttcaatgtatgtagagttgttcagtttttcagggctatatcatgctcaccaaacttacaagagacactttttgaaaagtcagattggcaatatattattttacaattagaaatgtgtaatcaatggtaaaccaaarcacatgtggtagatgagaagttcatttttcaccctgcaggaaatttatatgggcagacaaaccataccaagtaggttgcttggtgaaatygcagtagggtsggggaaggaggttgcatgtcttaaggttactaccattaagacgaagctatcttcaccactttagggatatacatgactctgggctggggatacttacattgctaggcagtacggaatcctggacagtgctgatgataggtcaacttaatctttttctttggatacyctttttgaaactctatgctgagtgcatgataattctttcttccctcacacaggacatactataactggcaaggccaatactgtaggcttgctgatacagctctggtctcctgtgaatgttgggtcacctggattagcatttggatgtttcccaaatcatcagccaccatttataggtttttggttaggcggggctagtgtactaattacatgctaatttttaataattgtattctcagaggaagacttatgttttatgttttggtgattctgttcctgaatataggtcaaaattaatatgcaaaattaatatgcaaactccttaatcactttggcatagattcctaatagcaaaacagtacttggctgaagatgggaattatcctggtttattagtctgttctcacactgctataaagacatacctgagactgggtaatttataaagaaaagaggtttaattgattcatagttccacatggctggggaggcctcaggaaacttaaaatcatggcggaagggaaagcaggcatgtcttatatggcaacagacgaaagagagcatgcaagagcagggaaaactgctttacaaaaccatcagatttcatgagaactgattcactatcatgagaacagcatgggagaaaccatccctctgatccaatcacctcccacctggtctctccctccacatgtggggattatggggataaccattcaagatgagatttgggtgggaacacagagccaaaccatatcacctaggttctttttttcaattattattatactttaagttctagggtacatgtgmacaacgtgcaggtttgttacatatgtatacatgtgccatgttggtgtgctgcacccattaactcgtcatttacattaggtatatctcctaatgctatccctcccgcctccccccactccacaacaggccccggtgtgtgatgttccccttcctgtgtccaagtgttctcattgttcaattcccacctatgaatgagaacatgcagtgtttggttttctgtccttacgctagtttgctgagaatgatggtttccagcttcatccatgtccctacaaaggacatgaactcatcagtttttatggctgcatagtattccatggtgtatatgtgccacattttcttaacccagtctatcattgatggacatttgggttggttccaagtctttgctattgtgaatagtgctgcagtaaacatacatgtgcatgtgtctttatagcagcatgatttataatcctttgggtatatacccagtaatgggatggctgggtcaaatggtatttctagttctagatccttgaggaatcgccacactgtcttccacaatggttgaactagtttacagtcccaccaacagtgtaaaagtgttcctatttctccacatcctctccagcacctgtttcctgactttttaatgattgccattctaactggtgtgagatggtatctcatggtgagaaagtttttgcaatctactcatctgacaaagggctaatatgcagaatctacaaataaacaaatttacaagaaaaaaacaacctcwtgaaaaagtgggcaaaggatatgaacagacacttctcaaaagaagacatattgcctaggttctaagtaagaatgcaggccacttcatgtctgtgtcatgagagctttgcacagacctcactgcctactggtactcaccagcctgtcctgtgatgcctctctggagtgctcagttgtctccggttctttagtgcaggggtccccaacctttttggcaccaggtactggtttcatggaagacaatttttttccacagatggggcaggcaggagagaatggttttgggataaaactgttccacctcagatcatcaggcattagttagattcataaggaatgtacaacctagatccctcacatgcacaattcacagtagggttcattttctgtgagaatctcatgccactgctgaactgaagggaggcagagctcaggctgtaaggtaatgctgtgtggcccagtttctaacaggccatgggctggtaccagtctgcggccctggaggttggagacctctacttcagtgcagcatcccctccccacctgcctcttcccctgaactgctgccatgtggagtcctcagtcaaggaagcgcacggtatttgcagaggttataaattagtatcctgtggttggaatctgacccatagatctcttttgtttttgccaatatgttgtttttaaaagtttgatttaattgtccaaacttaaaaaatttaaaaatccggagatgcacacaaaactctgagtatcctctttctttccttctttctctctctctctkttcttttcttttctttctttcacagggtctcactgtgttgcaatcatggctcactgcagccttgaccacctgagctcaagctatcctcccatctcaacctcctgagtagctgagactacaggtgcgtgccaccatgcctggttaatttttgtatttttagcagagatggaatttcaccctgttgcccaggctggtcttgaactcttgggctcaagcgatctgcctgctttggtctctcaaagtgctgagattcaggcatgagattactgtaatcgctctggcctgagtctccagtttcattgcaaaaaaaaaaaagtggatgatctggctatgcagggcttatattcccacagcacaataagttattggagtggggcctaccaaaaaaaaaaaaaaaaaaaaaaagtggatgatctggctatgcagggcttatattcccacagcacaataagttattggagtggggcctacatagggcacatttcttccaattatcctctttcttcgcccttccctttcactcatttatgttactgcttggtaacatatttggtggtgacgcttagtttgttgcaaatgcaggataagacacaacagaaaaaacaagcataaggaaagtagtggctccctgtgaactcttgctccctgctcttgtccttgctgtctgcagggaattccttccttggaacctgctttcaggctctttttcttttggaccctatttctgttrgtatgtcaactctgattttatcccttgtgctttcaagaggtgtgggctggagcgttgttcaggaaagcatatgaactttgaaatctggtttgtatctgcaagacctsgttttgaatcccagccccatttcttactgccttcagttcccttatcagtaaaatgagggcaatcaccggtctcataggttggtatgagtattaaatgggattttttaatgtaaagcatcacacagagggtagatcctcaaataatagtgctcttgtccctctcttctctcttttttttcctttaaattttttttttgtttcttctttttctattggtccattgggagaagaaacctctcttctttcaagacatgattctttccctttttttgtgactttgatgaaaccacttactcctctttactctttttgtagagcctactgttttttcttccttgtaactttgtctttcccatctgtacatttcacatattcccttttcttggagttagaactctctcataaagactctcttataagaataatggatgacaagtacatttattttgcttcgggaaattctataagaaggcctacgttttatcaaatttctataacaattgtatatagttttgtgatagaaactacattagccttcacagtaatctgttgggatgctttctgtgtatatgtatgtttccctgttcattgtattgtagaaatagagcygaggtcaaaggctggaaagtcatcaggagaaaaaattggttgtggaagggcaacacttcgcctgagatcaaaaggtcctgccaccgtggaagaaatggtatgttatgttcatttacttcctgttctgcttggaaatgttgagttagataaaattccattcattctaaccaaaacttggacttttaattcactgtctatttaaacaatctggaaattactgaaggtatttaaaaaggaaatatagaaattaaggacatgagaagagattgtgatctatagaaattctcagttacctgtaggtgacgtttctagactctatagacagctggactctctcaaaaacttaagtcaaccaaagctctctgagaaccaagaaaatgtttcagagccacctgtaggagtaaacaaaagaagatattgataatgaaagattatattcgtaaactcctcttctcacataaaacacctgtagtcatctttgactcttttcgttcatgtcccatgtcgcttccatcagcagatcctagtggatctacctctataagatactggagtccaatgacttcttaccacccctgcccaccactgtgccccaaggcaccatcatcttatcctggattttgcaatcaccttctgtttagtccacctgtgttcacccttgccttctttccacctgtgctcagcacaaccctcagaatgatccttaaaatatgcaagagaaattatgtcacttttctgttcacaaccctccagtggcttcccatgacactcagaataaaacctaaagtcctcagaatgaccaacatgaccgaactccgtatttcttctctgttctcatttcccatccctttgccgtggcttcctctgcttcagtcatgctgrtctccttgctgttcccaaacactccaggtgtatccccatctcaggctctcagtactgctgttgtctctgcctgaatgttttgcccatttatctgcatagcttgctcccttgccatcattaggtttctgcccacacattatctatctcaaaggcctttcccgagcatcctgtataaacagcaactccctccacccctcccactgcccactcttccatgtccttaatttttgtcaaagcaattgtattagtctgttttcacactgctaataaagacatacttgagactgggtaatttataaagaaaaagaggtttaacggactcacagttccacatgtctggggaggcctcacaatcatggtggaaggtgaatgaggagcaaaggcacgtcttacatggcagtaggcaagaaagcatgtacaggggaactgctctttataaaaccgtcagatcttgtgagacttattcactatcatgagaacaacggcatgggaaaaacctgccgccatgattcagttacctcccaccgggtccctcccacaacatgtggggattatgggagctacaattcaagatgagatttgggtggggacacagccaaaccatatcagcactaaacacactaggactctatatctttgattaattttgtctactgtctagctcctttgctcacatgtcttgttcactgctgcatccccagcacctagaataggayctgatataccaaaggaatggaaatctttggtgcattaatgaattagtaaacgattccttttagtttgagaaaagcaaggatttttccctttgaatgactttgtctatatataggtcagtgtttgagtgaaaaacaccagaaggagaagtgacaactagaggcaagaagggtrgaggaagaaaactgcaagtttggggtggcgatggtaaggattccaagtggcaagcagcaggcccacaacagcagcaaaggcatgggggtcaaagccctcccgtgggcagatgggatgtcgagcaggtgactgatgcctgtgagctcgggggggcaggggcaaggctctgggcccttctagggtctctctgtatgtgaatgctgtctgggttcctatgtgtttgaagggaaaaacagacagatgaacagttttgaggctgtttcacagagtgggatctcagaacttgttgggtgacaaggtccagggttggtcatgggggtggtttgttgaagtagacacttaaggaacacatgaggccaaggctgtccttaggaatgtcgaggcacccasggtgttgtcagttttggggggatctagaggaagatcctgagtcaaatgcgtgggttctgggagaatgaaaggacygatcagaggcaaatggcaaygaagagatctgatagagcaaaaagtgttttgaaaaggagatatgatgaggtatgtgaaggaaacccagggcagtgacttctgggcatttggagcctttattttccctctgtggcccagcacactgcctggtatattgctgaaggccagtaagtgtttattgaatgaataagcaaatctcagtggaagaaaggaatttatcagagaagggaagaacagagggaagttgctggctgtgaggagccaggagaatgtcagctctgccttttgctggaggctgtgaggaaaaatgagcagacctttaaacagctcacaaaggaagcaggtcagcaggaaaaatgccacgtcccttcaggaggaggagcatcttctaagggttaaatcattcgtcactctttgttaagcacctgctgtggcaaaggtgcctgaatggaaaaggagcagcttaagatctacctggggaggtaggaaagattcattcaaagataaacatctaaaaatctattcctattttcatagtctgtttagtaaaatagggcaattaaaaatagctcataatgaaaggaaaaagctgtttggtgctaatattaaatttgatacaaatgacataaaatctaatttcaaacactttaagaatttaaaggacttatgggatttaaaacaaatcactcctttaatcacctagcacaaattctgaaaatggtgtaagattctctgtattagtccgttttcacactgctgtaaagaatacctgagactgggtaatttataaagtaaagaggtttaattgactcacatttccgcatggctgggagacctcaagaaacttacagtcatggcagaaggtgaaggggaagcaaggcacgtcttacatggtggcaggagagagtgagtgtgcaggagaaactgtcgcttttgaaaccatgagatcttgtgagaactccctcactatcacgagaacagcctgggggaaaccacctcatgatgcaatcacctcccaccaggtccctcccttgacacrtggggattgcaattcaagatgggatttgggtgggcacacagagccaaaccatatcaattctccacttgcataacctcatactttattcaatatgtgcttgctgagacaggcacagtctaagtgctggtgatacaaagaagaataaaaaccctgtttctcttctaaaaggagagaagcatgaaaagaagctattacaacccagtgggatagggttaatggaagcaggtgcaggatacacagtgtcacaaagaaggggctgatcagccattgacagggattggggaaagaaaggaggtcagaaggctgggtgcagtagctcacgcctgtaatcccagaactttggaagactgatgtgggtgggttacctgaggtcaggagttcgagactagcctggccaaygtgatgaaaccccatctctactaaaaacataaaaattagctgggcatggtgctgggcacctgtaatcccagctacttgggaggctgaggcaggagaatcacttgagcccaggaggcggaggttgcagcgagccgagattatgccattgcactccagcctgggtgacagagtgagactccatctcaaaaaaaaaaaaaaaaaaarggtcaggaagtgtttctctccggaagaaattagtgagtgagttcaaaatggggaagaagagtgttctaggcatggaacaataatgggttttggggacctgtaagctgttcatgagattggagtgtggggtgctggaagtactggttaggtaggggtgatgaggctagaggcataggctggggttaggatatgaagggccttgtggataatgagggagccatttaagaattatgaggggagtaacacaatcagttttgtgttttagaaaaatcccttggttccagggtatgggttgttgagcagcttggatttgagagggtgaagaccaaaggcagggagacaaaataggaaacctctgcaaatcagaaaagatgaggactaaacactggcaaacagaatgtggatggagaagaggtgatagatccagatctgttccgtagcaaataggaaatattagaatggtaaaatattggtggccatttgggtatgaggagtactgacacttgtcaccgtaacttaaaacgtgcctggatagatataaaggttaatacctgttaatttgcatagcctgttgctttatacagacaattcaagatacattgtaatgaaggcaagagcaatatattgtctgttaytgtttttaaggtttagttcttgtaaataaaaatgtgagaaagttgtattaatatcttcaaggaaatagatttttatttgctataaaatgcatgattttaataaaatttgagactacaaaacaacatatatttataacagtattgaaagtaacatgaaattcttataatctaaataatgaattctacatttgcatgtatagttgagtagttaacatctttgggcaattccattttcagctatgatgccatttaaagccaagtattgaaataaactgagcagaatttaccaaatattaaaccaaaaakttaaaataatatttttactgaaatgtttagtaatcatttcgggaagaacaaaaatgttttggtaccattaatacataacacaaaaatgatttaaaaagtattattttatcatctcattcttataaaatttccttttttggtgtatttttataatctatacaatatattaatatggtaatacatgtgtaattgataagcaatacatacaataaagttaaaaatacacaataagggtatttgttcagaaaagttttactattgggatgagccatcaaacgtttggagaccctggcctgcacmataaagaccaaagtccttttcatggtacacaggactcctcaagatctagtmatatttgtcactgtgttctccagctacatgggacttctggcatccctctaacatgactctgtgaccttacttagactttgcctatctattgcatcctacttgaagtgtcctctcctgcttatctcctcttcatcattgaaaacacagttcttggctgggcgtgatggctcatgcctgtaattccagcactttaggaggctgaggtgggcggatcacttgagtccaggaattggagaccagcctggccaacatggtgaaaccccgtctctactaaaaaaatacaaaaaattagctgggcatggtggcgcacgcctgtaatcccagctacttgggaggcagaggttgcagtgagctgagatcacaccactgcacttcagcctgggcaacagaatgagactctgtctcaaacaaaacaaaacaaaacaaagcaagacaaaaaaaccccgccacagttcttaagacatccttctttttctctgagacagggtcttgtcctgttgccrggttggagggcagtggcagaattatggctcactacagcctcgtcatcctgggctcaagtgatcttcccactttagcctcctgagtggctgggactaaaggtgcataccaccacacctggttacttttaaattaaattaattaattagtagagatagaatcttgccatgttgcccaggcttgtctagacctctcaggttcaagtgatcctcctgtttcagcctcccaagtgtctgggattacaagcatgtgctaccacacccagctaattattttaattaattaattaattttttttgtagagatggagtctcaccatgttgcctgggctggtctygaactcctaggctgaagcaactctcccaccgtggccttccaaagtgctgggattacaggtgtgagccactgtgctcagccaagtcaccttctttctaaagtcttccatgactgttagagatataaatttgcttcctcccctgtgatgcttctgtgccttttatatcctttaaaaactgttacatgttatttattttcacatctgtttcctcttctagattgttagctacttggggattgtgttcctggcttttcttttttgaatccgtaacacttagtgctgacactagaaataagtatttactgtattgatttgtatttagttacagagcacattctagatctatttccattaaaattagctgaaatacacaattatgaaccggctccacatcaggctttctcttgtgtatgccctgacaatcaagagattttgttgtataatatcttatttctctcttttttgataaagccttctgaaaccaaagcaaaggcaattgaaaagattgatgatgttcttgagttgtacatgggaattcgagatattgatttaggtaagattatactatttaaaaaagtcttatatctcttaatctgcttaatgtttatgtcttgtttatacatacagccaattatacttttgaagataacaatatttgtggtatgatgaaaagaataacagacataaagataagaataatgaagacctgttccttaccgctttctagctatgaggtcttagtgccaagtaaactttaaaacattttagttagttcttagtcattaaactgtgactactatctcctttagtgttgtttgtttggatttaaaaaatatacataaaatgaattttgtagatgatacatataaaaggcattattatttgatatatcagaagtgcattgattgaattgcaccctttaacagggttactgaagccctatgaacaaggaattagaaatatgaagaaaggggacacacttggcatatgactgagaagggcagttgagcagttgaatttctgcgtatttcttatgtcatcattaggctgtcagggtcttgtttatcagttaagactctaccagttgcaaatgactaaaacaaaaaccaaacaaaaaaccctaattccagctggcttaaggaaaaaaaaaaaggagaaacttattggttcttataattgaaaagtctagcgctagaccttggcttcaagaatggctggatcccaagttctcatgctgtcatcaggatatgatttctcttctctcagtcttggcttcatttcaggcccctgtggtatcccctggcagcttcagtctctccctcatggggccaaaatgactgctattgctccaccctctgcatcctcgtggcatcaagcacaatgagaaagagggaggacctcttccaaatcattcaaacaaaatgcccaatattgtcgctggttggtctgattggctcaagtgagccagtcactgaggccaagaggatggtaggtctgggttgaacgctctggaactgacagtgaccctgaaatacaagggtcaagagtgtgaaaaaggcctgacccttcccatgcagaagcaagataaatgttccactaagtagggcagttgcatgctgggtagagaaaagagagtaaatgtacactccagtgtgggggtttatgtctgcatgcatccacaggtatgcatttgaatcaggtactttctacattttttaaaggtaagaacttgactattttgtttatctgctaccaggtagagtatttgaagctcatttatccttttctacttccactcatattccattttccttatagaattaccaaaagacaaaacaaatttaccttaaaaatctcaactggcttttatttgcaactctagtatcaggcaacacctcaaaatgagtgctctgatgagctgagcagaggaggttgactttagagtcagaaaatggctgaagaaatcagaaacataacaaaaagtgggttcctgttgcaaggttactttcttcgtaaaggtgaaaacagagggaatttccttatcatgccagctaaaactggcccatttggggatttggctattacctgtctttctcctgattttgtggaaggtcagataaacaacttagtttggcttagtgagtggaacttcagcatgagtaactccattttggtttggtctgttaggcctagtayaggagctcagtccaaaccaatcacctcctataaattttatttaacaatctattcttattttctttcttgcctgtgtgaacttttatttatcttctaatttttgagacaggatctcactctgtcacccaggctggagtgcagtggcacaatcatagctcactgcagccttgatgtcctggtcccaagcacttcccctacctcagcctcccacgtagctaggaccacaggtgtgtgcctccatacccagctatttattttattttactttaacaaattttttttggtagagatggggtcttgctatgttgctcaggctcaagtgatccccctgtctcgtctgtcaaagtgcagggagagattacaggtgtgagccatcattgccagccctgagaacttttaaaataaaatttctgtactggatatasagatgctgtctgcaacttaaaaacattggtagtttgttccttgctccttggagaaaaatacaaaattttcgtgtggatgcttttatcctctgtgcagacaagaagttaaagctgaaaaccaatgtctgagaacttctctttccaatccttttgcctggctaatttttttaattttaatttttgtagagmtggggtctacttgtgttacctaagctggtcctgaactcctgggctcaagccatcctcttgccttggcctcccaaagtgttggaattactggcattgagccgctaagcccagcctcagtctcctgttttgaaattgcagatctcaaggaacaatagaatccatgctntggtctggagtgaatcacagacacagggcctaggaaaagatctaactaggaataaagacagacatacacataaacatgaatacttttagacatataaggaaatatgtaacatataaatagaggcatcaacgtgtacataaatcaaakttagaatagaaatgtttattcgtacaacagtctagactgtgggccattctttagtggtatttttccatayaggagggaagcaaatgtatatatgtgtacatgaatttttacatatacatacacacatacgcatagatgtatttatgctcacatacagtgaaagagatatgatatagtattgcttacaggcatacatatttggcttgaggccctaaccctaaccctaaccctaaccctaaccctaaaagagaccagcctgggcaacatagtgagatgagaccctgtctctactaaaaaaacaaaaacaaaacaaaacaaaaaaattagccaggcatggtggcatgcacctgaagtcctagccacttgagagtctgaggcaggaggatcgcttgagtccaagagtttgaagctgcagtgagctaggatggcgccactgcactttagactggacaatagagtgagaccctgtctctaaaaataaataaataaataaataaatgaaaaaaaaaagaagaaaatgcagcttaaaaaaaggaaattcagggcactaaacattccttacaaattctttgtaaattaaccagaaatttatttgtaaggtgaattagttatctgtaacaaattcctctaattgacatgaaaagccattatcattacacatgattagcaatgtaatcagttacctagagaggtaaagtgtaaggaaagtaattatttgaagaatgtaagccattgttaaattaggaatttctttcattattcagatctgattagcatgaaatataaatcacaagtgtgatactgatttaacagacaaatatatttacttgtataaatattctcagtatttcttagctttcagaaatgttaattcttaatgcaaattacactgacatcacatttttctgtatttgttaacgtaagtatatatcttaaaaatttaaaaagtaatatggcaacaacgtgacttaaaacactatcctcaaaaaaagattaagaggtgtttattatttgaaaatggaaaataatttaaatgaatttttgtagagagtaatcctgaagatgaaagtgcttcatttgattgtaaagttaagttgtgaacgatgacttttctaccagccagtgtcaacatgggtcaccttgggwtgttatccatgaaaaaaaktaagcrttctaaaagatgctgagtcctataagacctcacatggtcttgacctaactcagtggaaagttgtgtcatacaagtttcttcttgaatgtttaaagaaactgtgtaagttgtgtatagaactataatgttttctgatgataccaatttaggagatcatccaagcaacttcagaattttagggtttcaaatttattgagatcctgagatgtgtggaaagaagatttgaatgattgtttcaaagtcatttattctataaaatcttttcttttttttttctttttaaaaattttactactttgcttttggagcagatatgaagtctgttatagctcttgaaaaagtatgcagtaatggtgttttaatagtgagaattacatttcttcctttcttcctaggatcactttttttttttttttttcagacagagtcttgctctgtcacccaggctggagtgcagtggcacaatctcgctcactgcaacccccgcctcccgggttcaagcgattctcctgcctcagcctcctgagcagctgggattataggcgcccaccaccatggccagctaattttttgtatttttagtagagatggggtttcaccatgttgaccaggctggtcccgaactcctgaccttgtgatccacctgccttggcctcccaaagtgctaggattacaggcatgagctaccatgccgggccagatcactttctttttatagtgaattcaaaacaatgaacactatagaaagtcatccttttcagataaagccaatgaagttttagaaattttcattaaaaatcattctacattgactgcatttttgatgtttgacttgtgaattgtttgaaaagcattgatatttataaaaagtcttaggaaaagtaaggcctgaagaccttccatagaatgagacgtagttgcataytttatgattaaactarcaataatgatgactaatcttcaaaccctgctatttgccattttatagatttgaaaactgacattcagagaagtttgataacttgcccaaagttacctaagaagttaaaaactaagatttaattctgaaactttgataccaagatttttaaccgtaaagatttttaaccgtaaatatcttatatttaaaagttctgtttaagtgtttaaaaagttaatggaaattatatgttgatctgtatcaccaaaacaagtttgtcattaataataatgtaaatgtagtccagtggcagtaataaaaatggccactagaggtcagcacttagctgctatatgtggtaaaaaaaaattctctttacagttaagaaaattctttttgagatggggtctcactatgttgcccaggctgatctcaaaatcctggactcaagcagtctccctacatcaccctcccaagtagcagggattacaggttaaacatttactattttttaaatctatttttttctttttttctcatgtgtttctaaacattatactgtaagaaaattctacttttttttcttttttctttttctttttgagacagagtcttgctctgtcgcccaggctggagtgcagtgtggcgcgatctcggctcactgcaagctccgcctcctgggttcacgccgttctcctgcctcagcctcccgagtagctgggaccacaggcgcttgccaccacgaccagctaattttttgtatttttagtagagatggggtttcaccgtgttagccaggatggtctcgatctcctgatctcgtgatccacccgcctcggcctcccaaagaaaattctactcttctaatggaatattttttgccagattgcattcaggtttattattgcagtatattgtaattttattataatcaacagatgaaaataatcttagtggctatcttatgttaatatgctgtacctttataaaaagtgttttattttgctaaattttcttttgcttttctcttaaatcagagctataatattttatcaaaaaggatgaattttaccatttacttatcctgtaaagatgtcttaaaagctatgttcaccaaacccagctgaggatgagaaataaaataaaaaagcgatgtttatactttatgtattaggaaaaatatataacatatttagctgcatgctscatttttgaattcatatagcaaattactggtttttaaaagatgtatagagcactgtattacatgcagtatttccagcacaattatgtagctgtgtaattggcatttttttgttgtttctacaagatcaggtattttttgaaggcagataccatatcttgctcagttttaatcccagctcttaccacagtacctctccaagagtaagtacttgataaatgtctgttgagagtcacaaaagtagtgaattcacagggagcatgartcctaattttattagtttggagctttggcccttgggcaaattattaaacttagaatcctaattttcacrtctataaaagggacataataaaaataatcttatagggttgccaaggaatcaaataatctgtataaagtcctgtcacatcataaataataatgggtgtaggtattatcattcttagtgatgatcactaatgatgattactattagtagttgtaatggcagtggtaatagagggagaacatgtggagctgtataactagactgtatcagcagctctgggcagtactgagtgtgggggtttttcttcacttttctgctgtgccagaatgagtgcatgagcgagattatgcattttggactgtgaggttagactatgggcatcttgaagcagcattttctttcatttttgtgactagaaacccaaagcagacattgcaagtcagtgcaggtgaaatctacaacatggagttcccgggcttagtgcactagacaatgctgctgagcttcctgaggtataaaaaaaaaatcatgtaccaagttgtttctttttccctcttatagccaaggatgtgtgtgtgtgtgtgtgtgtgtgtgtgtgtgtggtgtagagagagaaattgattcagtgtccatcagtgaacatctgcatccttgtcattgtctcccccagcatttaagagtgtcatctatactgttagtttctgtttctgaatggtccgtacattttcttatgtcttttatctgtatgcatcttatttcttcctcagctagctttcttaacatgtgttacccatatgtcattataatctttaggtagttgtcttaataaatgctacctgtaaagcctatgagaaagagttaaaatggtagagtaagcaaaattctgaactggagttctacttcagcagtacttcaccttaacattctggctactcttcttttacatcctggctatgagaccagagttctggacttcactttccccagtgcatgctaactgtgcctgtgcaaaaagtatgtaagtgtaattacacaccctcctcttgcaccacccattcactagcatttattatgcatgagacactgaattagttactacgggcataaaagactgagtaagctactcaagatctgttgggagtttattcttttagtaggagagaaaaaaatacacagaaaaataaatgtcagtgcagagcaatgttgaatttgcagtctaagacctttttattgaaagtgtttcctgaggaccagcatcacctgggagttgaaaatgcagaatctcagggctgcagaactactgaaccaaaatctccattttgccaagatcctaggtgatttgtttgtgcatttaagcatgaaaaacactggcagaagggtttagagaatggggatatctcttccagctgtggacaaaggatttcatggaggagagagccttgaaggagagaaggattttgatggtggtgctggtggctaggaggaggttatcctgggcaaaggcagaaagcagcgaagatagcattttgagtggtcagatttatgagggtacagcattaatgtagtgtagtgtagtgagaaccaagggttctktagattagactgccactagggtttagttttaaagataaacattggttacacaaggaaaaaaaaattgtgtgtgtgtgtgtgtgtgtgtgtgtgtgtgtgtgtgkatgtatgtattatggattcatggcttcctgttctattcactggagttataatatattaccatcattacttatttggatatttaaattatccctgatttggtcagtgtgaactcttgcactctgacatctatatccttttcacatgttcccatcattttgtgacactttcttactttctggtacaagatagtcttggttcatattgcactttgcctgctctagccctggaatctgccatttttctgaggaagtcttagtctttctaatggagaatggtatttaagaaccaagatttcggtgctttgtgtactcattgtagttgggatgtcatgmttccaggactgaggaatgtgtatacacatgcatgtatgcatttatgtctgtatttttataacacctcaattggagatatatatatatttccagtgatatctacaattctaattccatagggttcattcttattttctccctttccctatttatccttttctggcagtgacaaacttgattcctgttgttctgtatgtatgtgtctgtgtatgtgtgtatgtatgtgtgtgtgtgtgtgtgtatgtatgtgtgtgtgtatgtatgtgatccatctccatatgtgtaactaatctcttatcaccgtggctgctgccctccctccccattcccatgccatcctcaccacatctgtactctcccaccccatgccaggctgcctggccatatagaagccctccttaccttactagaggtttgatccctctactagttcactgcacccccaccctacttctgctctgatcctggtgctcttctgtaggccacatctctcccttttcttcctagcctgccttgtgttaggactgaactgatgggaagaggcatagcttttatctctctagaccttgtggctcgttcagagaagtcatacaaacttggattagttcatccttaacctggaaggaaaggagatgctggagcttttccctggggctttggcgtttccctttcacatggaggtttttcacccaagtcccacatcacatatacaccatctctttctggttgctggtgcttctagggtgctgagtggaaatccactgagcctcttgggctcccagacagctggggcaagtcctaagtactcctgaagatgctggttccaagacatagaatatggaacccaggcaacttagtagaaaaactgaacaaggccgccactttcatgttctatcccaaactggagaggggctcagaaaaggtaccttgattccacaggtagacagatgtcttcctctgcttctccccagcttgactgctccagtgcaagctgtcatcctttgtctttttgtctttgggcagggaggactggactccatctcagttggcagtgggggactggtggaggagggagggagagtagtgactattaggaggttggggaaggggtgttctttaagtttcctgctagggttagtcacagccacagggtttctttcaggggatcttgttctacccatgggaatgccagaggttcccaactgatgggctccaaggttgggtagggggcaagggtggcagctgcaaacctgggttcagtggacacattgttgaaaagtatctttgccaccttgatgtgtgtgtgtgagagagggtatcttactgttttaatttgcrtttaattttgcatttaatttgaaatatatttatgcatgttacttttagcaagtaattttcctgttgccatttttctcagtcctttgatgctatttcatttattgttaattttttaatattatttttgatagccaccacaatgtttgaagctggaaaggacaaagtaaatccagatgaatttgctgtggcacttgacgaaactcttggagactttgcgttcccagacgaatttgtctttgatgtttggggagtcattggtgatgccaaacgragaggattatgatgtgtacactccatctctgaagaaacaacccatcgttcttttttttctcttttttaaaaagtcctataagatctgtttttggacacctttactaactctggtttaatttcatgtgtatggaatatattctttgaaatataattttggtaattttgatttctgggcactttttaacattgctgatgtagtatgcttaagagaaatgacctaaataaggatcaattgtaatattcattcaaaaggtttttaaaagtaagttttaaggagtatttctcgacagatgattttcttctccattaatacccatgctttgtttttcacatataaatagatgatttcaatagctttgtagttttttttcaaaatcttaatgtaaactaggattggagtatgatttacctcatagtatcttcactgtgttatcctagtttgaacaggatatgttcaggaaatgaaaggtgaattatgccccttattggtctagaagcattggtttttttttgatcctctgagtaagggaaggaagattcctgtggcatgttgatttctatggccaactttctctctttgtaaaacaaagattgattgattttcttgtatgcttctttatacatgctcttaaaacttgtggttgaaatctgtgctgtgtgtgtgtgtctctgcatgtgtaaaagaagggtaaaaaagagatgggtagggtagaactacttgcatttgatttttttttcagtccttaaaacattatttctttttttcactcatagccacttttatgttaccttttataagcactccagggaagattttatatttttttgtagagtttttggaaagatatttactcaaaataactatgctttagaacttttttttttttttttttttttggttaaacagcagcactttttagttccctaaactttagaagaaatgctatcagaaatagatttccttccagtggaaagaaaggaggaagggagaattgagaaaatatattagtctattattttagagttctaatacactctaaattawagagaaaattgagagtaaatgactgtcttwtcactcttatttgacatttcgtaggtgtaagagaaatggaaatgaatggtttcaacaaagatcatttaatacagcagagcatggcatgaccaagcatctttgtaaagtgttagatggaaaatgctgtgtgctgccatggtaatcagaaataataacctgttagggatgtattctaggaaatcagaagtagttctcttttcttgctggattattgcttagataactcttgttttctggtaaaactttagttgtattgccatccactcctttttcaaatgagtttaatgccataaagctgatattctttgtccgattaatttgaaatctgcacagaagctgttttagtcattaatgtgtaacaaaagtagcttatagaatatggactgccttattgctgttgcttatcatttgaaaataaaatccagctcaggttgtaacttgttggtactcgtttagtgagttcgttttggaggttctgaaatacctattaattcttaatattacctctcttggaaagacacaaaaaaagagctgttatttttaggcataagatgacttaggaggcccatagaaacrttctcgtttaaacaacaacaacaaaataaatttatcagcactagatattagatttgaaataagtcattgttcattattgatggttgtcagtttctccttcctttttgggcatgcataaagacacacttggtgctgattccatgtgatttatggaatgtcattttcacaatgatctttctagaatttgtgtgtaaggttgtgatatccatgtacagctgtaactatatatacttgtctgttagcattcagtggaccattatcattactatcatcacattacctgggcttcaactgggcccaagtactctatatactacctgtaataggtttttccttgaaatatccttatctttcacctctacagctaaactgataacaaggtcagtttctttatgtcattttattcccatacctaaaattgcatctatttgtgagctttctgcctttttgtaacgctcagtgcaccaaaagcgtctgtttttagtgcagtcacataatatataagtgtgggatacccttctgcagcttcagtgagacaaatcactttttaaaaaacattccattttattggcatcactagatgtttttaggaccctgtccttttcacttttctgtaggctttttttttttaaatggaagatgattattttgtttgttcttgatttcctgttattgaaaacagcatcttccttcttgcaatggccactaatagcacacaatgcgttttctttgattgtagcagaaaatgcaaatgataattgtatgttgggctcgatgaggccttgaacatagctgagtcctaatcagatgtatatactctgatgattacaaataggtacatgttgggtttctgtgatgtttcaaaaatacaattatataattatgatgtaaactctttaagaattcaattataaaagcaataatcaggtaacctctatttggagctgctacatccaatattgtgactgaaaattaactaaagagagataatttttcaaatgatgtataatttgcaatattttcccttgcaactttagcaaatacacatattccaagtaaaactttatttagtcccatgttatttatttgtttattattgacagggtctcactctgttgcccaagtgggagtgcaggggtacacatattccaagtaaaactttatttagtcccatgttatttatttgtttattattgacagggtctcactctgttgcccaagtgggagtgcaggggtttgatcatggctcactgcagccttgacctacccaggctcatgtgatcctcccacctcagcctctcaagagctgggactatagatgtgcaccaccatgtccagctaatttttgtacttttgtagagatggggttttgccatgttgcccaggctggtttcaaactcttgggctcaagaagtcttcccgccttggcctcccaaagggattacaagcacgagccactgcaccaggccagtcccatgttatttattgctagacctttatcacttctagagactccctggtctccttcaattattgcctgtctaacgtagtagcaaaatggagttttcaacgtaatggttcttctaaaaagagtacagttatcaaccaaagatgtaaaagattgatcatataatggcccttttgctctgtgatatatctaaatatatatggataccaataacattgccattactctggtggagatactaggttagaaggacagttaagtgttttacccaagctattagtgaatagagacacaagagatgctattcaactcacagttccaagtattagtgccctgtataaaatgcacatttattatcttcttgacacagattgaaggagataaagtaattacaagttcttacacatgtcatggtgataaaatatttctaaaattgtgaagtgtacaaaatggtacagcctgtccctaccctattacctgaaaacctagttctaagaaatgactcatggttattatctgctaggagtgtgaaaattgaatgtgacatctttaattcagttggatacagtcttcataagacttaagtataaccatagatatttttcaagcagtaacagaaaggagaaatttgaaaaaacttcttaaaggtaattttgagtcaatatttaatgttttgaactgtttgtgccatgcaatagtattgactatgcagataaaacattctatttttgtgggaaaaaaaggtttttctttttttgatgaaaatcattacttaaactttaaaaacttttgagattgaaatttgagagtctcttaatatatgaaagtgtaaattatattttggaaccattctaaaatgtattgtttactatatttatattaatagatgtacagatttagtcatatgttgatcaaaaagtgaattatttgtaaagctattttatatatatatatatggttttttttttttttttgagacggagtttcactcttgttgcccaggctggagtgcagtggtgccttcttggctcactgcaacctccgcctccagggttcaagcaattctcctgcctcagcctcccgagcagctgggattacaggcacctcccaccatatatttaaaatatgactccttaaaataagtactttttcatgaaaaaactgatgactattttcatcataaatagagttagagttttaataattttagactctttaatattgtttaaataaatgataaggataacacatgtgattgttcaggcctttatggttttaacatatctttggtatattttttcttaacatattttatagaaggtataacctctaagttctatttaaaatccccaaattatttgccgtgattcagtaaagatgcatagataagcactgccataatactgttaatataaaatagtcataagctgtttgtattataagatggaggtttacccagggtgacactttatcctttgttccttcattcaacaagtattgtgggagtagtttccgaacaatagtgtaagtcgataagtagaagaaatgtcaacctatagttgttaggcagtatgcctttgggatttattatcttcattgatacagtttgaaaggcctattagagctgttggaaatccttgcaaatactatgctaattccatatgttaaggggggcccagcaatctgcattttgacatgtcctccaggtgatcctaatggaggtgaatcctagacctttactttgaggtctctgaaggccctgacgtagcactacagtgagaagatagacatgacttcaagaacttatgatctgtcaaggtaagcagagacatgaagagatttctaatacaatcagataagtgctaacatggactataaggtagtatgacaaaacgctgcctatgacagtaggatagctcttaattttacaaagtagccaattttctaaatataacttggtatgctggaataattggttaccttagtgaaatagacttcttgattgacacactatggattaatccatatgatggttttgcctcggtttatatgcagtgtttgatgcttaccaacgatacaaataaatattagctatttacttacccttgtaaggtattttatcctcttatagttttgcagacgaggatcttctgaaacaatggttttcaaagaacatttctgcttttcgtggaatggaattgctatgcacgataagaagactggcctctctcaaagacagcaagtgctatggttttgattatgcaaaagctaagcttataaaaatgctactttaattctccttgtctagattttcttttagccagcatcccttcatgtatgaggtagggtactgaacacaatttatgctttatcttatatgtcatctgaaaaataatgtttctgatttttaaaaattacagattcagtgaattaatttagccttggaaagtggtttccctaaaagttagaatttctacccccttgtggtttagataggttattatatacatagtttgattagttttaattcttaacaactattcagtgaaaagtaaatggaaatatacaaatgaaataaaccaaatactttctttcccataaagcaaaacatgacctcttctgcagtagcactggagaaaaatgcggaaataaaattctgcaaattcggggaatggtggaagaatgctgtgatatttgagagaaggtccatgggcacctcgtagccatcttctkgcaacatccctcctttcttactcttttctttgctggctctcttcttctttattcagcctccctccatggaggctcctcaggtstctgacctgggttcctttccccyaccccaccctcttttcttaggtgactcatttattcccatggcttttaacatctttatgtttatgactccaaagtacatatccacagtccagacctctcctctgagctcggaactcaattccacttcttccttgacatctccacttggtgtcttgaaactttagcatgtccaggataacactttagatttttcttaaaagttttgtttctttcagttttctctgacaggaaatggcatcagaattcccctcactgctccttcacctgctgcaccaaatgcatcagcaagttcttttcattgtatctccaaactacttccccaatatggcccttcttctcggtttcactgtcacatcttcacatctctgggctgctgctccttcttcagctcctgccctcctccattttggactgtgaaaatgctatggcaggacatgagggtgaagctttttttttccctaagtgagaatgtaaatgtctcatttctttcttctctggaagggcttgatattaagcccctctgtctctgagggaagagacacttgtttttggatgattcatcttctgccactgtagggcccacagagtctactgtgagaaagctggaaggacagaggaggcaaaaggaagaactttcacaggtgtagactaaaggctataaagaatgtgtgtgtgtgtgtgtgtgtgtgtgtgtgtgtgtgtgtgtgtgtgtgtgtttaggatggggagagtgatgcctttagacattcaaatagaagaagactgtttcttgttttttcataggcatattgtggccacatggagcgtttagacaggaacaaaagtcttcagaagattcctgatctctcagcatggcacagaacaggaggagtaagacccatagtgaccacagtgaggggtggtatttgaacactgttagggttcttggaaacagaaacaataggatggagatatacatacagctccaaacagaaacagtaggatggagatacacacacacacacacacacacacacacacacacacacacgtatatatatatagatgtacatatagatatacacacacatctccacatatatacctacacaaagacaaatatatagatatgaacattataggaattggttcacatggttatagaggctaagtcctcgaaagtctgttatcgacagccccgagaaccaggaaagctggtggtgtaattcaatgtgagtcctaaagcctgagaacaaaggtgaggattttgcttgtcagcagccttgcctgttactgtccagctggagtgtcaccccatcagcctagacttttttggcttatatctgtggatgccccactcccagcctctttatttgcgatgacatgacctaacacatgtaagacttagaaaaagagaggtggttccctggacacctggtggaatggtggggaagcctttgtgcctgcacttgggaggctgacctaaaactagcatgagaaccctgtctaggatatgagagaatgatcctttctgctacacattaatgggatcacatccctcctcttcaggcttct

SEQ ID NO: 95183 - DNA, 16622 bp, Homo sapiens
cagaaggataagggtgtgtgatatggcagcaagtgatggttctatcaaaaacaacatgtatgaaaacactgcataaaagaggactcagcgggtcgggcacggtggctcatgcctgtaatcccagcactttgggaggccgaggtgggcagatcacgaggtcaggagatcaagaccatcctggctaacatggtgaaaccccatctctactaaaaatacaaaaaattagctggacgtggtggcgggcgcctgtagtcccagctactcgggaggctgaggcaggagaatggcgtgaaccaaggagacggaggttgcagtgagccgagatcgtgccactgcactccagactgggcgacagagcgagactctatctcaaaaaaaaaaaaaaaaaaaaaaaaaagaggactcagcaaatgagaaaagaggatgtgatcaggaaagatgttgttactgggtatgtgctaaggccttgaagatcaataaatttggaccctggggtcatcagtgtcctccataaggaaggacagagtgaatctctgtcctgaatctactgtcctgaatggacagtaacaattacggagaaatgaggcaacttgaaatccctgatagggaaatgggagatgacgtttcatagcaaatttaccaggctctttcatgccttgtactttgttcatgacatccctcctccctccttttcctactgccaaaatttgaatccttgaagattacagatccaagcctacagttacgaaaaagaagtagctataaggaaggaaaagccttttcctctatcctcttaagttcagtggctgaggcctgtaaattaaactggcaaaagacaaattaacaggagaaaagggtttattcatatgcacagggaaccacaaaagaagtagctggctcatcaaatggttgaaattagccaggcgtagtggctcacgcctgtaatcccagctactcggaaggctgaggcaggagaatcgcttcaacccaggaggcagaggttgcggtgagctgagatcacgccattgccctccaacctgaacaagagtgaaactctgtctcaaaaaaaaggaaggaaggaaggaaggaaggaaggaaggaaggaaggaaggaaggaaggaaggaaggaaaaggcttacacatctaacttagtaggagaaagggaaaggggagaaagttccaggggagaaagaggtttcttaaggaaagacaaaagggttttcaaaagaacaaacatgaggccagaaagtgtgtgatgctgtggtctatgccagcatgtgtggtcttcctgtcttcttcagagccattaaacttccctgaaaagggtatttatgttgagtttactcttggtctccctcctcagagtggaagccttgctgaagagggtatgtatggcagtcttcatttctgataaaagaaaaatagctcagagcactctgaactatgtgaggtacgcaaaatgtatcaggcccagagagacatgagtatgggacttcagtcatacactccacccctcacccccacccttgctcccacaaaaccaagaagtggggtgcaattgtttgttcctagtcagacatgcctcaccctttatcttcacattcctgggatttatgatacaaagaacaaggcatagccaatcaatagcttatgttatttttatgtaaattcttggtgaacaacttagtgtctatgaaaagagtgaaactctgtaaaatatttgaagagatttattttgagccaaacgagtgaccatggcccgtgacacagccctcaggaggtcctgagaacatgtgcccaaggtggtcagggtgcagcttggttttatacattttagggatgtatgagacatcaatcaaataaatttgagaaatacattggtttggtcaagaaaggtgggacaatctgaagctgggggatggggagcttccaggctatagggaaatttaaacattttctggttgacaattggttgagtttgtctaaagacctgggatcaatagaaaggaaatgttcaggttaagataaaagattgtggaggccgggcacagtggctcacacctgtaatcccagcactttgggaggctaaggcaggcggatcacgaggtcaagagatggagaccatcctggccaacatcgtgaagccccatctctattaaaaatatgaaaattagctgggtgtggtggcagatgcctgtagtcccagctgctcggggggctggggtaggagaattgcttgaacccgggaggcggaggttgcagtgagccgagattacactgttgcactccagcctgggcgacagagtgagacgccatttttaaaaaaaaaaaaaagattgtggagaccaaggttctttgaagtctcttagtggctgcccttagagacaacagtcgacaaatgtttcctattcagacctttaaaaggtgctagactctcagttaatctcttcaggattggagggcccagaagaaaaagatctgtgttattagagattctttacagatgtaaattttcccccataaggtacgactttgcagggccatttcaaaatatggcaaagtggccgggtgcggtggcttactcctgtaatcccagtactttgggaggccaaggcaggcggatcacctgaggtcagaagttcgagaccagcctggccagcatggcaaaaccccatctttattaacaatacaaaaattagctgggcatggtggtggtgggtgcctgtaatcccagctactcgggaggctgaggcaggagaatcccttgaatctgggtgggggaggttgcagtaagccaagatcaccccattgcactccagcccgggcaataagagtgaaactctgtcccgccccccaccccaaaccaaaaaacatatatatatatatatatatatatatatatatatatatatatatggcaaagaaacatgttttggggtaaaatattttgactttcttctttatcacgtaattttatgccagagtatgactgaaaaggcagtcacaatatatagtgttaaataaaacccaactgataagaatttatggtttgtagggcatgactccccagaccctttcgataggaatttgagcaagataagaaaaaatcagagcttagtcctcattaggaactgcctcttcttctcctttaaaaacccacttgtgacttctgctaattgggagcatatactcagggcaacttgaatcttcgcttcacagtcttcaaacttggcccaaataaactctctacttatatcaagtttgccttagatttttccctttaggttgacatttcccagaagttttaatcagatgaagaaagctcccagaaggtttatttctgcatctattgaatctgaaatgtcttcggcttaaaataattgttataccaactctggtgttctgaatgggtccccacacagcaaagaatagagccagaatgttgcatttgtgaaaggaaaataaaaactcaggactccagttgactatgccaaaaggaaaaaaaataaactgaaaactgagtcatgcaagaagctgcctttccttttgttcctaagcagatagctacagacaaaaggttaaatatttacaaaattagccgggtgtggtggcacatgcctgtaatcccagctactcagtaggctgaggcaggagaatcacttgaacccgggaggcagaggttgtggtgagccgagattgcgccattgcactccagcctggtcaacaacagcgaaaactctgtctcaaaaaaaaaaaaacaaaaaaaacacaaaaggttaaatatctccacaggcatatttactttatcttatgtaaagtgccagacgaacacataattgagtatctccctacctgctccttttctcttgcgacatgtggattaccatacccttcttctttccctccagctcacttttcccctttaaatattgaagccctcaaaatcatctttggagaaagccacagaccacagactgtttctgcgattccgtgtttatttcttccagccatgtccttaaccttggcaaaataaacctctaaattgattgagacctgtctcagacatgttttgcttgacacatccaaattccagttccagcacttactagctagctgtgggatcttgagccacttacttaatcctactttccttctccgtaaaatggggataattataataccgacttccaaatttgttgtgaggattaacttaaggcagagtcctcagaaaagtacctacagagggttattcgggccaagggccaaggttgaggactgcgacccaggacacacttgcaagttgtcttgggggagcactctggacaacaaaagagaggctcatattttcaaagaaaaaaagatgaattaggagaggaaatgaatacaaaagttgttcatcaggaattctcattgtttacagaaataacactggttatacattgtttagcgcttggctatacattgttgaactataaggtgtatggcatttaatggctacttggcatagcaagtggtttcaagagataattacttagctcaaagaagagtgagagtgactgttgctacattttaaatgcctgtctgggcctgataatttaaaggggctcatcttccttagataaaaaggttttgttttgttttgtttttcatagtacataatcttaaaaatgcatgctaattattactgtgagtactctatctgagatgatgtccccagaactggggggaaaaaacacttgtaaaaaattatcaaaggaaagaactgacaggacttgatagctctgaggattcctcagaagcactcgtcaaacagcttagggtttaattgctattctgccacttaacttctttgtgcctcatcctatctgtaaaggagggtaataatagtatttgcagggaccaagggaaactttcccttcgccctctgaaattctgctgaaaaatcaacccacaaaaaacagattaattgaagaaaaggcatagaaattgtattaatgtgtccacggggaaccacagagtgactacccacttcccagacgagttcagaagcttaggtgtcattcaggcaaagggggttgtgggagtgaggggaagaggaattctgctgagggagaaggaatggatcagggaacagattaactagcacattatcatgtgaaggggtctgttcaggtgtgattatattcttggttttgtagggaggggaagaaaaaaaccgttgttccttttgatgggtctggacgctaggtaacggctttgggagagagggcgcgggagtaggaaggccagacacaccttaaggcttaacttagtaagtcaaaccaccatattttgggtatggatttctgagccccaatataataggtacttcttagggttgttgtgagaattgaagattattaattataaagtgcctgggttggtgcttggcacatcataaacaactccataaatgctcgcttttactgtcgtggatacacggaggtgggagacccaattgggttcccgcccatgttattggcccccacggctatatggtctttacggcttcctagtctcttcaccatctctaaggtttgtttcctcatctgaatcacaggtgagtgattctcagggtgactcaagagggctggtgccagtggcagagcatggggaatcgagggaaggcgccttcctgtcagaggcaacacacccagtgggaggatcctgcccgccctgctctctcctacctccccttcccgggctaaacgctggggtcggtctggcagctattccgggaatctgagcgcggattctgacaaaggagacgtcttccaccgaccacatcacatggagctccaaagcacgagcacggcctcccgcggctgtgacctcaaggcggagcccctggtgacctcagggagagtccccacccccgcagcccgtgcgcccggggcagggcgggggcagggagagggggcggaatcggggcggcccagcggacccccacgcaaccccagcctacgcagcgttgacagccgcccgccaccgagagatcagctgtcagagatcagaggaagaggaaggggcggagctgctttgcggccggccgcggagcagtcagccgactacagagaagggtaatcgggtgtccccggcgccgcccggggccctgagggctggctagggtccaggccgsgggggacgggacagacgaaccagccccgtgtaggaagcgcgacaatgccccgctacggagcgtcactccgccagagctgccccaggtccggccgggagcagggayaagacgggaccgccggagcccccggactcctttggatgggcctggyyctggcgctggcgctggcgctggcgctggcgctggctctgtctgactctcgggttctctgggctccggcagaggctcaccctctttctccccaaggccatcctgccaggttacatcgcatagtgccccggctccgagatgtctttgggtgggggaacctcacctgcccaatctgcaaaggtctattcaccgccatcaacctcgggctgaaggtgagcactgaaggggctgcagtggaggaggccgaaaggagtgctggggctgggggctggggctgatgctggtgcgctgggctcagaatgcatccctgatggagagggtggcatctacaatccatcactgagtttgctcccctttggggacacccatggctacatgccaccatcaccccattgtgacctttgtgaagtaagaaaataatgcagacagtgcctgaggaagtcagcttgccaagcaaaggcctcatgccacaggccgctgagctaaagaagaagcgatggcctggtgctgcctgagttacagggcaatatctggaaggcaaaggtgtgcactgagcttggtgcactgagtcctgcccagccccagtttggaaatggaggcccaaggggtggtggccaggggttggcctggttcctctgctctgcctctgatttctcaccatgcgctcctcccactgcagaaggaacccaatgtggctcgcgtgggctccgtggccatcaagctgtgcaatctgctgaagatagcaccacctgccgtgtgccaatccattgtccaccyctttgaggatgacatggtggaggtgtggagacgctcagtgctgagcccatctgaggccygtggcctgctcctgggctccacctgtgggcactgggacattttctcatcttgraacatctctttgcctactgtgccgaagccgccccccaaaccccctagccccccagccccaggtscccctgtcagcygcatcctcttcctcactgacctgcactgggatcatgactacctggagggcacggaccctgactgtgcagacccamtgtgctgcygccggggttctgrcctgccgcccgcrtcccrgccaggtgccrgatactggrgcgaatacmgmaagtgtgacctgcccctgaggaccctgkagagcctgtwgagtgggctgggcccagcyggcccttttgatatggtgtactggacaggagacatccccgcacatgatgtctggcaccagactcrtcaggacmaactgcrggccctgaccaccrtcacagcacytgtgaggaagttcctggggccagtgccagtgtaccctgctgtgggtaacyatgaaagcayasctgtcaatagcttccctccccscttcattgagggcaaccactcctcccgctggcyctatgaagcgatggccaaggcttgggagccctggctgcctgccgaagmcctgcgcaccctcaggtacttatcgtccgtggaaacccaggaagggaaaagaaaggtgaatgaaagtgaagggagaagggaacctggggcattgtctctgattgctctagcatgagtccttagtgctcttcatttggctcccctaatctgactcctccttccctttctactgttttgccgcaccaggctttttttttttttttttttttagtttagtttttgtagagacaagatcttgctatgttgcccaggctggtctcaaacacctaacctcaagcaatcctcccgcctcggcctcccaaaatgctgggaccacaggcatcagctactgctcctggccctcccttttttttttttttttttttttttttttttgagatggaatcttgctctgttgcccaggctggagtgcagtggcaccatctcagctcactacagcctccacctcctgggttcaagcaattctgcctcagcctcccaagtacctgggactacaggtgcacgccaccacacccagctaatttttgtatttttagtagagatggggtttcaccatgttggccaagatggtcttgatctcctgacctcatgatctgcccacctcggcctcccaaagtgctgggattacaggcatgaaccactgcacccagctttccagccctccctttctactcttatctccagccaccctccttcaaaggtctggcagcataacctctctatgccccagctgtgtctttgctcatgttggccctctggaaatgatttcccccttttttttaagtgctccagtttttcccaccttatccatcccatgtcatcttccctctgtgtggtccttgcttcccattctagctaactcttatccctcccccatactcctggagccctctgccctcagagtcttttgtgtcacacagacccaataattagaactgtttggtctctggctagactgtgagctccttgcaggtggggaagatgtcatgtatgcttttaccctccacccaaatgcccagcacaggaggaccaggattggaacaagtgttgacctctcatgtttactttgtttcagaattggggggttctatgctctttccccataccccggtctccdcctcatcyctctcaatatrartttttgttcccgtgagamcttckggctcttgatcaactccacggatcccgcaggacagctccagtggctggtgggggarcttcaggctgytgaggatcgaggagacaaagtgagggccagtagtgggaacacggtggtgctgggggacaagcaggctcctgttgagctggagcacctctgggcacagaagttttattttcctggcattcccaacaagtgttccctggggattcagctcatggtcactgttgaaarccttcattcagtccccctttctctagccagggctgcctggacccctggatgccctgattaccatccttaattctccctactaggtgyatataattggccacattcccccagggcactgtctgaagagctggagctggaattattacygaattgtagccaggtaggacggagatgagggtgggaatagggacagggtgagtgtctgaaggctgaaaattcccttgagcatctcaccatccctgttgtcccatggagtggggaggctcctcactagaacaggttggagaaagagggcatcctatctccccagatgtcttcctacccctccctagaatcttctgaatgtagtaccttctggccaggtrtgagaacaccctggctgytcagttctttggccacactcatgtggatgaatytgaggtcttctatgatgaagagactctgagcyggcygctggctgtagccttmctggcacccagtgcaactaccwacatcggccttaatcctrgtgagtgaggcagaagggagcctcccttatcctggagttggtgggataggggaaggaggttggagccagagcctgcaaagcatgggcaggatgtgtggcccctccctggagttacccttgytccttgcccctccagtcagccccacatccttgcaggttacyktgtgtaccaaatagatggaaactactccrggagctctcacgtggtcctggaccakgwgacctacatcctgaatctgacccaggcaaacataccggsagccataccgcacyggcagcttctcyacagggctcgagaaacctatgggctgcccaacacacygcctaccgcctggcacaacctggtatatcgcatgcggggcgacatgcaacttttcyagaccttctggtttctctaccataasrgccacccaccctcrgagccctgtggcaygccctgccgtctggctactctttgtgcccagctctctgcccvtgctgacagccctgctctgtgccgccacctgatgccagatgggagcctcccagaggcccagagcctgtggccaaggccactgttttgctagggccccagggcccacatttgggaaagttcttgatgtwggaaaggrtgaaaaagcccaaatgctgctgtggttcmaccaggcaagatcatccggtgaaagaaccagtccctgggccccaaggatrccggggaaacaggaccttctcctttcctggagctggtttagctggatatgggagggggtttggctgcctgtgcccaggagctagactgccttgaggctgctgtcctttcacagccatggagtagaggcctaagttgacactgccctgggcagacaagacaggagctgtcgccccaggcctgtgctgcccagccaggaaccctgtactgctgctgcgacctgatgctgccagtctgttaaaataaagataagagacttggactccagacccctgtgtgactgtcccaatttcttctttccaggcaagcagggcaaggagatctttggagcaagatcataactgaggcacaggctaatgggttgatggtgtggtacaggcataagaaggcacacagcagtgcagacagactttattagtgatatcaatacagcagaggtgcccatggagcagggggaagggacccatgcctggaccagtcccttcctccttctgcccctgctgggtccaggaggatgaggcctggcctggaccagttcctcctgttccacctgaaacacatggggatggagaaccagggctggccttgcttcctgctcctcttgttaccactccagtgttatcacttccttgaagggattagatctctccctccccagctcctaggcagggaaccgtasctactggggaggggcatatytgggaggcctgaggcctaggaatagcctctagacccctccctgacccacaccctttagttccctggggcccaacacaakcaggtggagggaaggtgggggcttcttcatggggtatgggcccccagccgtttgggcttcagggagccccacagcgactgaacacccctgcggacagtccaccctacacgccgtgccacagactcagcagggggtgctgggaggcaggaggtggaggcctgggaacgggcatccagacacttctggtagcgaagctgcggaggcaagcagggcagtcactctccagcctacctcccatggggccacgccaccaccacaccaccctactagtagcttaccatgcacgcagcctgcacagcctctgagaggctggcagcattgggctcgcaccagaacatgtggcagcagaaggaggctgggccggcagccatgatgaatgcaaacgtgtggacatctctgcccacggccaggaaggagaggaaacgcacccgacactctcccagcactgcctctgtctgcatggagggaactcagttaaaaaggaacaccaaccccacactgtgttccacatccatcttagcagctcttcccctcacccccagtctcccctctatggcaaggcgcagccacgacttctaccccagctctttacctgctggtgcaagatggtgagggtagcaggggccacactgacatgacttggggtccattgttcacggctgctggaggacaggactgactcgagggccccattaatcacatctacccctagaacatatggacacaagataccactgagggtagacagaggataccccagctctaccctggacctctagttccacccaatcaaacccagggcctttgccccatccccactttgccagcctacattttggacaacgctgtccaagtatcccttccctggggctctcctcccctggcttcagtaactggacattttcctactttttaaaatcttggatcctaggctcgttattttcaccggctctgcctattcctccacacttctgaactgactgacctctcaaagttctgatttccccaaatcatgctctctcagcgctcatcacactcagacatcacattgcttcacaccacaataactcccaaatcagaccctacaggccagtcctctcccaagacccaattattttttaagatatctatctgaggagtgattactctgtatcacattgtgctaagtcattacagtgtattacctcatttgtgcccacacaacaacatcacaatagattactttatttccattttacaaataaggaaacggaagagataggtaatatgccttaggtcacatcgaggaatggggacctgagctcaggcagtctgattccagagcctgggttcttagccatgcctttctcctacctcttctctatattactagttttcagaactagaagggctttcaagatcttagttctactcaagaatgtctataatgtgctcaagagccaaggaacccaaggttcctgactttcagatcaatcaactttcccttataacacatggcctcctccacctcaaactgctgttaaacatttcccctcatggatcccacttttgcttgcactcagcagagcaccaaggcaggagcacatgttgtggcaaaggcatcagttctagtccccacactcatacgctggctgtgtgatctactgtctctgcacaatgccagtgcaaaaggcacatgcctctgtggtccactcccaggccctctgccccttttagtggctctcagctcccactaggagcagaccacgtggactcttttgggcagaggacaaatgtcttccttgcatgtcttctcccatcttggccttgctcatctgacttctagctggatcaaggccaaactgctcccaaaagcatacaagtcttccaaaaactggcctcaccagagctgtcaagcttcatattttactgctccctgagcttcagatgatttgtgtagcattattattaacaactaatcttggcaaatggcctgtaaagcagatggggaatacaaagcaagagaagagaatgcccttgagagacacagactgcaactgagggaaaagcctctgtcttgagtgccctttccctgctggactgagaaacttcagactgtcatccttcagggctccaactaggtgctgtctaggaagccatgcctgctgcagggcagggagaggacaactctgagacaactcttaccataacgtcttgtaactgctggaaaacttttttccacactgggccgtggccatctcaagaacagaaatggaatttaattcatccctctgtccccaattctaacacagggcttatctgctgaagaaattccagatgcatgagcaagtcactctcaaggcaacaagggcaaatgcacccgaactggtaaaaccaagtgtcacagaagtggatgggccaggtcagattgcagagtgcttcaaaagccaggcagaggggtgtgatgtttatgacatttaggccagggcaattggaaatctcaaagttcaggtgtgtgaaagggacatcatagtcaaactgctgaatagatggggctgtgggagatggagcctggcctcagagtcttgggaagtttggcagggaagcagtgaaagcagtggaccaaggtatggaaaaaggctgtcagatttgataactcaggactaaaacctacactgtgaccttgacctccagccccacatgcaatccccctaatcctgctgtgcttttctcttcttttttttttgtatcagttgttgccttctaacatactccatggtttactcattttattgtctgtctctccttgctagaatgtcagctaaataaaagcagggatctttgtcagttttgttgattaatgcatgccaagaagctagaatagtgcctgacatgtatcaggcattcattaccacttgttaaataaatgaataattaatgaatgaatattgcagcttctggatgggctaatgtttaaaaacgagcataagataaagcaggaagtaagtttagagaccacttgtccaagcggagcagtcaagggtcacaggcagttgatctggcatagggaggaccagagtcaagtggtagatggaaagaagcacatatgggaatgggggtaacaaatggaagagccaacaagggtttagaagttgaggacgagaaggaggaaagcaaaggcgtaagggtcagcatgcttttctcacctccagctccaagtctttggcagtgccatcgaatccaaatgaaatacccactccactctgcaaatccaaaccttctttcaaaacctcagttcaatccccaccttttctaagaagggtcccctctttcaatgtaagattttggacgtgaaagtcagcacggtataagggaaagtgcagagaattaaagatgaccggggtttgactcccaggtctagctttcctggccatgtaatctgaagcaagtctcatttattcattaattcattttttatttcattcatcaaacatttgttgagttcttcctgtgtgtcttttgacatgataccctaccacttctttttcaagtagcctcttttcttcttcctgcctctctccagttgtcactatccttggcagtttcatcctctacacatccattgaatgttggagggcctcaaggctatgactagcttcatttcccttctcacttcaggatgcccactttccagggccaagctactctacatccatggctttgattacctctacaacccaataatgccaaaactcctatctccagcccagacctctcctctcagctccagatctgtgaatctaactgccaacctgactttgcctctcagattccccaaaggcatctcaaactcagcatgtccaaaagtgagctcacaatctctacgctcaaattggcctcttcaagcatctgccaccttgaaagaaataatccactatccagaaggtccaacagccaggaacttaggagtcatccttgtccctcacccacatcgaaccaatcactgaggcctgttgactatacccgtctaaacagctcttgaatccacgcactcttcttcagctccattgttgcccaagatactctcattactggccaggactacagcaagagcctcctaactgagctgctcacatccacctccacccacttaacagtcccctccatgaaatagccaaagtgagctttcaaaattcaaatctgattaaggcaagtgcactctcggagacttcaataactccttgctgcccttaggatgaagaaaaaatcattaacatagcccctgaggtccctgacctggcagcctgaccactgcccagctgtcggcctcatcttgcattggccttctttcagtaccttggaaatgccaaagtgcctcccactgtagaccctgatcttcccccatcccacccccacctccattccacttgaccgcattcacttctacttattttttggatttcagttcaaatgtcactttcacagggaagtcttttacaacctcagactagatgaaattcctttgttatatcttgctactttctctcaacgaataactcacacatttatttgtgtgattattttattaattcctggtttttttctaccataaccttctataacctctaggaaaatgggactgtggccactgttctccctgtgcctagtccagggcctgccacatggtaagcttcaaaggtatttgttaagtgaataaacaaataaatagcagacactaggaaagcactgaaatataagagttaaccagatcaggccaggcacagtggctcacgcctgtaatcccggcactctcagaggccgaggcaggtggatcacttgaggtcaggagttcaagaccagccctggccaacacagtgaaaccccgtctccactaaacatacaaaaattaaccaggcgtggtggcgggagcctgtaatcccagctattcaggaggctaaggcaggagaattgcttgaacccaggaggcggaggttgcagtgagctaagatcacgccaccgcactccagcctggcggacagagcgagacttgtctttaaaaaaaaaaaaaaaaaaaattctttgcaacaatgaagtatgtgacaattatgctcactgtttccttctccagatgctcccagcccacagctggtgctgtaacactaaacccagctacaggctgctgtctggtgtcctccagtcatctaacatcagcctcccaatcccaccaaagcttttccatgggatgaaggagtggggtctccctttgtgcctggttcagcaccactcacgtggctgatgctcagcgaaggcgtgctgactgctgctataggcaggacaggaaatagagctaggacagaagtatggggaggtgggatgcattttaaagggtagggagacaccaagcatgaggaaggtctggtagaagaagtattggaaggcagagggtaggggcagagttttaggatcaaggtagcagcccctgggtatagaaggacacacataccaacaggt

SEQ ID NO: 95184 - DNA, 112585 bp, Homo sapiens
  misc_feature (1)...(112585): n = A,T,C or G
atctttattaccggtaagagtgtagggggaggatctggggcatagcctgggtctggccttagggtttctagaaaccaggggatatttttctaagaagatagagaatagagctttcctagtgtggttagacctagggaagacctttcttgcagtgcagcaatgcagaccgacttccaatccctaggtcaagctggagtctagggacagaggggaggagacccctgcctcctgtgcccagcctcaacttgtctcctgaccttcatggagtcacgttgcagctgcctccctcctggcttatgtaataattcaaatatagcagctgcctttatcccactgagtcacaccccctgcatcccccctcaggtgcggggagttatgggggaagaggtggttcagggctgagtgggaggttcggggcctcctggcaaggaagatccctagtgtgctggattggagggtggtggtggtgagggggctggtgctgaggccccaagaagagcagagccttcgccagaatatgaagccacaggggccacttctgccctgacccatccctgctggaattccacattcctgggggccctccccagagtcacaagctatatgtacagccttctcttgtgggctgctgtctcagttggaggaggaaggagaggtggaagagtatgaagagggggaagtagtccggtggggcaatggccaccgtctttggtcctaggctcagcctcgcccttcactcactgggttacctgggcacccctctgacctcagttttcccatctgcacagtgaaggattagattaactggctctagcgtctcattctctctgatttataaccctggagatgatctcaacctgaggctgaaggcacttccgagtgtctggcccagccgcgttccaggctgacttccctccctcttttctctgccatccctcctagaccaatgcagccacccccacccacaagacaaaagaggcaggagagggccctggactcagctggggctgggcggcttctcccttccctgaactcgccatctgttccagccccccagccccctgcctagcagccatgggtaggtcactgccctcacctggggtcaccccttcctccccggagagctctgacagatatcctggaacctgaagtggatccttcatgccccatcctgaatcccaaagccaccttcctgaggtgttgaagaagctgctccaccttggaactactataggggctgtggtggcctttcattcctttatcagcaaaagcttttgtcacttgtgtggtgggggacatgcttagtgtgagaatgcagagacccatgccaggccctacccaaggacatggtgctccttcagccattgtcatcagagccacagaggggagcttcctggcagaggaggagtggggagaagctgtggaatggctccttgagctccccactccaccccttccccatgcctgggctcccattgcaaagamccagatgtgggcttatcctgtcccccagccagagggagtcacccaggggtgttcaggccaaccctttgtgaaatccatgttccaccagttaccagcctttctccggagagctgagggctgtctcacactgggtagtctcagcctgccctggggttgggggggtgctcacagagcagtaagcgtcactgcctgcatccccacacacctgcattatcttgtctgcaagacacgtgtgcccctgagctgagctctgttgtgcaccacccgatttccgtcggcctcctttctgacttttctccatcaacatttcctgcttgggcctgttgcgggctrcccaaaggctgtggactggggccgaggtacataggactttggcttgtcttttgagctaacaggatcctgtagaagaaatgagatgagcctgagagggggtcggggggtgagacattagggaagggagaggccaccaagggtctctagcccagaatccaatgccccttcctgcctacctgtccttgtgggtgggaggcagggtgtgtgctgactggcccagcaatggtgggctaggatttgggataggcagagaaaaggaagaggagggggaagtcggcctgggaggagaaacactgtacaaagtcgaggaggagagaaccagagtgtgcttagggaccagacctggccccacctggagcagaggatggtgaggtcagtcagggctggatcacaagggacctcaaatgccaggctgaggagcttggcctttatcctgagggcactggggagccctgcaaaggttttgagagggaattccattaccagatagatgtctttggaagccgcctctaggtgcaaggaggaggtggagtagagaggttgacctggggtaagggttggagcatgaccaggggagggggaaggaagcagggggtggggatggagggagtggatggatctaagagaatctactgtcctttggaacaaacgatacaggaagtgtaggagagggatggggcaaggcgactttgaagtgtccagctcagagattggaagtttgctgatgcctttgggaggccaaggcaggcagatcacgaggtcaggagttgaagaccagcctggccaatatggtgaaaccccgtctctactaaaaatacaaaaattagccgggcgtggtgcgggtgcctgtagtcccagctacttaggaggctgaggcaggagaattgcttgaacccgggaggcagaggttgcagtgagcccagatcgcaccactgcactccccactccaccccttccccatgcctgggtgacagagcgagactccgtctcaaaaacaaaacaaaaacccaaaaaacaaaaaactaagaagtttgctgatgcctttaatagtaacaaaaggtgtattggatgttcaatatttgagggacctacgggttgttcccagaggagatgtccaagagacagcctggacacctggagctccagggagagggatgggcagcaggggacacccggagttgttggtatgctgggagaaggctgcatgctccgtgggagtagggtggagaatgaggagagacagggccgccgtcctgcaaggagcatccrtattgagggggcgaagatagggtgcaccagtgagggagacagaggaggggccgtctggaaggtgggagggaaacagccgcgcaggacggggcgggggcgggcgctgagaagaagccgccttcttcggcaaagaggtagctgaagcctgtggagcctgcagtcctctcaaggctatgggggcagcgcggaggccggattccagaactgaatcttcccatcgctttgggcagccaccctacctcccaggagcatccttcctgccatcccacctccagttccccagctaacaaaaaacggtgtttcttgactcccggcagggcggcggggcgggcaggtcttgtgaacacggctcgcagggttcagcaccctggagagaggcctgtggccggggcggggcctgcggcgggggtaggggcgcgcagtcagagcagtcgggcctttggctccgtctgggagcggtcttgcaggcaggcaattggtggaggagggaaaaacaatcttggattttctccagctctctcccctttatgcacctcccccatcccggcactggcctacaggagcccctatcccagcatttggggctattactctcctgacgacttcaggaaatgagatgggaggagaggggcaactatttactgggaacttttcagacattcccaaaacctcacaaccttttgagcttggaattcgtgaccccatatttcagatgaggaaactaaattgaagttcaggaaggtgaaataccttgcctaggcacttggcagagctgggatttgaattccacctgccgggctctaagtcctgagtgcccattagcccttctgagtcctgaatcttgcagtttgttcctgcagactctccacttctgggtggctgtggagtctggtgtggcagtgggatggggaggagaccttcccttccacctgcttgcttgagtgtattcccaggagatttctgaagatgaggccaccaccattgtttctgaagtgggagggcagaaaggaggctgagggccaggtgagacctcgtcacacctgcacccatgcatgcccaggaggaaccctcctttgaactcttctgactcagcttcttgctgccaggttcctccgaccagtgagcaggttcccaggacatgaaggggagctgtgagggagcaggacgccatggtccagggctgcagcttcctgagcccagagaatgccttcctagctgtcaggaatggagcagcgaggccccagtgataggtgaggtggagaagcaagacatgagttctgggctggctcagctgctttacaaccagcctgggcctcgttccctttgagaaaatggtttgcccagagttcagagatctaaaattctatgatgccttctggggccacagtgggaagcaaagactcctcatattttctttcctgacacttcccaggccacaagacaactgctttctgcagcacccagcctgggcaggccatctacacaagctcagtcatttctgaccttgccccctccaccgtgcacccccatgttcttcaacatgggtcaggtttctattcagcctcagggacttctctgcttgaagcctgttgtgtggcggggaggtattctccccacagctcagagagatggggttgctgtggagggtttgctgtagctcctctaccctggaatataccctcttctgccttaaaagacccagcttggaccctctcttccagaaatgcttgctaaccgcccccccaccacccaaactaggtcaggggtccctctgggcttcacagaccctgtgcttctttctgtcacagcctgcaagtctcccctccccactccccagcccgagtgcttctctgagacaagggatagtgtgagccatgagctcagccactggtaggccaatgaataagtaagttaatggtgaagccaggatccaaatccccatttcctgcctcaaggtgtggagctgtttctcctgcatacaatagtagctctgctgtgacaactctctatctgtcctagggcctaaaatgcctctatttcactaggttatagctttatcctagggagtcctctttggaagcagggtgggggtgcaacaggccttcccccatgcctgtagtctgtgagcagcgaaggccatgtggggcaggctgtggcctaggtctccacagatcctggtagaagtccatgctcacgcatcagctccaagtcccagctaaaccaagccaccaagaggtgggccctgtgacaaggctctgagtccaaaggccatcagtaaagccccctaagtcttccgtggacccagctccaggctgggatgcacgctaggagatgatacacaccgggtgagggagcccagaggagagggcagctagctgtgcatggaggcctgatctctcagacttgagggcacaagcgtgtcccctcatcctgaaggcttctgcgatggggcagcagagggtctgggtctgctgcccctcaagtccccagccccatcctagcccatgaggattgtaaatccctcgtcctctcccctctctcctctgtcagccactcccctttccccctaccccactctctttctatttctgcctctgattttttttccttttctgcctttgttcctctgtgtgtgtgtttctctatgcctctctggtctctttgtacttccatcttgatctcgctaaggctctgatccctctctcctctccctcttcatgtgttactgtcccccttcctgtctctgtttatctctcagtctctctgtctgtgagtcttttttcctctctcccagtcagactctctctctacccctccctctctccctctctccctctctgtctgggcctctctctgttcctcctccctcctccctcccccttctgcattatcagacctgctccaacctcctcccagagccagccgagcagcagaggcagtggcagcgggagaggcgggagcagcggggcagcagagctggattggggtgttgagtccaggctgagtagggggcagcccactgctcttggtccctgtgcctgctgggggtgccctgccctgaactccaggcagcggggacagggcgaggtgccaccttagtctggctggggaggcggacgatgaggagtgatggggcaggcatgcggccactccatcctctgcaggagccagcagtacccggcagcgcgaccggctgagccgtgagtatagtgaggggctggggtggtgagcggctgtgagaggtgccacagacagggtcctgggagtccctccaaggagctggggytggcatggagctgagccacgtggaaggatcgatcctgttcctgggcacccctcctccccgcgttgccagactgcagcctggggtgggggcaggttacctctgagcagaatgagggtgtctaacgtcaacctagtaggtgatgaggctggggtcccatggaaggggctgctggttggaggaggggctgataatgaacctgaaccggttcttcaagggctgagggtgtatgtggggagggggaggtctgccaagtagttgggaggagctctcggggctgcaataggctggttcaggaccctggagagggagagtgtcttggcccaccaaggctatgtgtgtgtgaaggaggtggggagggggaaagatggagaaaatatgaataagagtggccctggagcaagagagggttagaggtaaccaccttccatggaattgggaattggggttcagggacaccactttatgaaactttaccccaaagcgtctgtcccaggatagggttctacggagccagatggaatatggtgccagcctcgtgtgtgtccacgtgcaggggggtgcatgtgcaagtgagtggggggcgccgtggcgacacccctctactaagggctgccgaggtggtaggcagggtrtgtgtgtgtgtgtgtgtgtgtatacatgtggaatgtaagggacatgttgggtgtagaggggcctgtagagctctagggtccttggtggttggatgtaaagcagcctgtcagagtttgtgatcatccctgtgtgagtgagagtttattcgcatgtgtctgagtgtgagtgcaggttggtctgcatatgtatgtaggtgtgtctattaggttgagtttgtatattatgtgtgttgtgtctgcaaaatagagtgaatcagtgtgcattttttatctgttccatgtgcatttatgtgtgtgtatttgttagtgtgtgaataatagcattgctgtgtgtggaggtggatgtggctgtgtgcgtataagtattctggtgtgggtgtgtgatcatggtgctagtgtgtatatcggtgcttctgtggctggtgtgtgtgtgtatctatatgtgtgtattcatctgagtgtgtgtgggtggctgtttccttcccctggcaattgaggatacagctgggacaccrtggcccactgatgcagggcagggaggggctgaatgtatgaccgcctctttgaactcaggacaattcattctacaccctgtgggaaagatgcagaaaagaaataggcaataatgactctgccctctggggcttcctaagcttcttagacataaaatagcttgagaataattaagcagtagagatcaacgtcatgctaacaggtgggggtggggtgggaactgcataagcaaaggccctgggctgggcatgtcctggagcagtgaagacactgtatagagtggggggcaggcaggacccacattcaatagaactttaagatccaggactcttaggctttatccagagagccctggggagcccagaaaggttttatatagsggagagacatgatcagatttgggttctagaaacctgccctgggccaggcatggtggctcatgcctgtaatcccatcactttgggaggcagaagcaggtggatcacttgaggccaggagtttgagacgagactggccaacatggtgaaacccagtgtctattagaaatacaataaaattagctgggtgtggtggcacacgcctgtagtcccagctacttagaaggctgaggcatgagaatatgagaatcgcttgaacttgggaggtggaggttgcagtgagctgagattgccttactgcactttagcctgggggtgacaaagtgagactctgtctcaaaaraagaaaaaaaaaaagaagaagaaaaataaagaaacctgcctcggtggcattgtctgggttgaactggaagagagaggtggggccaggaggctagagtggaggccaagccaatacaggggtcagtgagttctggagctttttgagaacttgggaaaggctggrtagatgagaacagggaagggaatgtctaggtggctcaggcttggactggggtcaggggtgtagtgcagacatctcagtaagtcaggatctcatgagggaaaaggctcatggaaggctcaggaaagctgggcgtgggtgggctgaggtagtgggagagatctttgtagtgtttctagctaggatgcagagggtcagagatcatggagccatctcttgccagacagggaaactgagactatggcttcatcactaycctttggctgcaaggctggggctcaacctcttcatcagacctgaccctcaatatcattctccttcaggccctgcccggaacctcttggttgctgagcttggtcagctcagtgagggttaattgtctttatgctccctgcacccccaccccccgcagtcattccccctgcccaccaagcagctcctgccactcttcctgcttcccactccagcctcctgtccccagggactgctgatggcttggctgggatctagccaaatggtggggggtgggggcgggggtggggggaagagctcccagcagtcctytaccccttggtcttaatggactgggagtctcaccctcagccatgctgctgtcaggccaggcctgcgctccccgggcttctgctgcttgggcctatgaaatctcccgactcagcatgattccattgctgcattcattcattcaaccactcaacaggaacttctcagtagctgcttggtgcccacttggcttgtcaccggggacacagagcagacactgactgagtccctgttctcagggagtgcccagtctgatgaaggagaaagaaatggaaagctgcaaccctacagggtgagcagtgctgtgtaggaggtggggggcccacagcaagcctgggcttcagaggaagagacatttgagccggaccttgaaggatgggtaggaatcacccaggcagggaagagcagagggaacagtttgtgaaggtgggtaggaaaggcacagggctaggcacctgactcagtgcagcctctgggtgggagaagacagtaagggcgtttgggtcattttctagcagttgttttagtactctctacaacttgccctgcagatctatccagcctgctgtttgyatacccccggacataggatgttcatctcttccctcctgggcagcccttcccttgtggtggttatatctgtcctgggtcttctccgcagggcccagcaactccaggctacccagcctggccttatgtcctttctccgtcctgtgtcactgtcccctgaagtagggccaggctggggcacaatgatccaggagtggcaagaacacatctaggcagagagtgggagaaatgcgcagcctttattaacaaaaatctgagatgggtgcaggccctgactcctctccaaaaataatgataaagaagcaggcatggycaaataagggagtgaggacagacagcaggaagaacttcctaccaatgcagaagggctgtgagtctcttggttttatgagagtgggctgtacgtgtgaaagggagggtctcagaggacaagagggggaattggaggcagaggcactgtcagcctctgactctcccataggtgagtgagtgaagtcatccagggagagggaacagaggagggagatcaggactcatcattcattcattcagcagccgttcactggccctaccaaacatgacacccctgggggcagatggacagagccagtgaccacgtggatggaagctccgagtctttcctacctgtgttaatgtcgcaggaaggtatttaggaggaggggccattggggctggccttataaggaagagccacttcaggctgagttgagggacagcactaggaagatggaagagcatttgcaaaggcctcaaggtaagggcaagcaggattttgttcacttagcactataggagttcagagtggcctaggcatgaagtgccaggctggggggaagccctgggccgtggtggagcaggagaggagtggggaattgagcctagactgtaggaagcactttcttccgtgaaggtgtctccaacaggcttgatgtgtaggcattattgtaagtttgcaacttcttggtctctcctggtgctcgtgaccagagcttgctgagggacccagccttgcttgagaaaggggtgttcagtgaacaaaagagaccctggaaatgagagagaagcagtggctgaagaatgtgggccccttccagaaagtggcgtgcaaacaaatacaaagcaatatgcaaatcagctggctagggcttggcagctttggttggaagaaatgagccatcaccccttattatgccggcctcctaccccctctgccccagcctccaggacagccggaacagccttgtctgctccttggagcgccccagcttttctgagacacaggattgtggcctccagggtggtggccgtgggctccctgtcagcaccctcgtcctcctgggaagtcgatatatttagtaacagaaatgttttcacacatttatctcctattgttcagctgcttgctccctgggaaaggccaggtccccagtgatgtgacccacttcttgaagtccctgaagtcacccttctcactgcccccccaccccgaaaaacaggaggcaactggggcttggtgcagcagaacagatttgagtcaaatatctgggaggacttcccaacagtgtggttgctgagatgtgtggaccctggatttctgggctttcattctttggatggttgccttgggcgcagaggaggctttgaagatagagcagagaaggtggcagrcaggcttatgctcaaatttcagcatactgaaagatgtactgttactctgtagctgtgtggtcctgggcaagttacttaacttctctgaaccttgtgtgaatagtggggtggagataattatcctttcttggcaggatgattctgaagaatctggaagtgcagagcttagcccctggcatgcggcaggtgctcacaaaggttagctactgtcattatgaaccacccacgatcagccacactttcagaaagatttagcggggcctggagagggagagaccagagctaggagctcagggctgtcatcgtgtgggagggaccaggaggcctgaaacagagctgtggttgtggctacggtgagaagcacaaagctctgtgggagggaccgaggtttctcagagaagtgtggccacctcattaagttgttctgactggtctgagaccaatccccagataatacaatggaagaaagggcttggtgaagaaggggttaagtctgtggccacacccatgcagtctgtgagccattctgggagctgtagtctgttgtgaatttgcagtaagcatagtttgtactgcctcttttgatccaaatccacaccctgctgccaaggctggccgagggccggccctggtgggtgctgggctgtgtggagcccaaaggtgaagcagcatcgacctcttccctcagggaccccctggcttgctatgtgttggggggtgcaggtaggagcagggatagaagtattaagccataattacgacttctcacatgttcacacagaagtttacagcttcctgagcactgtttccacacctgtgatctcatttaatcctcaccacaaacccaagagactgctgttttctggatgaagaaacagaggatccaggaggggaaatcgcttgcccacaggtattcagccagtggagccagacctggggcacaaatctgtctgcttccagagctcctgctctttccatacattactgttccagatggcagacaggcaagatgtggacaactaaagttggatgtgagacatctcggcagaggaacagctgagcagagagctgctgattccaggctgagagtttggactttgtgttgtggcccaccaggatccacccaagggttttctgattagagctgagctttgagagaattggtcttgcagcttaggctgaatggattgaactggagaaaccaaagtcagactgaggcttctaaatcccatccttggtgcacccagcactttgctgctgtccctcctccatgcttcttctcagtttcttccttctcctctccttcatcttcttccctcaccctttttttttttttttaatagagacagtgtcttgctggctggagtacagtggtgccataatagctcactgcagcctcaaattcctgggctgaagctatcctcctgcctgggcctcccaaagtgctgggattacaggtgtgagccactgcacccagctcatcttcctctttctctcctactcctctctgcctcaggctgaggagtgatgacttttataccatagagctgtgctgtaatatcacatgtctccagaagggggtgctgtcacatacagtccattccagcctgaatcttcgttgtgtttgaagggccagtagaagtgttggacaagtggcagagatgaaggatggagagaaggatagcccattgttctccacctccattgagcccaggacatgagggccctgctgaaatggcactgggaggaatgaaggctgaggagaggttggaccccaaccagaagggacagacatactgagttaagccagaggaaattttctcctcatggttctgggacaggctaagatttggaaatgcatctagaatgacattgcagttggggtctgggtttcttttgggtcatgacttgcttgatactgaggtgctggggatattgcttgtgtctcagtgtgtgtatgtgtacctgaatgtgagcttccagttgtgcatatgtgtatgctgatctgagagggtgagaatgtgtgggtcagtgttcgtataaaagtgtgaacatactcacatgtgtgagcatgtgagtgtccttttttttagtttagttttgagacagggtctcacactctcacccagactggagtgcagtggcgtgatctcggctcaccgcaacctccgcatcccaggctcaagctattctcctgcctcagcctcctgagtagctgggactacaggcatgcaccaccacacctgcataatttttgtatttttagtagagatggggtttcaccatgttggccaggctggtcttgaacycctgacctcaaatgatccacccaccttggcctcccaaagtactgggattacaggcatgagccactgcacccggctgtgactgtccatctttatgtctgattttggtaaacagttatatgcatgtgactgtggcttgtgtgtgtgtacatgtatgtagagtgccatatacatatgttctagtgaaaccgtatgtgtgttccctgtgtatacagatgcctgtgtctcaatgtgagcacagggatgaggggatatgtgtgtgtgaaggcccagacacctgctgtgctaacctttaaggccgcgcctaatgtctggctattcaatactttttctcctgggtcgcgctttcctgtaggtagagacccttgaagggctgggcttccttcaggggactctgggccagagtcaggctttgtgttcagtctcaggttgggccagccagggtcctagtctatcggattgggcagctagacatggctgggaagtgtctaggttccattctccccaggaactcttaatggtcacacttaaagagtttcagggactcccagcacggtcctcttgtactgatgcaactactgaagttcagagaggtgcagtgattaacccaaggtcacccagcaggacccaggatgagatgatagggcttgcagcagagaggggagtgtctgacctggaaggctgccctccctccagcccctagagcaggtggggagctcagaggagagccaagtctgtggtgtgaagccacctcctgcacctggctatttccatgcctcctgggcctcagaggctgcctttgaagtttttaccagagcttctgcatgctgtgagattcctcctggggacgtgtgaagtcgactgttccatggagcatggagactcgatggagaggagcccagtggtgaagtgaggccagaggaggggcttcctctggaagcctcaatttcttctttgcagtagttgctttttttttcgtgttttttttttgttgttgttttttaggttttcaccgttctaacattcaaggctttctctgttatctctctttgagctcttagtactgagacagtgctggggtttggggcagtcctggaggcctatctgggctcaaagtgagggtggcagggcagtcccttagggaaagggctgcgtgggagacagggatgagcttcctgcccatagtggggaggcatgagcaggggctggacagcctggttagcaaggctgtatacaaggtacctaccctagtgaggaagttggttgcagattatcttgagtcccttcaagctgtagctgccatggggggccagagaagaacgtgcctcagctctcttgggcctggggaggattgagtccacagagtgctcctggtgtcctgggcagtggaaggtgcaaggttagactgtgcacctggaagcagagagatcccattccctggagaactgaagggaaatttgtcttcctggaggtttggggctggaggcaggggctggatgggaggacactctggggtggagtgggggtgggatggggaggactgggcaagtccgaggcggctctgctgttcagcacccgcaggaaggagcagggaggcatatcctgaatcatgcagggctctagggtgggaggcccatggttgtggggctcaaacatgggctctggttggggcagaggagaggcttcctggggttggggtctgggcaggaattggggtagaaaaggagagaagcagcaattgggtaccacctccttcccaggtcaggtaattcggagttgtcttaaaactctcagtgggccaggcatagtggctcgcgcctgtaacccaagcactttgggaggctgaggtgggtggatcacctgaggttgggagttcaagaccagcctggccaacctggagaaactctgtctttactaaaaatacagaattagctgggcgtggtggtggatgcctgtaatcccagctactcggggggctgaggcaggagaattgcttgaacccaggaggcggaggttgcagtgagcctagattgtgccattgcattccagcctaggcaacaagagcaaaactctgcctcaaacaaagaaacaaacaaaacctctcagtgaggggggatctggggtccagatggagagaactaatgtttacagagtgacctttaagttttaaaaatgattatttaaggaggcgattaaacaaatcgcctccttaaataatccttccagggaggccgggcacggtggctcacacctgtaatcccagtactttgggaggctgaggtgggcggatcacgaggtcaggagatcgagaccatcctggctaacacggtgaaaccccgtctctactaaaaatacaaaaaattaaccgggcgtggtggggggcgcctgtagtcccagctactcgggaggctgaggcaggataatggcatgaactcaggaggcggagcttgcagtgagccgagattgtgccactgcactccagcctgagggacagagcaagactccgtctcaaaaaaaaaaaaaaaaaaaaaaaaaatccttcaaggggctagccctattttgtagaggggaaacagatgacaaacttaaatggtttaactgaagacagttagtgaagcaagtattatggagatggggaaggcttaagggaaccagcaggacatgtcaagttactcaggactggcatccaaggggccaggggcgttggcagaggggggccgaggagagtgccccagctccatgagccagagccctggagatggggctgccctgcaggagctgtggctgcagccactgcttgtcraaggaggcaggtgggtgagggggtgaatacccaccatgagcctgcatgcttctcaccctttgctctcctgccagtaccctgaccctcactggcagaatttctctggatgccagggggcaagggagccctggatgaagctgccacttagaagtcggcctctggggcacacaacccagcagcaaaagttagagattggatgtggagggacaaagagatgatgggaaaccgaagaacagagagggcatggacttgcccaaggtcacacagcctgttgatatcagaattggagtcagaagccaggctctgcctctgaacactcacttttttgtttgtttggttttcttttttttctttctttttttttttttttgagacagtcttgctctgtcgcccaggctggagtgcagtggtgcgatcttgtctcactgcaacctccacctcctgggttcaagtgattgtcctgcctcagcctcccaagtagctgggatcacaggcacctgccagcatgcccggctaatttttgtacttttggtagagacggggtttcaccatattggccaggctggtctcgaactcctgccctcaggtgatctgcccgcctygacctcccaaagtgctgggattacaggcgtgaaccactgcacctggcctgaacactcactttgtcacattcactgaggtctcctgagtggactcatatgcgcattatctactctctggctgagagctgcttcctgccgtgatcaccgcgctctgtatctgggcagcacaggggctgctgaagaatgtcattctcagaacgcagtgtgccctggagccccccaagccacctgttcattcatcccaactggccttgagggtgccctggtgtgccctgcctgtgcttgtcaccctggccatggagatggacccaaaagcccttgctctccgcttcattagagacaggcacacccagacgcaggcaatcaattttgtcgggtgagtgctgggaccgctgatgaggacccttcctgaggaggcgatgctgggtcttagccttaaagaacaactgagagttttccaggtggaggagaaaaggaagggtattccaggcaaaaatccccrtaagagcaaaggtgtgagcagcaagaaatcaagggtggcaggttcakggctcctgggctggaggaagggcctggcggtggagaggaagggagtgaaggcccagctcacaaagggaagcagaggaaagtttaagcagggtcaggccatggttagctttggggttaggaagctccaaatgatgggtgaagtaggggggctagacccaggtgagaggcagtattgcggttggccaaggacatgtgagttgcataaatgggccagaggaggggtgacagccgctacttcccggctcacctgcctgagctaaggccctagttcctcagtgtctgcccaccaatgcaggtgtgtggcagctctagaccctcctctagggacatccctccctgcctcatgctgcctrtggctttcactctctggagcactcatccatggcacccataagccaccccctcagacaatggcccctaaagcaaaactgtgtcaccgttgcatatctcttgataacactctgacccctccactgccaaatctgataaaagamctccctttgaagaccttcctcctggagtcggatctcagtccttcttgctgtccagagcctgggccttgggcctccctgggaggcgagtcagtgagggcagcccccttatggtgctgggagttgagggaccttggcccagccaactcatccctgttgtgtcagcctctctgggcctgggcagccaactcattttcagtgctaattagcatctcccctgcagctttctgccccactctaagtgcttgacaatcattaggtgttactgtgtgcaactggatcccagctccggcacctccctgccccagcttctcctccagaccccagctgcctgagataagggacctggccacaaacatacaacacaccgaaacccggacacaatctaggcatagggacttgaacaccaacataaatatacaaagaggaaaaacccaataacacagaagaactccccataccaggaagcagaccatagcacagacagagacccacagtacacacacaacacagacaccaacagatgctgaaaagcagacacaggatcattccaaaaagtgacccagaaacgaaaacagaacaaatgggaacatcaatgcacatgacacaggtatacacatctagatatgcaacacaggtacgattcagcacatgtgtggcgcatcgcagggaagcacttgcacttgaagtatacacagatgccaagatagtcagagggagccgcctgtggttccccacctgtgcagcgtctctcgcctctgggctgccgcacatgctgttgcccggaattcccttccccaaggccctcctctttttacctggctaattcctgtcattcttcagatcttctaggaagacttctgcctccttgataggggcctttccatactccccagccttggagtgcttcctgccacatggcatcactgactgttttccaatgagtttctgtcaagttttgggatgaaggattttgcctgtgctcgttgaggtggtgactgtgggtgtgagtgggtgattagggccaaaaaammcccccaaaaaactggacagaggcaaatttggggggaaatgagttaggaatagctgtgaggagccccagctactcagggcctcagaagatatttatttctgtatttatttatttattgagacagagtcttgctctgtcacccaggctggagggcagtggcgctatcctggcccactgcaacctccacctcccaggttcaggcgattctycttcctcagcctcccgagtagctgggattacaggtgcgcaccaccatgcctggctaatttttctatttttagcagagacggggtttcaccatgttggccaggctggtcttcaacttctgagctcaggtgatcctcctgcctcggcctcccaaagtgctgagattacaggtgtgagccactgcaccygacctcagaagacattgaaacccacagagaggacacagccagatgccctctgcctcattttctcagaccctgcctgatttctcttatgtttcttctaggcttgctccctgacccagttccctccttcccagagctggccttgccccttgccacctctcggagctcacacatactcactcaccttctctgcttggctgtgccctacccctacttctacgtgcagtgaaatccttgttattcaaggcctgaggtcagtgggcacatcatccatgcctggcgtcctaacccgtgccactgagtatcgtgaagggaggtagtggagggacgtgcttgggagcacaagccttgaggactgtctcttggttcagatctctgctcctctacttcttagctgcaggattgtgcaagttctgccacctttgttccctcatctgtagaaaggagaggataatagagcccacctcattagggcagccatgaggattaaatgagacacagtgtgtaatgtacctggctccctctccaggttgcgtgagagcagggagaaagctaatgagatcaaggatgtgcaaatgcactcagaaggtgcctagtgagtccttgctaactggcacttagtgaaacaaacacctcctgtgtgagcacctaatatgtgcctctgtagtgggctctgtgacccgcccctccttagtttctgcatggctgccagttctgcacagctgttactgctgtgggggcttagaaggtgggggtatgactactttttctgaatttatttttaattttttacatctgttttatggaggcataatttacatacagtaaaatcaccaayttaaagtgtataatgagttttgataaatatatatggtcataaccaccatgacaattaagaaaagaatatttttatcctggcaaacttcccttgtgccctttgtagtcagtccctttgagggggacttcttataggagtgtgagaagtactgggttttccttgggctgcaaacctgggcacatggagtgggggtgcctccaacatgctggaagttgccagggaactgctgaccctctctgggccttggttcctggcagaggcagtgcagccaggcaggggaagggatgcttaggccttggtctcctgagggcaagccttggatgtgagggttggatcrgctggaagtggtggcttcagaaacccatagagtgggtgacagggtagggacttggtgtttccacaaacccgcccctcctttgaccaggtgtgccctgtggtcctggtggaaatggctatatattgtccagactgtagcaggggctggccaagatggtccactcctctccccatcctcctccaaccagaggccataaaccccactctatagattaacaattccctgaaaagaagggggtcacttttgttccccagttctagaactaaatattaaagcaattatgtaactagcaataaattacttaaagtagtgactcactcagcttaattagagcgcaagcagggagggattaaggtatttttagagcacacacctcactctctcctgtgggggaggcctctgtgcaaggtgggggtggaaaaaaggctgggaactcatgggagcaccccaggtgtctgcaaggagatgaaagctgatcctccgccccactgaggtcctaaggaagaaaggccgagtcagagctgcagcaggagggattcggatcagactcaagaacacttcccagtggtgcttatttgagaactgggacggcaacactagattgtaaactctgtgagggcagggattaggtctgtgacygcctcctcacccagcgggagaccaagaatgagacttgggagtcagacacaactggstgtractcctgcctttgcgggttgccagcacgtgggcttgggcaggttcctttatcaccagaagctttgccgtctcctccactataaagtgggcacaataacatccacctgcatgcatattataaggattgagtgggttaaaatgtgcaaagcaagactttgtgctcagctgggcacagcggctcacacctgtaatcccagtactttgggaggctgagacagagtgcttcagcccagtagttttgagaccagcctgggaaacatagggagaccctgtctcttaaaagaaaaaaaaaattagaagactcggtgctgactctgctagaccaaaagcccacaaaggcagggattaggtttggtttgtgttgttcattgttgtatctcaagcttcattcataggactgcacaaagtaggtgttcagtaaatgctttgttgtgtgactgcgtgttaattttgttcccattctcctgctccaaaaaaaagttcattttcctgaggttgtgagtgaagaaaataggcagtgtgggctgggtgtggtgtctcatgcctgtaatccccagcactttgggaagctgaggcgggaggatcacttgaggccaggagttcaagaccagcctgggtaacttagcgagatcccatctctacttcaaaaaaatttaaaacagaaaaaatctagggtgtgtgggggggcaggtggggaggttgcaggggtgcctcacaggtgggagtctggcatttctcctccaggctgaggaggtggtgacttccagggaaagtcctgggagggatcagaaccacagctccagcctgcttggatragggtggtcttctggctgccaggagggtagctaggtgggaagatctgcccttgtttcctccataacctggggtgggaggaggaggagctcccagcccaatctgatgggggagaccagaaccctcacccaccattgctggcagttcagagaaggcagcgataagtcggggtggggcatcctgaaaggcttcccagaggattggatgggaggattagctgagaagacatccggcatccgtaaaatggagtaatgattctgaccctgcaggttttctgggaggattaaatgagttacattttaaagatgcctggtacatgcctgccaggagaaggcacaacatatgaactccctccctcttccctccacccctcctcagctcctgtgacatcaggagggacmtgccctgccctgctcacagaggctgggtgggaggctcccatcatggccttcactgaggctgcctctgcagttggaccaagctggacacacagtaggtgcacataacagatgggggcaggtctgtgcttgttttaccagggtgttgggaggctgagggaagggcacagctggattggggtgatggagttcaatccctgctcctcccccagatccaagatcctaagacgcctatgtccagtggctgctctgatcagctctgaccagctctcctcacacctcataggccttccagggttcaggtgatgaattagtgatgacagcatccagcatcgctatgacaaccacatggcactcttagcctccagtcagggctcagccgcagaggccagagacccctttggctctgggcctttgtactggcgtgtgtgagcsgggctggggcctgagggagatggaggagtgggaggggcaggggccggggcatggggctgcatctggcatggactggagttcattcagattgttccatccagagggaccttggggacagttgtttctctccttccttccccctttcttttcattcctccatccctcctctttcccctcctcccacttcttctgagccttgttcctgtttgaggccctgggctgccaacccttttcccctcctctgggaataaagccaggctcagccctcaccccggggagctgagtgaggtgggggacagccaccttctggtctaggcctcagggaaggtgtgtggggaccactgatggcttggtgagagggcctgacccagctgggccaggggctgtgcaagtggctgctgaccctgatgagtggggaggaggttttcagtagagaggcagggtcagagatgaagcagcgtgggatgggggagcgacagatgttcagagtggcctaagtgtgagatgcggagcagagaacgtgggaggaatcgaggctcgagaaggactgggagagagtggatgcagtgaggagtttgaagtttgtccctgggggaagaggagccctgaagatttttgttgttgcttctttgatttttaaatgggagggttcattttagagatggggaaacaggcccagggtgggaaagtgacttgctcaagcttaagtcactagagacagactgagagtacaggctctgcttgggtcctgctggactctagctgggacctcttgccccagacttgctggccaggattttcccaggtaatcactacctccgagaaaggcgaggagagcccatgggtgactttgccctcagtttgaatgaaatttgcatcagcaagggctatgccgatagtcctttctgctcgtgtctggcctgtttgggggtgggagtggggtggaggtgagcatccagggaaggatctgggaagtcaggggcttgccagggccagcaaggcattagggtcagagatggattcaaacttgggtctttggagacccagcccagactctgtgctccatctccttcctccgtctctcaggagcctttggctgagttaggcacctacaggaggcaagggcccccccgagcccctcacattctcctcagggctccttctggccctggggcctgatattgggcctgctgtgctggaacttatccaggcagaataaacctttagccccattgtcctgatgaagaaactgaggtcccgaggtaacagtgactcattcagggttacaacaggtcagtggctgggctgggcctagcgtctggccctcagcttgtctacatggcccccctcgtggctctcccctygcctctcgcaccccactgtgcagcatggttgggcctgccagccttgatggatggctctgcagctcaacctccctcccattcctctccrgatgccgggccgtgagcctcctaatcaccagtcctgcctggtggccgccaagccatccatctccccacacagccttgcccagcacaggtgattttgtttggggagaaggggggcacagcaggtcttcctctgaggctgagccaagagtttggctgcagcccccactctggggkgcccgagggttagggaatagcctgcactcccttgctggagtgtcagaaatccctcctgaatctccctagggcacgtgcacatgcacacacaggcacacacactcacagtaacactaataaaagctctcgtgtagcaaaagaatattgtatggcaagtattgttgcagagccatatgtatcatctcattcatcactccactgtagagatacagaaactcaggctcagagaggttaagtgacttgcataggctccatatccaggaaatggaggagctgggatttgaacccacatccttatggctcacatcttgcattcacaactcctgctctactgactcacctgtgcacacacacacacatgcacacacacacacgtgcgtgcacacacacacacaggcactcacttgcatgcatgagcacgagccaccattttggctcttgtaccatccatctacctgggccaggttcttgaggagtgaggagaatgctgggctgcagagggcatgaggggtcactgctcattgtccccaggctgccccaagctcattgtccccaggctgtctcaccctggctgtggcactggctggctggggagctgcagggaggcagcagcctccaggcagtggaaaggggaggctgggagacagtcgatcgatcatccctgcagtgcctccttccaggaactggggcccaggggagtgtggcgccacgggtcgatgttctgggcagcagcacagtctctgagtgcgtacagggtgtgtgtggggcgaggctggtgtgcagctgcccgccttcccctggctcccttcccctgctcctgccttcctcctgccattcacctgccagccccacaccttcccctgattcccccactgtccccaacctgggcactacagaggctgagaatcaaactcccagttcccaggcacctgtgtgcctgctgctaccatcccgccctgccctagaggcaggtctcgggtgggtgctgcaagagtcaccctatggtggttggggatgggtgggtagggggaccgggggctggagctgtggggatgtgaggcaagcccacctcagagcctttggagacctcgacagacaaaacgatgagttaagaaatgtaaaggggcacatagtgggtgctgaattcatcttgtctcgttcctccagtaagagtctggagaaaccaagagcagctgggtgcctctgagggcacaggagctcccagggctggctggcaggtgcagctaacagtgttagcaatcccaaggacaggtagcttggggcggaggasagcatgctgtcacccatcctgatgaggggagagatgtctggtgctaggagcagtggtggccggaggagggctggggacccwccccaggccaccccacactctccctctgggaggggctcctgagcaggcctggtcaccttgcttcttggctgcttcttccccggyggaggagcctcccccaggctctcccacctgcactggcctcaagagagctgggattgagccccagttcaggcacctgctggctggcrgaggttagggcaaatcactttcctcagccctctcatccgtgacaggctctggtgagggttaaatgagatgttgcccgtcaagtgcctgccacttccctgacgccgagcagctaggctgctctgggttctctagcacctgcctcccctggtcccagcrctgggtgggcggctgtgttctaccggtcactggtgggtcctcagggccccgacacagggcctgctattgggaaagagggaagtaaacatcccagggctggagctctgcccactatggaggtgttccatcttaggctctgtaatctcctcattcactctggtatggggacaaatgtgcctctctgcactaactgagcccccatgggcaactaggagtggtgtcacttggggtggaggtgggcaaggatctctggactgggatttccaagccctgacttcctgttatttcaggcactacctcattgttccatcttgggcaagacctgtccccttgagggtaagagacacatgtgacctctgacctccagagtctctcttctgagcttctgtgcccagatgattctgtgttctaggggacaggcgaggctggggggtgacccccatgccactgatgggcagactaaggagcaggggcccaggactggggccagctcaggactctggtggcctcggtgcccttgacctggtattgctgccgttttgccccactgctgtctgtctccgcgtccgagtcaccacctgtccctctccagtyctctcctctcttcctttattactatctctatmttgcctcctgcctcaggcttatctcctcctgtcatrcctctatccacctctgtcactcccctgcgactctgcctcactccctggcacaccctctccctccctgggagtcgggagtggagcctcgctgggaatcaggacccccctgcctctggtctctgtctaagcagtctctgcgattctggccagctcttatctttttccaccttcccgaatctctcttgctstctgatggtgtctctgcctttcactgtctctgaactccctttgtttttctctatatgcttctctctgctcttatctctgggcctctgtctctcagggcctgactggtcttgacctctttgcctccttcttcccctcgagagcccagccaggcagcakgtccagccctccagcccagagaacagatggagtccaccctccctctctcttgctggctgcctcggaagccccaaacaatggcctccgccctgcaccgtgcsttgttgctaggccttgggctggcagcacctggcttccatagcgacgggtgcttagaaacagaatgccacrtctcccagtcccaccacaggagcctttgccgattgagcgagtgccttttgatcaatcaggaagtgtggccaggctctaggttgcctccaacttgaggaggcaagagaggaggggactgtggtctctgccttctggagctggggggactgctgggctgggaggagttgctcaagtacagccctgaagccaaggaaggactgggggaggccctgggctcttttccccaagtcagcctgctgcaagaggcacaagcttgggagctggaaggggctgtgttgaaattgctgttccatcatttctagctgcatgactttggaygaatgacctcaggtcccagggcctcagtttcatcaactgtaaaattgggctaataatatcatgaagattaaatgagagaatagatctggcacttagtaggtggtcatcaatggccattcccctcccttcccctttaaagttgtttaaaatttaattgacagagaggagaaggagggttcttcaggcctgtggaatggtgtaagcaaaggggtggaggctggcatgcacctcacatatgctggagtatttagggaggaccaggggccatatctggaaatggttctgccagaagcagccaggccaagctgggtgccatgtcatgcacctgtaattccagctactagggaggctgaggcaggaggatcacttgagccctggagttccagatcagcctgggcaacatagtgagaccccatctcaaaaaaacaaaacacaacaggcaggctgatgggcccatggagaagggactctgtctcctgggaggtatattcttgccaggtgcaaagggatgggcttgactaatttctcctctagcatttggggctgctgggtagggagctacattggggtccccttgcttattctcatgctgctccctacttctgccctgtcacttggtcccagragaggggctcccactggttccttttccctgccaggcctgcccaccaaggccaccatggccacacagcctgaatcctggggccagcaagtgtccatggaaggccccactctgtcatcgtagagatcaggaaacaggctcagaagtaggagggcttcctggtcctagggcccagctcttccytcttttcaggcctgtcttctgcactaaggacttcaggccaccagggaaggtggggagggaggaaaggagatgagatagacttgggcgggggcctgaggacagagtttcatgtcacttgggcagccaggaaagggttaaagatcccttatcccaagccatgggcactggcactgccagaggatgctgaggcctgctggggcataaggacaacaagcaacatccttttctgagctgtygggagtgccaagctctctgttaaatacttttgagcctcttctcatgtattcacagccacctttcaaggaaggccagttgatccccagtttagaagtgagaaaacggggtctccaggaggcacttgtctaaggtgacacagctggagagttggagatggtggttagaccgagtcacccccccagaccctggcstctccctgcgtgccccttccaggacacccatcactcccttgacaccccttgggagtgggtgttcatttccttgggctctcccaatcccagtccttggtatccccaactgcaggcagacacaggtgcttgctgctgtgccctcccctttacctggcatcacagagactcaagcccactgaccattaggctctcaggggcatagaaaccaggtgctggagtcttagagtcctgcaatcaggcatctcaggcagtcaggacattagaatgttagaatcttgggcttctacattctcaagaccccaggttctcgcattcacagaatgtaagaaaaacagactttttgaatgatggggtgttataacagaagctttgattttctaagaacatgaagctctgggagttcttggagccttgaagccatagactggggcctccctgtgtgatggtttctgagttagcagggagtgttcagagtatggggccttggtccctgttgcttagaccttcttgccttggtatctctgatgggctcagctcttagtagcctttgtgtatgtgtgtgtgtrtgtgtgtgtgtgtgtgtgtgtgtgtgtgtgtgtgtgtgtagtggggactggggtcwggggtcagggactgactctarcctgaggcacccctggagtggggccagcccaggaatagcaggtggaggaaagccgggcagcctcagggctgcagctgtctggtggtacagggcagggctctgggtggctgcctttggcagaggaccagcctgcctccttcgtcccctacccagcctgctaccaggatcaggaggaggcatctccatgggactcctagggctggagtcagagcagcccctccaggttctgcagcctggacggtaggaggtgccactaaggggaggagattggggaaggattgggacctttatctgcggtgaggtggggcacggggggatgagagatatagtgggagtctttgaagggtgtgggatcagtgaaggggctggggatttagtgatgggctggggcttaggatggagccaagggctctgtgggtgggagaccttttgagagggtggagactcagagagaaggatgggggctcagcaaggggatgtggctcagtggaggttgctgaagagttycttggggttggctacacgcggtggctcacgcctgtaatcccagcactttgggaggccaaggcrgatggatcacttgaggtcaggacttcaagaccagcctggccaacatggtgaaaccctgcctctaccaaaaaatacaaatattagccgggcgtaatggcaggcgcctgtaatctcagctactcgggaggctgaggcaggagaattgcttgaacctgagaggcggaggttgcagtgagtcgagattgtaccactgcaytccagccctgggcgacagagcaagactccatctaaaaaaaaaaaaaaaaaaaagtctcagggctgtctctgcactgctccaggttcctgaggacggcggttggggctgggggagtcttctgtccctggggtaggctgagaagcaagagctccttttcccaactctgcccaaagctggaaaggttgttagagctgctaagaaagctggcatctgcctctccttttgctcatcttcctttctggtttccatgggaatctgtggctcaggatgatcaggggttgacaggatggcgctgtggaaggagtctgtgtcaggcacagccatcccacdtgggaaggagccggctggtaagaaagtgagttccctgtccctgggagtgtgcaagcagggtaggggctgaatggctagagtgactccagaaaggggttcagatggggcagaggaagcagtctggaggccacttccctgagacaatcatgttttgtgtgattggctctgggggccccaccagccccaccttccagacgtccctgggcctcacaaagggggttgctgcaccctaggcactgcctctgatccagccccaactcctgtgctctgtgcctggcctatgctgaacacggacatgtgcagctgaatcagattcagtctctgcctagaggagccccagtctgatgggggaggcacacagggacacaaatatagctgggtaagtcctacaaaagggggcatacctggctgggaggcagttccatcactgattcctgtagtctgtagatgtctttttgagcaattcttctgggtcaagacttgttcttatttgctgggataaaacagcagtgagcaaaacagagctgacagcatggtgggaaggttgagctcttccagaccgtgatragaagtattggtgagtggtggggagagtggccagaaggcagagtgtgggcgcagcatgagaggaggctttgtccagacttaaggacctggaaggccttgaaggccaggaccagggctccaattgtcctgctggcaataggaagccatatgggtgggggtgaggcagaatcagatttaggtgtggaaaagatgactccagccagtgtgggcatygaagaggaggcacagaagcaggcgtggccacctgtgcctctgtgtaggagctgtgtgagcatgtgcttgaggatgtgtgtctgtgtagaggactggggtgtaggcgtgataggaacatggacgtgtatctatggaaagactccaattgtgcataggggtgtatgtgtgtaagattctgtggcccagggcagcctgtgaaaaggaaggatcttggggtctstggatgatggggagcagagactaaggcctaaggtatgctggggctcgagccccctggactttatcccctgtgagctggcaggtcttagactagtcctggactagaatcctatgggttcccttcccccagagggtcatggggccagccatctgctgcagacaagacaaacatgcatgcaaatcacatgaaaatggatgaggcctgtggcygacccaccctacagcccccatcccctgggcctgagttcactcagcctgtacccttcctgacccagagctgctgccagggctctgggaacaggccttgcccactaggagctgaaattcacattgtccccagcacctgcccgtggccacatcctctctctgtgagggctacccccacatctggagccatagccagcggacacagagctggatctggactggtggccatgggcagcacctctggcaggtgctgaggtggaggaggcagtatccaggcaggcatccctgggcagaaggtacctctcctgagcagacaggcctwcccaggcaccaggcccaaagataggggcaagggctagatcctggtattggaggamcctcaggagaggctgtgtgtgacttgctctctctctgacctgggctagagcataaacacgtgtcacatacttgcacacacattcacacgtgaaagcacgcacatgctattcctggacacttgtgtacacacaccactgcacacatatacctgcatgtgtgaatatacactcacttctgcacacagacacatgcctatctgcatagacacacccgtgccaacccctatagatacacagacatatctgtgtatacacatataagttcagctataccactgcagtatcacacaccctcacaaggatacaaacctgtgctcacactctcttccaccctcacacacatcatgcttacaagcctgtgtgcagccttacacacatgcacacacrtacagagcagcctaagggtggctcacccctgcccaggtgaacacctgtgcccactccagggctggagtgttgaggaaagggtctggatggaggcagaacctgcagagatgtcagtttcttccaggaagcatcttggattgtcccttcacagagcccttggaagtggggccctcttttagtccatgggctctagcccaggtcacagagagagcaagtcacacacagcctctcctgagggtcctccaataccaggatccagcccttgtccatatctttgggcctggtgcctgcgtaggaccatctgctcaggagaggtaccttctgcccagggaggcctgcctggatactgcctcctccacctcagcttcctgagcactcaaagagaagcaggccaagcttcacggctgctgagaagtctgagaccagggagggccaaagccttgcctgaggtcacccagcatgtcagggaagggctagggtttgaacctgggcttccaggtgggggtgtaaccatggtccatggcaacaggatagatgcatgtcaggcagcagacaggcccttggaagcaagacatgtggtcatgggggataggaaaagacttacagtctatggagatctgccaggaccaagtgtgtgagatggagagatggtgcttcttcaccagagctcactgggcaccacagggctcccagcttggctggaccatggggactcagggaagaatcagacaggccctgctcttgagggagggctggggataggtgaagaaggaagagggcattatagactggggagatggtgggggctacttctcgttggatggcagttttcttcctgcatcttgaaagatctaactttcaaatttctttaccctcaaaactcggcatggagtacattctcagtaaatatttatggcatgaatgaattaatgaaagtatgatattggcaggcagatatgcctttggaagggtattcaaaatgggagggcaacaggttgggcaaaggcaaagaggtggaagaaaagccagaggttcagggtacagctgagtcaggcatggctggacgggaagtggtaggagaagcagcaggaaaaagtcacgtggggatgagccttgcatcttatactgagtttggatgttgccttggaggccatggggagcccagtgaagattatgagcagagggtgaacatggtcagagtgaacctgccctggctttggggggtcctgggctacatagtagctgcttatccttggtgcaaagagcactgggtttggagtctataggccagggttcacattcctatagtaaccagctgtgccatctcaggtaagcatctacatttctctgagcctcactttccttatttgtaaaatggggctaatgccgtgcctcctgaggctgttggatctggcctgggtgaggaaatgctttgccagcacaaggccctaccaatgagaggtgtcatttttattaggaacaaggcagggctggttcctagacagggcctgaggttgagtgggcccaggacccaggctgacagctgagtcaccttttccaggccaagtggcctctaaggtgggaagacaaaaagagttggctagaggggctgggctatgcattcctaagctggagctgggaggaaagctggggctgggactgggcttcctggtgtccgagatgggcagagggtgcagacaccgggatagtaggaccctcagccactgcattcttggggacaaaagaggagctgggaaatctgatttccttacctggctttgctcaagaagcaaggaatgtatttaaggcacagactggagtgagatggcctgggtttgaattttgactacttacaagctatgtgactgtgggcagtttactttgtgcctgagttttccttatctgtgaagtgtgactaataatagatcccaccctataacattgttgagaagatgaaatgtgaggcacacagtatgtgctcaataaatgcgaaagcctcccagccccagatgtatacactcggccagtaggggccagccctggccctcacctccatgggacagaggtcagccagggaggagatgcatctactccagggttctctgacctggcagcaaattagaatcaccgggggacattcacaaacatctgggatgggggttccagatatcagtatttaaaatgctcccaggcaattctaacatgagtcagggtgagaacccagaacaggatcacagattgtgcagttggagtgaggtagggatctgcgtgtgagtggaggagtccttggagtggggtcactcctagctataagagctcggcaaggcctttaaatgtgccaactcaaggagccttggttgccccctcaggaagggtgctggttggggaatttcaaggattgtgtgagagggtttttctgaaagggctctgcactctaccaagcactggaagaaagcagtgcacttgtttattgagtctagtgtaataacatttcacagatggggaaatagaggcctagagaggtgctgtggcctgctcagaatcccacagcaagtctatggcacagttaggactcaaaccctctgaggaatgcttggatctgaaaggttgacacagaaagactctttgagctgagggacacatagagcacacaccagggaccccagtcattgagctgtagtttgagagattcaagtaagactgaagaaataacttcttggctgggtgcagtggctcacacctgtaatcccaacactttgggaggctgaggtgggtggatcatgaggtcaagagatygagaccatcctggccaacatggcgaaatcccatctgtactaaaaatataaaaattagctgggcatggtggtgcatgcctgtagtcccatctactcgggaggctgaggcaggagaattgcttgaacccgggaggcggaggttgcagtgagctgagatcrcgccactgcgctccagcctggtgacagagcgagactccgtctcaaaaaaataaaataaaataaaataaaataaaataaaataaaatawaataaataaaataacttctcaagaggtgagtgccatggaggtggtgcctggagttgggagcccaagagatggtggcggtgccaggccagggtcggctgttgaccatggtctgaggtggcctcccctgaagaacaagtaactctggccagtggctgtaacagatacctcccgggcacctgtatctcacccagccttgtccagagcccaggactgagccagtgacacatgctcagaatttaccaagagacttgtgcactgagctcagactcagacctagtccttccaacagcccttacatgggtcatccccttttacggaagagaaaactgaggccaaaaataggaagggaggccctgtgggggccagaacctttacacatcttagcccaggtaattttttctacagtgttaataagtaggatgaattgcccctgtttggaagattcagtaaaatacattgacttggcccagatcacttactctacacctctcctaagtccccagatgtgactcccaggaaagacacaaaaaagggctacccagagggataagrtagtaaccagggaagccctcccagaggaggtgggccttcaaatggcccctaaatgacaggcaggagggaaggatctgggagggtattgggggtggggtggcatgggcaaaggcctggaggtgagagtcagtcagtcaytgatgtgagaagagcaagaagtagaaatgtaaggaatggtggggaggggagtcagagctggatgaccaagcaagggttcagctgtagagggtctggcccgccaggctcagggctcgggctttattgtgctggtggtagggagccactgagggtgagtgggggagagcatgccagagcatgcctcagaaagaaaggtgggagaaacgctggcatggagggcygccccctgagttggtggggtggccgggctctgccaaggctatgtgccagctgcctggactgtgtccaggaatgggcacaatgactcaacattgagaaaatcactccccagggagaaagggccctgatgaatcacccagctgaggtggggaggctgggaggctgggaggctgggaggctgggagctcactgagtcaccgtccaagagttggtgaggaggggagctgcagagagaggggccggcagtgcagttgacggggggattcaggtcagaccacattgagggctgtcgggggactctaccttcccgccattcccgggtttggtcctcctggccgtcctgtgagggagatgagaaaactgaggcccaggaagtggggggaggggatccgagcaaggtcatgcggcaagtcgctggcaaaggcctagcgagacccaagcgcaccctccagtccagacacgtcctgccgccccarccgctttcatgccaagcagaggcctaagaaccgggtcggtccgggcagggagctgaccccggtgacccgctgaatccccggacgcggcccctccgggcagccggcaactgaggccggattgcgccgccgcgatgggacggcagggggcgcaggagcgtcgcggctgccgcaggctcctgaacccagaagccgctctgcggagaaacgcgctcccggagcgcgggtcccaccgcggaactgcggaccgtgtggccctggggcctgcaccctctccggctccggggacggcgacagagacctgcccacccaggcctgggggccccagtcagtggcggccgccgtgtgtgcgctcggtgtctgtkcgcacgtgtctccctcgcagatgggcgactgctccagggcctgtccgtctcacagcgacctccaacattctcccgacttccccctgcctcctaggctgagggagaggagcaagcccgaggctcctgcggtgtccgcggcccctgccccccttccccttccctccccaccccaccccactgcgccggtctctgcctggggctctggccgggccccggaccccagagtggtggcggggaaacaggrtgcgatcagacagggtggaggctctgagagcggcccctgcgagatgcgagagaagtggcgacggggcgaggggcagcgagcgcaggctgacagcaggccagctggaagggccgagggaacccagggcgagacagaagcggggtgacagcggccgggtgtccggtggggtcggaggatccgacgggccgagaggtgcggtccgcggtggcggggacataggcggggccggggcgggccgggggcgggcggggggcgggccggggcggggccggggcggacactcgggcggaccaggcgaagctgtcgcggacgcgctgaccgagcgcagcggccgggccggcgggcgggcgggcggctgcgagcatggtcctggtgctgcaccacatcctcatcgctgttgtccaattcctcaggcggggccagcaggtcttcctcaagccggacgagccgccgccgccgccgcagccatgcgccgacagcctgcaggtaggggggcccccgcgctgggcaccaggagaacggggtgtccggcgagcgccgggccgggtctgcccgcccccgaacccttctcagggaggagacccctcctctagttctgaattctactcctgtgctgggacggcagcgcagaccaagagcccttgaagccccagctctcagtccacacgtcaccccagactctgaactcctttcggatccggggctccaccccaagcactgagcttccagtccacggtgggaccgcagtgcacactgagagctgtgcccaagcctcgaattccctttccttagattagtggggaccctgcccacgcctcggaaccttcaccatatatgtggggctcccggcacacctggagcacctgaacccccagctgtcatccaggactccacctcagagccggcctcacccaaagccccaaacctccattccaagcctcaactggacacccgctcagattcccacccaaacatctggacttcagtcctcagcctggaacctaccccagagtccaaatctctccttccatcagggcttcactggctttctctgtgggacccactccccgatcccttccctccctcctgtgttggagatctccgagtctttcctcgtggggggcccctcctcttgttsctctccaggtacagtggtcccactttattctctgggcttctcctctggtttctcttcaagtatttctgggctctctaatttggtctgttgccccatgtgcccacctctcttggtctatcttggtctctctcctgtttctctaggtctccatcttcgttttggggtctctttctgcagccaccccttcctcttgtatctacctctgctttgtggtgaggagggggcaggctcagagagcagggctagtgtccctgggacacccccgccccccatgttctcaggcatggcatggtgtgggctcaggtggaagggcctaaatgtggagtgtgctgccctcaggcgatgcccagggatctgaggtggtggggggatgatgtggtgggcactggcttttgtaacttataaagcccctcatcccagctgccctggtcttgacgggggcggctagggcttgagatagggaagagtaaactgcaatctggtgtcaacctgyggtgggatgtgtccaggctgggtgggtctatagtgtatgtgtttgtgtgagtgttcctgtctgtgtgtagcacgggctgggttgcatgtgttgggtgtgtcttgtgtgtaatcatgtgtgttgtgccgtgtatgaatgtgtcatcgagagtgggattatttgtggggagattatgggaattatgggtctatggcattgtgtgctatgtgtggctggggaggcagtgttgtggctgtggagtggtagctgggtgtgtggctgttgtgtgtgtagagaacttgtgtgtatgtggctgtatgtctgttattgtacagtggagttgttgtagggacagcttgcatacaggattctatatgtagttgtgtgtgttactggctgttgtgtgtggccaggaagggccactgcaggggcctgatggtttccactgggtgtcttgtcagagaggagttggggcagggggtgccgtgtgtgccaatgtgtttgcagcctaggtggctggcttagagtcactatggcacatcctgggattgcttgggtaatatatctattaggacctgagtgctggtgtttgaatgtcatgtgtctgtgtggtggctgctcccgcgattctggacaggaaagggttgcagccagggctgaggggtctgaggtgaggagccagttgacaagtgtgtgagtgtgtgagtgtgtgtgtgtgcrtgcatgtacacgtgcatatgggaatggggtggggtgggaggaggcagtgggccagcagcgctgtctatgctgaggggctgtgtgtgcccacaaacrtgtgacattaggtgtgcacattatctatgcaggttgtgtctgcatgtgtctctgtgtctaggtggcgtgcgtattgaatttaattggatgcatacacctgtggctggggaggtgagaggtgtgtgaggtgcgtggtgggagacggtgtgagtgtggtgtgaagtgagggtgtgtgagctgggtgactttttggtgtgacgtgtgaattatgtgatcttttctccccatgagctgtgtgtgcctgtggtgaggagtgagtggaggatggccagtgagctggcggtgtgtgtgttgggggtgttgaggactgtagaatgtgctgcggtggcagtgtgtgcatgaggtgtgtgtgaggaatgaggtctgtaacatttggggcgtgtggaatatagtgggtgtccccataaatgtctgtggagtgacgcatgtgtgcaaaagggcttggctgccatcctgttcttgctcccctcctgatcaggtccctagagatgccctggaatgttctccatgcccccccaaccccagctgcccctaccctttgcccttcatcctccttgccttgaccaagccctttgttttgggtttccggcggagcaggcgctggacaggcgggcggcaggcaatgtcgtggtctgagaacctttgttctcttagtttgactggtgtttggggccttggtttggaggagggtgtggagaggatgcacgtggcagcaaggtcactgtgtttactacaccacttcgtgctccgcagaggggaggcrtacggcgcaggcagtgaggcctgggtggtgtctttggtggcgcctgttggtgtaagaacagcttaggctgggcttggagtttgccagccatgcagtcttagtccatagtggcccagcgcccttcctggctcatgtcagcggggctgagcagccgagcagccaagcactcacttctccaagttcacctgccctcgccccttctctgtgtggctgcagcccctggagacaaccaggaagacctcgatttagttctatttgtgttcactccaggtcagatggaggagaaagagtccccatcctcacagagacacttatctgaaaggagagagctggtcacacctttggggaccctctagactgacgcagtctgtagggggatcraggtcataccttccagagagagctgtgggaaaaccctactgggctgcctcccagcaggtgcttgagagaagaaacatccaaggttccttgagattggaaggcttagagaagtctgagtcagtcagggaaggggctggggtcgatgccgcagtgtcacataccagaaggttctctgaaatgaataggcttgaactggaccttgaagggggtgttggggtgggcagagaaatgcagcctggggctgaggaaggttctggcctgactggcaaaagggatcttgctggccattccccaggcaacactgtctggctttgggtagccatccctgggcctccagccttctcaagctttcacggtaccttttttatcccattgtctctggctggaattatcttcattgtcgttgacattgtcatcttcatcatcttttaggcagttatttccaaattccagggtcctttcacaaatgtctcatttagcvggttaactcatgcaattgtccaaaagtctttatggaacactgctgtgtaccaggcaggcacagttttaagtgccggggtcatggtggtggccaaactggcctcatggagctcctaccttctgtgtccagccatgctgtcagttgcccacccttctgtgtttcccccagtctggggcgcctggttctgtggggctccgcatgtgcaccctctggtgctggggtctggctcctaccagaatgtgagctctgcagaggctgggcccgggtctctcctctacccaccgtgtgtgtcctgagctgggtctggcagagtccagatgctcacacctatcatcaagtgacyggaactgccatgtagggttggcagtccagctctgtctagggaaactggggtccatcggatgaggggactctcatctcatcaggcagcatctcatcaggcccttcttttaccagtagctccagagaccaagaagggtcaggtgactggtgcaggtctcacagcagggtggcgcggctggtgtcagaagacagcacttcttgctgccaggttgggctctggtcctagcaccatgctgctctctggctggcctctgtgctgcctgcggcgggtaaacgattattaatgacccccctggcaaggagacaggaaatgtttcccagccacagctggggacctgctccctgccagccccagctatccatacccgtcctgaccatggcatcggtgctgatgttatcttcattctgcctcagtcttctttactccttctgcccatcccccgacctccctgatcttgacatcctaagggtaaatgacgagaagctacagagctttcttttccatatccctgtccctcaccactttctccaacctgactcatctctaccttcttccttgtcccatgccagccagaagtagctcttcctccaagaaggcttctctgaatgcacagccagctcctccagtgtccactaccctgagcccgaggcactgagtccccctcattgcagactctagtcctccactgatggtttgctctgacagccctagggctggcctgggcacttcccgcagactgtccctaattgctgccttaggactgacatatgaagggtcctcccagatgctacctccaggaagtctccagttccactcagcccagggattcttacctcctttgagcacagtgcccttcctgtctgagtcacacatgtgtacttccaggacttcctaggtggacattagtgaacacctgctatgtgcccagcacagagggtgggaagagatgagcaggatgcaggccttaaaatccccacaccttcctccaagcctgagcaatgttgcatcagccccttggcaggtggcacagacctaggtactagggctgggggaggggaggcggagaaacagggagtgatgttggtagagtgtgtggggagggcaacgagggagataaactcaggggccatggtgatataaagcagggacccctatttcagcccagagtgggagggaggggcatgttggggagcttccaggaggaaacaaatctgaactgagagctaaggtcaagccaggagaaagttctggacagaggggagagaatggttactgtgaaggttygctggtggcagacagagggaggagagcctgtggcagcaccactccatggagcaggcccctgggtgcyagccggctgggtccgsggggatggggactggtaaagctggcccagccagatggtgcaggacttgtaagccatgttaaggactgcggacttattctggagggaaattgaccctggggaagagttgagagaacggatatgacagatcagatctgcatgttcaatagctcyctggaccatggtgtggagactgaaggggaggctggtgtggtccaggtaagcgggggtgatgaggcctggacagggaaatggctgaagaatggaggggaggggacggagtggccagggctggtggagggagctggacagctgtagacgtgaagggcaagggaggagaatgctgccccacccaggtgtctggatgggttttgtgcagtctctgagatgtataggagggaagacaggggttagtggcagatgcctgggcctgtgtcagggccctttaaggaccaaaaggtcttggaaaagcctcagaggagatcatgagctttgagattaaagggagacctgaagccggcccagggctgctacagcctcacctgtaacatgggaacttgagatctgccctgggcaaagggtgttcagaattcaataatcaaaacaatctgtgaaatgtaatacttaataaaattcaaatccaaaaatgtctgagtacattccaaaatgagtaaaaatgtaaatttatgaaaatgctaaacatgcgtgattgttctaatgtaaattgtaagcctcagctgcttcccagaactttggatctggctcccttgaagctgctgcctctgatgtggctgccccctgcagctccaggaccttcctgttcagctcccttgagagtagccggcagggcccctcctctgcagagcctgtactctggctggtggcttcagggggcaggcattctgcctttcctgtctcccaccctaagggagttggccttgcatgcctcccatccacggttgcctctactgggggctgccactgggagacaggaagggcatgggagtttcgggagctcagggtaagaggggctgagatctcgtggtgtggagggggagcgggaaggtcgggtggccgaaagaatggagagggccgggagtgagagcaaagggagacaggcagagctgaagagcagtatcgccccaacatcaatactggtatttcagaatgggaaagctgttccatttcccgaawyatcagaatgctgaggtccgatcttgcagtctctgagctgggcattccttggcccccactctcgggtattcttgcacaagaccatttttctgggctgcattttctcacttgtaaaaggaggaagttgggggtcaatatctccaagcratatatgagctctagctctaggagtataggattttgagaatctggaattgttagtctgtggggttctaactgggacaattctagcattccttgactctcagctcccagccagggctgtgtggatgcgtggttgtgtgattccgacattctgagactttaagatgctgaggctctaggagctagagatacggacattctgtgaatctaggattctaggatttgatggtttgatgattcaatgattctaaatggggctgctgggaagagctgcaaccacctgccttgttaatgtcaatgttcagttattaaaaacataacaagaagcaatggagacagatagctcagaatggtgggcgctccctccactcccagtgagggaggacagaagaggctgggctggccttagakaatagagaccttttcaacctgggtcacacaggttgtttctcctgtcacaacagaactggtgtgtgtacattcgagagagcttccactcccaaagcttgcagggtaaggggctcatttccttcagcactggcctctattccttaaccatttcagactgggcagagagaggggtaactaccctttcctcccagccctcgaagtctctgggcagaaatggcagcagtggaggaaggagaggtctgctcacccccgccccttccctgacagcctgagggggaaaacaggacatgaatacttcctggacacagacatggaaatgcatgaacccctgccttcgagggccccgygtccaaaggctcagacaagggcagaggccaggacagccagtgggrtcccatcagcaccctctcagtataggctgaggagggaagaccctgttcttgccccaagggtgacagtgagaaggggtcaaggaaaggagtcccaggtcagggactggaagtgctgacaggtcctcccctgtgtgcaaggccacagtccagcctggcagaaggccagcccaattgtccagtgtttcactgcctcctgagtccttcttatgccttggcrcccaggccagagttggggaggggtccaggctgcaggggagggtttccttccagagtgcccatccctgatggatccttagaagcccagtacagctgcacagttccaagggcttccgctgcctggtaggttcacagaccaaagctggccctggtcacacagcacaacggggcctgaaatcaggcttcctgattcccagtcctgggtgttcctttttgcccacagcctcccccacttcccctgggacacctgaggggcaggagtggaggtggggctcaggttagggagcagagcctctgtccatcatccctccgtcttcctcttcccacaggccagaagcaggtrtggtggtgacagctgcccccagtcctccacaaggctccattgtccccrgcagggagcccctccccagctgcaggccagaagtgtgyctccccgggccctcctgtcgtgactctgccacccgcttcctcctgctgccccttccctcttctcatctccgcttgccctcaggccctccccatccccgtgaggtctcgtctctggcgctctctgggtttaagcctctctccagtgaaagttagatttggaagggccctgggagatcaccaagtccaacccttttattcttcggataaggaggccaggtcagagaggggaaggtcctgtccaaagctgcacagtaggctgaggcagagcccagtgctgtgctcccttcagcgctgggtcatgggtgcacactgcccttggcatcaggcgtccagggtttgagaactgactgtgatgatcagcgctaagcacacaggcacctacagaaatgcggtagggggcttctctcctcagcccttcttcacagccctgagctgccctcccttcctcttctttgcccagctcctctctccttcactatccctgctgtctgctgactcctgcctctggcagacactgtccttgggacacagactagagctcaggcctccaggactgggatgcacacccatgcacccagacacagacacataaacatgtgcaagcgtgtcacggggtccataaatcccagctgaaaactggtcagaccatcaggaggccaccctggaacccagtgtcctcctcttyctgtcaggcctcacacacctcctccaggaagcsccttaggacccctgaagaccatcttcatccaactagcccctttgtgacaactgaactctgtgagcctaggttcctcctgtgactcgaagggcaaggctgagtccccccttcagtcctggggccactcyttcagtgtcttcaggaggggctcagcttcctgttgctgggtggggagagccctgaggtccccacaggacgtgggacaatggggaggcggtgacagatgagaggctgagtcttccctaaagcagactccaccctcccctgacctccctggctggtggcttggacacagccctggcctggactagggtcctggtctgaccccacaatgcagaggtctgggaatcagaagccctggttctccagcagcagttctctaactggcggctatggagtccaggcctccagggcactggtaggttattggygggttggtgcagattccagtgtccaggaggggtgagctggcctggggggcctatgtacaggagataggagggtgataaacacaggctaggtgggattacagggagctgggaatacctagctaagaatcccctcatcctaggcactttccccacacttgaaattggctggagggggaaccagaagttaggtggggttggggagggacaggagccagcaccctgcctccacctccgggcagtgcctctgctgsggggagggaacctgtcctgggggtggtgggaggtgtgaggggggagctggattctccagtgaaactggccctccctcctctcaggggaggggagggggctgtccctggctgctcagcaggtagcccatctggctgtgggtggaaaagaagactcaggctttgtggataaaagggacagccctgggtcaggcacttatctcaaccctcgtcatttcctctgccggacatgactgggtgagtggggtcattgcacagagggaaggaacaggccagggccagtgcataccaggccctacaggagagtcaggcacatgggtgaccctgccacaccctgggctgcagtcagcccctcatagaggcccagacacacaccacagtcactgccggagatggccacacctagaccatcacaccacacacagacccagtctctccaggtgacactcaggcccagctgcaggcgcagctaagagggaagaccctgcagggcacagggacacgtgggacaaccagacgccctgcttcggccacaccacaagcctccacacaccaggtgcagctyctgtcacccctacggtcaacccaaggagagccagagattccagtagtcgtgggcaggtatccagtgcccaggcgagaagagggggacaccagcagggaacccagaacctcctccatgccagactgtgccctccccccagctcacagaaggagtgcctcaggctgtttatttcctagcagggactagcagggatgggtgtctcatccccctccccctcccagtccccaccacacgattctgaagctgccaaatcaaatcagcccctgcacccgcgccaggctggcatggcggccagcagctgacgggaacgaagccaggctcagaatatcccaccgcctgtccgatgcctgagtaggcttgttgggtgggggtggggaggggcaggagcctggcagccaggccctgggcagtgcccctcagagaggctgggggtttggaatgctgcagggtggtgggcttctggagaatgagtgagcaggtctctgttgtgtctccaggctgctgtggcagtgtctccaccgctagcattccgggaactgtggaagtggtgctggtaggatacaggtcgggggtctgatcccagtccagatgactgggcgccaggctggggtaggggggctcccacatggtctcacattcatttgagactcacagcacccaggttggaagccccttggttgtctgtcagtaaaggcccaactcactgtggaggcccagtgactgtgtgaggtggacattacggatcccattttacagacagagaaactgaggcttagagagggctagtagagctccctggagagaagcagaagtggaggaggcctcagaaagagtaaagaggtggtcatttccactccttaggagccctaggtggaaagaaggaatatggctctgttctcagagtcaaggaacagagaatatggcagagccagaggtgcccatgggaagcagagaacaaggagggagtcttgggagagagcagggtgmaagcaggcaaggctccctggaggagggggccatccgtgggcttgctgggggctaatgggaggacagtctggggagaaggggagaaggcctggccggcctcagcccctgaccttcttgtctctgcagccagcctggacccccttgcaaaggagccaggacccccagggagtagagacgaccgactggaggtgagagctcagtggagggagaagtgggtgggcttgagggggtggggcgcagactgaagatcagtctgagtggtgccctcccccttgggaggacggggaggctggagtcacatcccagccccagccctccagactaggaccacccctatatcaagaccatctcccctcaccctatatatccccagcctggaagtcctcccatgaggattcctcctcccaactcacctggggagtcactacagactcctcccttgtcctccccaccctcacccaacaattcccgttgattctctgccctgagtatttcccgagttcctctcctctccattctgccgcctgcttgggtccaggctccctcaactctcccctgggccactcactggctgcttgctttcagtttcccccatcatccacgtggccaccaggaggatctttctaatgcacagacctgaacttgtcactctcttgccccagaatcctccatgctccccacccccatgccccctccacaaccccagcctggcaatcgttccccttcatccattcctgcctcccccaaactgctcctgctggcctcttccccactcagcttcctaaatccttcggggatcagctctagcctcctttcctctgggaagtcctctctaccccttgaccatgggaccaagctcactcctgctccctcctctgagctctcctgccctggcagtcagatgccagggcgctctgctgtctgtcgcccaccgtgctgtgccacgagcaccctgttttctccatcacgtgactctgtatgtgtgtctgccttgtcttctctgcactgtgagctctttgagcctcgggactgtgctttcttcattcctgaaccttctaccacccttggatgggtaccggtgcagggctcagccagcgcatttcctgccctgcgaggggtgccatccccaccccccgaccatgccttccttccctgtgaggggtgcctcataggactcttcagtgctcaaaggggccttgacgagcaaacaaggtgggctgctgatgttgaagatcggcacagaggagggtgtgtgtgtgtgtgagagagagagagagaactggacccacagccagaacagagtctgcccaggcctggctgagagggagaggaagatgatgcttgtatcagccctcctgtgtgccaggagcctttgacacccaccttgtttaattattacagcacccccatgaggtaggggctgctattattcctatttcacatttggggaagctgaggcccagagggatcattcagcaagtgagttgggacagagctaagattggagcctagatgtgtctcaggctcgaggctcactctttccyggcccctgagtaagatgggaaagaaggtgcccacacagggcctggtgcacaggaggggctcagcacaggttccctgctgggacacagggccaagacctgagaatgtgcctccaagtggggctgggccctgctgctgggagctggcaaagggagctgggaggggagggcctggaaagccacattattaatttatttactgccatggcattccccatggggcggggctccccccagagctgggacagatggtgttcctgggagcctgcagtgtctcagcagcctcggccacccgccaggaaagactggatttgtcatccacccagggagccacaagaagagggggctttggcaaagctgagaccctcctgggcaacggggactgtgccctgagggaaggagtatggctccaggcaccctgctatgcctctggggcagcccccgctgcctaggccatctgcctgccctctgcaggttcaagttctgctctttgtccagctccaccggcctcgtccttcccatgaggcttccctgggtcggccccacctgctcctatccctgtattttctctgcctttccttgagctgggtcctgctgcctcttccctctgaccgaggatctggagccatgagctcctcagccctcagctctgtcctgaccccatccccacactcatccccaaaacagttagtgtctgcctggactcttggcagggcctgctggatttctgggtcctgccagcaccccacccgagtgcccaggcctatactcagcactgctgggaagagatgggctgcctgaggggacgctgccaacatggagagggcaagactggagagagtggggacccgagggcattgctcagaccacaggggcagctggagggaaaagggactgggagcctgaggggccctcctgtcagggtggatctgggaagccaagatggcctcatatagtggacaagccacagggtcagatgagcacgggttcaagtcccaactcccttgcttcctaggtgtgtggccttgtgcctgtcacttaaccagcctgagcatcagtctcctcacctgccaggcgggataagaacgtctatcactgccgggagcggtggctcacgcttgtaatctcagcactttgggaggccaaggcaggtggatcacaaggtcaggagatcgagaccattctggttaacagggtgaaacctgtctctactaaaaatacaaaaaattagccggttgtggtggtgggcgcctgtagtcccagctacttgggaggctgaggcaggagaatggtgtgaacccgggaggcagagcttgcagtgagccgagatcgcgccactgcacttcagcctgggtgacagagtgagactccatctcaaaaaaaaaaaaaaagaacctctatcattcttggatgtaatcactgttattcaacattaccacaatagagctgttgggagaagttacaaagactgtatgtgtggggtgcccggcgcaggcctggcacatggcagatccttggggagagttagcctcctctctgtttccctcaaggatgacatccttagagccaggactaggctgtacccctgtgagacaggatgctctgcagagctgggctgaggcttatggaagttctatgggcatggcacactctcctggcactggctgggcagcagccaagaaagcagagctgccagcacccatccccacccagcaggcgtgtgttcagcacaccctcctgggatggttacctagcccctgtgccagcagctgacttggaggaggggctcttccagctcagcctggcatcctccttcagggccaggcctctgcatcattactgtctctctgaaagtcaggtctggggcagttcaagttggtgaattgagcatgctgagtcaatgccctctttgtgatggctctcagggcccagatggcggcttgggagccttagctgggatgggggcatggggagaggcggacgtggatgagggcactgacatccacaataagtactgaaatgcactgcccaacaccggctcctctattgctgcccttgggacaaagaccacaccccttggcagggcattgctggccttgcctgctgggtcccctcatgtccccttgtgtccccttatgccctgagacagccagcgctacagccacattgttgtgttcactcccagcacacagcagctccccctgcctccctgcctttgctcacactgaccacctgtctggaatacctttcctttctttctccacctactctcttttcaaggcccagatgaaatgtcacctcctttgtgacgttcctcagactggtccctctacctcaggccgagccagtctcctcccttccctgggcactcacagtccccatttccctgagcccacagttgggaaacctgttaccccacggggtgctgtgggtagtgtatccttccccatggggttgtaaacacccaggaggcagaggctgagactgagtctcctttgtctctcttgggcccatgtggtgcttggtataggcctggtatatggtaggtgctcaataaatacttcttgaatgaacaagagtggctgtgagtagggctggagtagttccaagaaggggcacagttgggttgggcggtcttggagacttggaggaggcaaccttagaactttgaaggatggagagggtcaagggcaccaaccgaagaagccagggaccagctaggcagtcagagaggtccatgaggtcagcttctgacagcagcagctaaggacaaccaggaccagaacaggactgggaaaaagcagatagaggaggctggagcaaggactcagccccagaggaggctgcaggaggttggctcatgctcagaacccggctccaaaacactctgcccatgagtgctgggctgaggaaggcttggtgccagagtcagggtgaggctgaggccaccagtgaatatgtgggcccagctgcgggggtagcactaggcaggggcgggagccaggttggagggggtattgccattgccrctgcaggtggagtagggcttcgctggggaaggagcagcttgtgcgagagtgtgggcaggagkgggaggggagaaggctccgagtatacgagcatagcttaccagcaagtcctggggtgaggctggaggggccgcgctgtaggcagcacttttcrggcccttatctaacattctcaagtgagtgctcctagctgccagatgtgctacttcctcctggattctgcacatcaggagccagtggcctctacaatgccccatggccccaagggagtggctgccaacaagttggccttagcatctggcatccatgggggtcctgaggccctgccatctgtctgtgcccctgttgggctgcacaggcccggggcgtgcagggacctgggaccagggaggcggtctcagctgccactctagcctgtctctctgcctgcccatccactgtccacacccctggctgactgagtaaagagagagatgggcatcgcaggtcctgccatcaaagaagcctagtctaaaggaggaggcataaagcaccggggacttatacccagagaagacacatgctgagaccacgccaggctcgcgggcaaggcctaggcccagggagggccagcctcgtcaagggcctggagttgagactcagggaaaggcaggagctggcwtagaggcgcaggcaggtccaaggcagtgcccaggccagatgckgcggccccgggctgaggttgctccagccggscccaccccccaccgtcctgcctggcctttggctgtaaacactgagagaacaagttccgtttcccgggaaatatttatctcaggctgtgtgaagagcgtgtgcactggcctccgtgtgtccttcctgcagaccggctggggcaggaggagagggagcttggcagcgcccttgctsgggggagtctgtggggctaggagggaagggtgtgccagaggcccctgcctagagcctgaatttgagtgctggctgagggagaggtgggagcagatgggagagaagcctgttttctccaaaccccacaaatgccctccrcctctctcatgttcctttcttcttcctggtccatcctgtctcctccaggttccggcctccagcctggtgtcccctcctcaggctgccttttcctcctcctcctccctgtttcctggctcttagccgctycatctgggaagtcttcctcaactttaaaccctcgaacccttgtcctctgccctccatctcccactcctcaggctttcagcagcttcacgtggagcattgggctggtcctgtccacagttgttcagttgctgtaacagcttgtgcaggctgccctggagccctgttctgggaagcacaggtctgggcaccctggggctggggcgaggcccggagctgatctcctctgtccatcccagtagagccagcaccagtgcagacacatgggggatccaggttggtggaccaggggaggatggaaagtcccatggatccagccggaatgttggagtggggaggcagagggcccagggttcctgctggccagcctctgggcttaggggtgtgtatcccagacaggccaggcctgccaggggccctgacaacaggaaatccttgaaggaacaagcagaggctgaggactctgagcacaacaacaggaaacagccgtgacatggggcaacagccctggcgactgtgcccagttggggtggggacgaggggccragcttgtgggacccagggtgatgccaagagggacactgagacactgtgggacagggggcgttctgcacatgtgacacggagcttatgacgtgtaatatcaagtacgtgaccatgatcatagggtactgtgtggagtgtgggtgagtcactgagtatgtgacactggctgtgaggcactccatgatarcagatgtgtacagtggctgtgccaccaagtgtgtaacactgtgtgatattgattgtgtgatgctgacaccgagtgtgtgacattgcacattgcatgctaccacgtgtgtgacactgaaagtgacagtgagcacatggagggtgtgtctccatgagaatcaaatacagaaacgtgagcaaatgacgctgcagtagcaggtatggtcctgagtctgtggctcgagtgtctgacactgaattgtgacattgagtgtgtcccaagcatatgatctagtgaggctgagtgtgtaaacaaaggcatgacatggagtgatagcaagtgtgtggaagtgggygtgtgatgctgtgtgatcttgggcctgacattacatgtgtgatgctctgtaatggttgtaacagtatgcaatgtgcacatacagtgctgtgtaggacactgtcatgggaaggcaccgatgggttcaggcgggaaagtaacaccgtccaaaggatggttttaaaagattgctctggccggatgcagtggctcacacctataatcccagcactttgggaggctgagctgggtggatcacctgaggtcaggagttcaagaccagtctggtgaaaccccatctctactaaaaatacaaaaattagccaggcatggtgacaggcgcctgtaatctcagctgctygggaggttgagacaggagaatcacttgaacccagggggcagaggttgcagtgagccaagattgagccattgcactccagcctgggtgacgagtgaaataccatctcaaaaaaaaaaaaagaaaaagattgctcaggttgcagaatatgtrtgtgtgcgagtgtgcayggtgcgtggcaggggaggggagataagttagggggaggcagagagraggtgggtagagcaactggaggctcctgcagctgcccaggcaggagatggtggtgcctgtgttaatggaatggcrgaagagttagagatatggagcaactttggagatatttgaaaacagaaatgacagaacttgctgataaatgagaagatgagcaagagggaaaaccagagaacaatttccagggttctggcttgaagaaccaagcgatggatggtgaagatgtttctgagatgggcaaaggcaagggggagggtcagcactagtggggtgggaggacaaggaggcagaaaccgagtgagctgttttggatgtgttaagggaagcatccaggtgaaggtgtgcagtgggcagcggggccaggctagggatacatctgggagtcgacaggcatggggggtttgttaaggtcgtggacctggctgggataatggagagagggagcttggcaacagaagaggtggggactgaggaccgagccttaaactctgaatattccattgtctagaggccggggaggtgagaaggagcagcaacgagacagaggaggagggccagggaggcagaggagaccaggagtgtgaagccagaagccaagggaggaaagaggctcaagtgggagggagggtcggtgtgtggatggtgctggcccacaggtaagatgggaaccggaagattgtgctgtgctgggcactgtgggtgagtcaggctaatgggagccatttcagtgatgggctggagccagaagtcagactggcctgtgtaggatggtgagggaggtgaagacgttagcctggagagccctttggagacgttgggctgtgagggctgcagagaaggacatgatcgctggaaagggagattacatttttttattatgggtgattctaagcagacacaataccagagagaagcatataagaaactgccatatactcatcaccccagttcaacagttgctgggatttggcctcatttcttcctctcttgccccctatctgwtctttcattttcctttgcttaagcttaaaattttttaaattgtggtaaaatatacataacttaaactttaccatcataaccatttctaagtgtacagttcagttgtggtaggtacattcacactgttttgcaaccaatctctggaactctttcatcttctcaaactgaaactctgcacctattaaacgacagcccccatcctcctctgtctccagctcctggcacccaccattctactttctgtctctatgacttggactactctagatacctcaagtaattggaataatgtagtatctgtctttttgtgactggtttttaagtttacttagcataacgtcttcaagttttacccatgttgtagcatgtgacaggatttccttcctttttatggccacataatattccagtgtatggacagaccacatccatccaacaccagacacttgggttgctttcacattttagctattgtgagtaatgctgctatgaacataagtgtacaaatatctcttcaagatcctgcttccaattctttcagatgtatacctagaagtacgcttgctggatcacacagtcattctattttttggtttttgaggaactgccatactgttttctgtatctttttacattcccacggacagtgtacaggggtttcagtttctccacatccttgccaacatgtgttattttctgttcttttttttcttttattttttaatggtagccatcctaatgggtgtggggtgacatttcattgtggttttgatttgcatttccctaatgattagtgaagttgagcatcttttcatgtgctggttggccacttgtatatcttctttgggaaaatgttgattcaagtcctttgcccatttaaaacattgggttgtttgcttttttgttgttattgaattgcaggggttctttatatattccagatattacctctttatcagataaaagctttgcaaatatttttctcccatttcataggttgcttcgctgaaatatkttaaagcaaatcccagacatgatgtcatttcaccaaaggtagactttttttttggtggggggagctttccggtgaagactgaaaaacctgctagacaaattctaaaatagatgtgactttggatttttgttttttaaggctaggaggtcctggatgatgctgaaatgtaacagtgacacagagccagtgtggaactgtgtctgatgctgtgtgagggtgacatggtggctttgggaacatgggtgcaacactgaagatatgggagactccaagtgagggtgacagtgagagatcactgtgtgtgtggccctgtgacacccagtgacatgggacagtgggacgctgtggaccctgaaatgactgtgtgtcaccgagcaggtgggacctgctgtgtgaaggccacaggtgtcatgtcttcttgtgtcatcctggttgatgagtgtgacacagtgcaggactctgcatgggagtaagagggactgaagctgtgctataggtgaccgggctgcatgtgattcaagtgggctcagccccagcttcagctgctgagtatgggagggagcatggacattgtagggtagatgaggagaaacactgaatgggaacagaaatggtgtctgtgcccagatgcgagctcctcccttctctgaatacccaggaaggcttcctggaggcaggatgtgggcacttcagcaggatgttgtaggtgctgattaagagcagggcctgtggtgtcagacasccctgtctaggctctgacattcagcaggtcattttatctcttgagcctcaatttcctcaagtataaaatgggagctcttaggaggattgcatgaagcagtgctccaatgcatgcagtctctggcacttggtaaatactctatggtctcttggggagcagcaacctcaacacctgcaccccaggtccccaaataacaggagcaccagtaggagcacagtgaaggtgcgctgagtgaggtgtcctcttacacccacagccctcctctctccctctcccccaacttctgtcccctgcttggtgttgtcagcgataccccctcctgcccactcactcctgccccctcctctcccctgccgtccttaccactgtcagcctccagcccaggctcctgcagcctcatccaattaggccaatgcaatttgctcaagaaaaagccccataatttggttaatcacaccagtaggggatctggtcccggtcgggagggtgggggtggataggagtccatacccgcagctgaggcacaggtgtcaaagtgcctgtcttttgggacctttacccacttccttgggctcctttcaggagccaacagagtccaaagcttgggtcttctcaaacccaactacagaggccttgaaacaggagtctggacttcctgggttcgcttgtgttcctgggagggtccctgctactctctgggcctcagtctccctttccaaaaatgggagtggaactggggagtctcagaggccccagttggcctagctctgcatcccagctctggtcagtcccccttgtggcttctgaggggccttctcctgggccttggggagggagcactgaggggtaggtggagagcacagggccccagggaagtgaggaggggtaagtgtcctctgagtctcatctggaatgtgtctaccccagtcctataatcagagaccctctagttccaggctgcacacctgaaggtggggcaggaagaaaggaagctgccctttcttggtcacctgcaaggccaaagtctcttaaccgtgcaggctataccttgcacaggagctccagcagaggtggggtggtgctgaaactgagcccactctccctcaccaagcctttcccctcaggcccgcatctgcccagagaattggggtccctcctttctaatgtgcacacaggtggccccagccccctgctgggagtcagcttaggcaaggtttgatggctcagcttaatcttctcagcagctctgggggaagagaccattttacggatgaggaactgagcccaggaaggtccaaagacttgtccagtacatgtggtgtgtggcagggcaggcagatgagcccgcatctgagggaggcgatgggagaagtgacaggggtgcrcagaggaggagaattagaccctctcagattccaccactctcagccacacgttcactcactcatttggagacaagactaaccaccagcgcattcacagcmccccagacagccacatactgactataccactgtcacatggacatcaatgacctgaatcacatatgcatagatgcaggcccacatggtcactcccacgtgcagatggccagtgcacacacatagacacagggtactcacacatgtttacactctcacgacccatgtgggttacagattcctacagagacacagacctacatactttcacaaggaaattctcccagtgacccagggaacrtagtctgccatgatgatgtgrtggtccgtaggggctcgccactatggaccattaatgggcaggctgcacacatgcttaggtccccagcaaagcgggagttctgcacagagtgagaggagaggtcagttctgatgagtgtatccagaattttgcaatcagaaaaaccacacaaaaactattttaattttcatttccaagataaaatttagtttgaattgtatagagggtccgagggtctggtgggagggcatcatcatcttttcaaggctttggggttctaaggcacccacagattcacaacagtcccacaagatatcccaggctgacatatttacccagcccagtgtgtgcgtgtgtgtgtgtgtgtgtgcgcacgctgtgtgcatgctcatgctggctcccagatcctcgggatgtgaggaaggaaagtaggagagattccagagactccggatgtttgttctctggcttcctgggcccttcaaaggaaaataactctggatgtcagcctgcctgcctggcgggctgggtggagaggtgggctgtttatgttgggaggtgggctgtatgacagcctgcctcagcccctgtggccccactgaccgggaccctgtgtaatgaggcagagtgaccaaggcccatggccagcgtcccatgggctcgtaggcccatcgcctcccctctctggggcttggctctctcatctgaaaaatggaggtgggaaggagatgagactggatgggctttctcctggagactgattagagagacagagactcaggcccggggtccagaaaagacaaccaaagctggggagggcacatgaagggggrcaaagaaggtctgggttcaggggagtgcgtggggccccagagcctgccatgtctccgccaactctctccctcactggaggagggctctgtgccttggtgccccacctgcccagggccctgtggctcagccccttgcttgctctgtgagggggacgggagaaggatgagagtcccagtgatagggggaggacaagaccaggggagagggctgggggtttctggagggccagagcaggaagagcaggagagaagagaggacaccacagtgcaggaaacggaggagcaaaggctgggagtggggaggctggaggggtgcagggaatcagactggggcgctgygaagaggcctgaggccagagcaggcagtgcctggatggagggagcgagcagctcctcaccctcagctccttgatgaggtaaggtgaccacgagccctgctccaggctgtgtgctgagcactttgctcggagcctgtcactctggaggaggggagggggtgttcccaggagctatgacagtcttgtgcaagggagggacagggtcacatttatgtttaacaaagcactgcgctgggagagaggagctgagagaccccggccctggggagcatggtggctgggaccccggagggcaggcgtgccccagacggaccccactcagaagattgcttatcccaaccccccaaagagaaaggctatttttaggaacaataaaagtgctcacacattcctgcaggggcagagagagggaaagggggcaggagtcagtgcagaggaagagggtggaccccgctcttctcccaactctgccttggtcttcagggacttctcctcaggggcttccccagccagccctgcctctccagcctccgcctgtccctggggttccctaccggctcttatgtctatccctctgcttctgaattggtacttgttctgtccctgtctctctttctcatacttccactttccccctccccctggggtttggggaacagctgggatgggccaagctctgttgagagagccaaatacagtcataggacaaagcagcgggaggctgtgggatacacacatgccgcagagcacagacagagagaggtggccaggcacagagagagcgcccagggaggctgagaggcagggagaaaacacgctgggacagtcagggagagccccagggcaggcatcaccgggcagccagcctctgtgccctgctctctatcttgtccctaagaagaccagcatggctgggcttgcctcccgccatccaccccaccagccctaccccaggctggcccttcctcccygccctctgcaggcccacactaaccctaggccaggcygcctccttcagcatttacctcccacacacaatgggcacagtgaggacataagagacccagtctctggcctggaggcagatactcagccttacccgacatctgagagggctcagcccatcccctggccaaggcaggtattagaggggccccaaagacaagcaggactctgggacaaggtgtcctagtgtggcccaaagggctgggctgaagcatgggtctcctggctccagatgagagcctgggtgaatccttccctgcctcctctggccttagtctaccccatcaagcttgggattggactacatgaggcctgaggccctgtagcccctggtccctgggaattctcagaaggcctgggagggggacaggtgaccacgcaggaaggcttcctggaggaggtgtcctcactcatgaaagaaggtgatagtgacagtgctcctcttggggaagagccctccatcctgacctgctgcccccacccggtctgcacgtggagatgatcctgaagcacaaagggcctcccggcctgcagaggtgcctgggagaggttgccaaaggctctcagtaggagacaccccattcctcaggctccttctctgagactgtaactgtgccagactggggaggctttgagaggtctcagctatctcccctgcctagatccttcctccacacccctcttctccctgatggcatgtagccctcacagtacagtagtcctgggcacacaggagtttacccagtcatttacagctcagcaaacrcctaccaacacctatgaggggctgggtaatgctggagaccyggagaggggcaggacacaatctctgccctccaaaagctcccagtctgttgtgggagccagacgggaaagggtggcactgcattgatgcacacagtgcatgccatggtgggggaaaggggggcagtgggagccccaggtgggagggtcagacttgcctggagagagaacaacaacagactctccctggaggggatccagagaagggagatcactycattcattcattcgtcattcatccatccacccattcaattattcctttggccatcatttcctgarggatgtaaactctcttctgacactgacccagcgggacactcagcrtcctcctcctctcctgcttgagccaccatgcctgcctcttggaggctcctggacttgctttgctcagctcccaacccaccctgagggggtgaggctgaggagggtgtacagacattcagggtcaccaaactcagagctggaggcctgccacctcaccaggggcctttctcagggcacaggctccctggtggcagggccttggcccttgcttgcacacccttggggactrggagccccctcatccatcctgctcaggctctcttttgtggcgcgactctgattcacagtgtgcccaaatctgcctccttgtgactgccgcgagctgcctcgtgggccccaggccagaggacaaggatagctagaatgccaggtgaccaggatgactgtgatggcatggagagggggatgctgtgatgtgtttgggaggaagtttgtggtgtccaggagaatgtgggcagcagaaatgggaccactctcggttcttccctgtagatgaagcagctgaaggtgggagggggtgggaggagacctgagctggctctgccccgcttgatctgatgtctgccttgcagggccatcctccccctccccacactcagctcctgcctccctccctctacccactctgactgttccctcctttcctgactccagactctgggtgagggactgaggtgattccagtgagtcaggccctcagggaactgatcgtgcaggcaactcttgcctgccttctcctgctctttccctcttcccattccttcatccacccccaaacctagctcctgatggatccaagggtgcrggggacaaccgggaggtcattttggaggaggcaggagctggaatagaagctgggactggcttgggaagggcgagaggccrgggcggagctggttgtgggcgctggaagggaggagccaacagtgtggggtcaggctcctgtggayggggacacccttgggaggcactgggactggctcaggtgtattctacagtgcacgtgtctccagtgtggctcggaggctggagacgcggccctgttggagtaacaactgaagccggagtctgcgaagggtgggcaggagggtggagggatgggggcatggagcgggagggggtaagtagaggagggaggggaggaagagaaagagggaggaggaaaggtctctggcaggtccctcctttaagactgggctcctgcgctgcgagtggccccgtccatactgccttgttatccatatctccccaccactagtctccctctgtccttccacccccagcctctcccctccattgggaccttccctggggcgtcccctcattggctgttctcacctgagcaaggcccctcccctccagtccttagcctcttcacctgtacaatgggatgacccaaacaggcacctcttgggcttgtaggaggatccaagatagtgtcagtgggtctcgaggtgtggtcccccgaccagcagcatcagtgtcatctaggaatgtttggaaacgcaagttcttggacctcrtcccagacctactgtatcagaaaccctgggggtggggccagcaatctgcactttaacaagcactctgggtggttctggtgcacatgaaaattggggaacggctggtggaaacctctagccacaggaggtgcttgggaaaggtaccttcccctccycaaagcctgatgcctcactcaagcatgacactgacagttgggctagttcagctgcgttctgggtctctgtcttgcctcctccttcagactaagcctcccaagggttgccaagcctctttcctctattctcctcaccctgatccagctcagcctcattgagagaagtctggggctgcaagatcttcgcactcacaggcagttcctctttgcacatccaaggcaccagtgtctttgagaggcgtctccttggccaggtggcaggcgtgggtgtgtggggaggaaggaggaggaaccgccttgttctgctttcttgtctctgactctgcaggctgggggtgctgtaaggctgcgaggaggcatagagtcagcttgggtgctgggctgaggccaggggccgaggctcagctgaagygggcttctctggtctgagcctacaggrtgcctcctttggggcagttctgccagtcaccctgactgggcggctgtgcttgctagtgccagacccatgctaggcacagaggtcgatacgttctcctgtgctcttgaagggccctgtcctctgggaagataagaggctgtgtatattgcccaccggaacaggaggcaggaagcaaaagaggcgtagatgacacttgcctggcaccccctgtttcccctctagctgccttcctgggtttcccattctgtgggcgcttctcttgagttaggtgctttctcccagtgttctcaaggtgactatttggaggtttgtgggaggagtgggctggagacacaggagtaggtgggggcaggaagtatgcaggagagagatggagagtgggaggagaagctatgagaggaagagaggacrcggaggtgggaaaagacgtcaagactcctggagaggaacaggagtgcagcctgggacagaggtggacgtcggccgggggaggcagggaggaaggcagggaggtccacccgaaaggaagggaagggatgatggacagagaatgagagggctccgaggtcctgggggatctagaaggacccttccctttacagaaggggacaccaaggcccagagagagaggagggcctcacagaggacctaacacaagcagagttgcatgaatcagtgtgaacggacagtcccaagagcacagccggaccttgggaggtacttgactcttgagtttgatgttattgccttcctgtaggccagtgtgaggggcactgtgaggcttccttccagagaaggaggcatggagccagtgccaggcagtggggtgagccataggaggacctgtggagatggggaaaggcatagagactyatgaagatgaaacaggaaagatcttatggcagcgaccccaaccctcaggaagggcgttggtcttgtgcttgtggctccaaaggggataagaccaaggtctctggtttcatagaatcttaggctttaagaaygagttagaagtaatttagtccagaccctctcctctccccagataagtgcagaaatgcagatctagcccacggctgagccccaaccctggcttcagaggaggcctgactcagaacaggctcccctttcttggtacctggggtgaatgaaagmtaagtcygtggtaatggtgctgtctgtggtgctgactggccttaccttggactacagagctgcaggtggagctggagagagcagaaaggctccatctatccatctacccacccacccagccacccatctacctatccacccaccatccacccacccatccatccaccatccctcccccaacccatcctgcacccattcatctatccacctacccactcatccatccagcctcattgaattaaaccatagaactatatgctgcagagctagaaagatccattttttagtaatgacaaaactgaggctcagaagaggaaaggtgttgcgtaaggccacacagaacttctgtagtcagtctggtacaggattggaaattgcggctcttttctacacaccacaagttctcctctgtggtctgggaaattgcctggtttttatgctgatatctatactgatatttgttccaaaaagctgtgaaggcaggaaatgtgacctccttcaccccatcccgagcctgagttctgtgtgtgtgtgtgtgtgtgtgtgtgtgtgtgtgtgtgtgtatgtgatgtgcatgtctaagtgcaaccttgtatatgcattgaatatatgattgccttttgatctgtctgtgtgcgtgtttgtgtgagagcctgtgcatatacgtatgagtagaggagtgcgtagcaatatgtatttgtgtggcatgtgtagatgggcatgtgagcaggtaaagctgtgtctgtatttttcctttcctcttccttttaagatcgaagccccctgacttgagccttgctccccatctgtgcctccaattcaggaatctccctgcttcccattagcagctgctccccactgattctctccttccttcactgaagcagcaactcttccctctgagcccacacctcatgggctttgcaatttgagctatttcctcccctgagttggtgcaatgggggtgaagttgctttgagatctgaggaagattcatggaggagatggcatttgagcaagccttgaaggcccctttgagtgccagatctgaagtggcccttcccagctgcagttcctgcacccaacaccctccattcctggggcatgctgggcaggaccaggaggtggattgacagaaggatgcccacaaagagccctgggcttcatcagtcacattaccatccagtccgctctagcacagatgggaagcccttccctgctgctgccccaactctccccaactttcctttcctgctctccttattgctactatcctgcacttggcctgaaaagtcacagaaaactgaacaatcagagcaaaggtcaggcaggcacccaccaattccagtaaaggacagttgagggcattccccaattgaagcaaagggcaggttgaggagtccaccaatcagaataaaggacagactgttctttctgagcaccctagggtgggagctggggatcgggtgctgagcaggaaccagacagggctagagatccagaggtttgggttctggacctggctctgctctgactggctgtctgaccacaggttgatcattgcttctcattgaacctcagcttcctcatcrgtcaaatggggagacttagctctctgaaggctgtggctttgaagaatttctccccctgtatcaggctcactccgtcacctgggtctctcttccccaagtccacatcacatacatcagactccaccaagggcagggcctctcaggagtcagcttgtgggctcctctgcctccaagaaggaatagacacaaaccaacaccaccttctgtgctgtctttagagcccccgtctggggagcgtgcatctggaagactttatcttgggagtactgggggcatcagctcttcctcccctttttagtcttcagaattgaccttggaaggccataatagcctgcgtgtattgtgcacaggtatcactcgagctcttgccctgtgaatctttaaggaactgtaccagtgagaacgtgtgtgtgtgtgcgcacatggatggtgtctgaaggcctgctgggatgtctgcgaggacgtgggatctgtggctgtgtggtgctgaagttgtctgtgctgtgatgaggagtgcctaagggtcaaaagacaagtgatccaatttgggtattgtgttgtctggaatcagtagcttctgatgtctgagggtagacatcttcccatgaccaagatatgtgtcttcatccttgagcagtgggagggaccaaggaagcctgggggttggggaaagcgatgctgagtaagcatctggggagaaggcccactactgccctcctcctgggaacactggattgggtgggggaaggggaggaaactgcagccaagaagacccaggagtgaaatttggagctgaagcctggatgcaagtcttcattgagagcccagcgtggaactttctggcaaataggcattcagcccactcttgtgcacccttgaggatgggaagctcacttcctccctctctcctggtgacctgtggcatgcctttgtagcatggccctacctggaagaaggtccttcagcccactagaccaaggccagcctcctgtgaaatcctatgggtccccaggctgtccatggggccacagagttcagatcccccatctaggagggtctgagagattggagttggagactgataaccctgggtctcctctgctttagatgaggcatccctgggttatccagtcttagtcacatgcaaaacttggtttccaattccctcgtttcataggtcgcctcctctggatgagtgtcatcttgtcagcccctgggacacaatgaacaggggatggtctaactagactataaaagtgggggaactgtcatcttcccaattgggttaacagacctctattaatatggcctgcartttgagcatttttatttcttgccagtcatgcttacactgtgggctcatgctgaactgtggtcttttaagaccctcaacctcatatcatgttcacatgaatggggacccagccatgtctccttcatcttgcagttaatcactttgctttytgaacacagacccaaccttccactgggaagacatctgaaaggacttccaagggcttgcgggagggcatggctggtggctggtatgagtcacgatcttgccttggccctcgtttcctttgttctgttacctttctctttgatccccatggctctggccaagttaatagagcgagaagcagggacttttgtctccgttccggctctgcaaggacgagttctgttcctgggatgggaaggctgtgagacagtcaaggctgacgtctccttctcctcctatagttgccaggggtggcccagctgttctcccaccttatgggttatgcacmccataggctcttgctactctcaacccagcccctcactaggctggaaaatgagactaggtgagaccaccttccttctggggaaagtgagcgggacccagcttcagcgaatattcagctgagcatctactctgtgttgggcattctgtgaggcacttttaggactctgatttttattttcatttttaagggctcaatttcattttatcttcatgtcagcctgtagggggcaatagccccagctgcttccaacttacagataggagactgaggctcagtgactgaaccaagacactcactgctcatacacagcggagctaggattcaaatttgggtgtttttttgtttgcttgttttgttttaatttggagccttgtggtttccctactgtgccagaattgtcctcgactagagaacaagagacctggggtctaggccaggcttgacctgttgactcactatgaggcctttgctaagtccctggcccttctctgygcctcagtttccccacctgtaagatgagggtacttggacattctgtggccttaagactgtttgattttgagatcctaagatcctgggattcctgtgcctgaaagactcgggctctggactaagctggggggttttgctcacagtcctttgggcagatggggctgccctggcctgcctggcaaagcctctcactgccctctcctctcttccaggacgccttgctgagtctgggctctgtcatcgacatttcaggcctgcaacgtgctgtcaaggaggccctgtcagctgtgctcccccgagtggtaggtgcccgcccttgccccacgcttcccaccccacccccaaatcctttgaccagctctatgctgtacctcactcagggccaaggaggaaggaagaggcagggtccctgcccagaggactttcatggggaagtgaagggtctggatgggtgttctgagacagctttctggaggaggaagcctkargctaagcatcaaggaatgaacttgcataggaatcctgcaatggctgagccagaaggggccttagaggttaagtggaaaagctgtgtctcagataatgaaagggawtcacctaggataacaggacgtggtggagccagctgagttttggaatacatgcagcaggagaagttgagggtagacatgtagaagaacttcctggaagccaggtctgggaggtactagaatagggctcagctttgatgaatagacatgcattgggttaaagtgccctgcctggagatgggaggctggaaaaatggcctctagcagccttttagcagctttctttctgtcccatcccaataccatggatgagttgcaggtttggggcaggtttggggtgatcatggttgcctgagcccagagtgccttactggggagattgtgcccctcatcatctgttccaggccactcccctacctggcttcaatggccactgttcatcccttaggcaggaggatgggtaaaccagcccttgaggcccaaagtagcagggtgttagttgcaccagaaagagggaagcaggggacgtttgaagcctggagaagggagtctgatccagcctaaggggcatggaagacttcctggaggaggagatkccctaactgagtcctgatagccttgaatgtcctcttccctactctaaacccggccaagggcagcctctgctccaggaaatatggccaactcagaatgtgaccttcccatccctccagagcccattgtccctgaatctgcttgatggatgaaccacyggaggcccagagagagagggcacttgtcccaaggtcacacagcatgacagggataaatgggacttggtatctaagcagccccattccctctcctcagctctgccttccccaaacctcctagaagttcagagcccaggaggagggctaatgagtgagctttattgagtgtgaaattggtaggaagtgggtggtgtgttggcgcccaaaaataaatcctcctggagaaggacgggactaaggcaacatctggsctggggtgaaggcacatctggaaagggagggtggtggaaactggcaggtcggtttctgtagggctgccccgagagcctctgtggccactgaggctgccgtagggtgggaggaggaagtgactggctctgtttcacaggcagggtgccctggcggctgtgccagcctagatgctctgcaacagattaattgtctccccaaagctgggggctgggatgacagctgtggtccaggttcctgggacagtgggaaatgtcagccctggcccacccaagagccctataggagctagggaagccctgactttcgggagtcctggcttgattgcacggaggggctcagcccccagtgaggtaagggagctgaggtctgctctgctgcccccagggagggaagcagagatggggaggggacccccgcccagggaggagagctgctggcacctggcttcctcatcagcacccattgtggcaggcagccccgaatgcagatggtgctgatgtgtctgaaatggttccctccttctctccaatagactcagctaattttaacccagagggctgagagtaagggggtgggagacatacggacatgcggaagtgaagcgagaatctgtccccctctgcccccatggactacccacccctccctctgcctgggcaggactttctgtrtaaccccggctggtctcttaacctctttgggccaaataactcaggcccctcccaggctgctggaagagatggatgacaaggaggctagatatagccgaagagtgggcggcctccttcccactgaattctttatccctgaacatcccacttaggtttccttccagccaaacaagagggtgtctgcccctctcactcccttcaggccttatcattcccaccccatgccacacccaccacggaacctgrctcagtgtctctggaagtagtggccaggcatctcctgtggtgggggctggctggcgacagctgatgacaagaagagtggctggcaggattgtggacgctctcagagtcatggaaggcaactgcttcttctgggaaggattccacacttactgagggtgggccttcaacacgtagctccactgtcagctcctcccaaagccctccaggataccctcagctgggaggcaagcccttctccatcctcctgcggagaaaacagcagagttgtggacaaggctgcgttgcatgggggttggtcagggatcccgaagggttgccagttctgcttggaaggaatgtggatttttgcctgtaggtcagtgagggcaactacttctgccaagacatggcctggaactgaggccagagctgctctgggcccttggggagggaggattaaagagcaagagctttgatctccctctgaggagtaatcggtccaaaatacaaatctgctcacgtctccctgtgcacgtcctgccctgccccagttctgttcgtaagcccatcccactcagccctactgaccttgggcccagcccctgtgccccttccctcactgtctgttcctaaatgctccatgctttatacgcctctggacctacctgtgtacctgctataaggcctgggagcccaktctgcaccctgcccactccctgaatgtgtctaattcccactcagtgacagctgaaaggtcacttcctccaggaagccctctccagccccaccggaggatggcgcagtgccctgctctgtgttcctcccctggctggggttatgggtgtgtggtttcttgtagaggtgaaggagggatgcttcctagaacattctgagccccatccctggtacagctcagagtggatgctcagttattgtttgctgaatgcctgaggctggagtcaggcagggaaatatcccaggtgggaggtgatttgtctgcaccctcagtccttgaaactctttacctggcacattgggttttgggtggtaaaaaaggtcataggttcatgaatcattgcctgcttagaattccktccaagaggagaggacgaggtgcttagttcaccrggtgttttgctgccctggctgcatcttagaatcacctggagagaaaaacaaacagatcattgccagagctccactcccacaggttccatgaccttgccccacagamccctgtgtacaggctgggactgggcagctgggagggcctctccacagggtctcataagtgccttctgtcctaggaaactgtctacacctacctactggatggtgagtcccagctggtgtgtgaggaccccccacatgagctgccccaggaggggaaagtccggtgagccattctctgcacccccattgccctcttscatggccaaggattctcagggctgaggcaccatccaaggtcatctggtctgaccctccccttccaacattgatccccgcctccctgccaggtgggattccttggccaggttgctgactccagcacagaagggcagaagcaatgtcttctcttccttggggaaatggataggcacagagaaaataccaattgatggtaaattttctccttctaattgcttctaaatggctgcagcctcctcagagcagagtctcagaacattggggctatggggtgtatcagttagaacaccggcatgctgtgagaactactgcgaggctggacctggaatcccagcatgctgggcctgcaggagctcacagtgccaactccttgcatctgagaacagggagatcacaggcagcgtcctgctgagggttctggagccccactgcctgggttcaaatctcagctccctgtttactagctgtgtaaccttgggcaaatgacacaacctctctgtgcctcagttttgtttatgaaatggtgataataatggtgcttataggattgtggggaggattaaatrtgtcacacatgtaaagcatttaaatcaggcctgatccatggtgagggctgtctgttggggattaccattgtgagagaatgctggaatcactgacttcaggatcatgggatcagggcacttggccccctgataccttgatgcccatttaattcagcctcctcatcttccagatgggtggatatcatgagacatgaccaaggccacatgccaggtatgaggcagagccaggcctaggactcgggtcttctgactcctggctgtttaggggaaagtgagaggaagtggaactcatcagatgagaaaaccttgggggcaggcatgctgctgggaggaggcaggctctgaaggatgtggccattgcctgctaagcactgaatgcagggccattgtggggcccagggagcactgggcaggagctgagggcagagtgggcaccagtggggatgtcccaagaaggcagctctctacccctgtgaggagggcttttccagcaggccaggtggtccagggatgtggctttttcaggtagcagctgagcctggcaagccactcacctttcacagggaccatggaaagaattcctgtttgaggatgctggactcatggtcctgaggcccctccttgtgctggaaaccctggtttctaggatgctggtctctcctcagccctttcccgtggaaggagttrgttctgctctgatagccaccttcccatttcctattctcccactgagctcctttcaccttcccctaacaacttctccgtcaaggagcatgggaacaaagccattaccacctctctctagcctttgtgtcccgtctgtaagaggatggtctgaaaggtctttagaaccttaaggggaaaaatgtggtcatgtccccctttctcctctaattccaaagaacttcgctctcctccagcatcccccacctctaattctaaagaactttgcttcatataagctccactcctccaggaaggctcctcggagcagcctgggaggccttcctgggagggatgcaggaaaacaggctcaggaggcagcggggagcagcctgcaggtttgcttcactccctaggacccacacatgctcccctcagctgtctgggcrtgtagagtgggtgcgtatctgcggtccaggcatttttgagagggctcagatccttggcatcagctgccctttcaacatcctccttccaaccacttcagactcagtaaggcctttggaaaaaataccaaaaaaaaagcaattaaaagtgaatattcaaatccaattatcccagagctcagtggagatggggaggtgagtgcctgctggtagacaggggctgaagattccaggaggagggccaggggatgagaaggcaagagagtgaggacagcaaggacctcccaggggacatacccatcatcaggacacacccgtcatcatccccaaacaggaattctttccatggcccctgtgaaaggtgagtggcttgccaggctcagctgctacctgaaaaaggattgggggaaggcccaggcccagtgctctctctggtatctgagctctgcttgcccacctttgtgcctggtgtctggtggtgagcccatctccacarttagggcggagaggccccagggttggctgggccctgctctcaggagctcccagcaggatggggacttgagacccaggtgtatggacgagggaagagcactggaatgggattcagacaggtctggattctagctcagccccctccctgtctctctgctttcctacctgaggcccggtctattggcttaatggggtaacaggggccaagtgcttggcacagtgcccagcacacagtaggagctcagtgattgctacttgcactcccaagtcccaaccaatgattagccttgagtgaccttgagaaaacgacttctcttctggccttttttctgtgaaatgggtggggttgggtacagggtccttccgatggtgacctttgtggctctggtccccccaggagggagagggactgacctacaggctgccgtggagcctgaggctctagcagtgcccgaggaggtgggggtgtggggagggtgctactccaggaaaccctggactgtgggcaaacagyagcaggtgtggcgtggaggctggatcatagagacagataaggaggcccgaggcaatgggcagggaatgggatcagggcagtgtggggagagacagggtggaaaagggtcaaggcgggagtgaggaggcccccgccagctcccagccccacctgtccctgttcctgccgctgtttgggctctcagatgcccagctgcatccccccagtgtgtttggctttcctgtcttcttgtgcttgtaagggctgcttgctcccttgcaaagaccgtccctgctccactttcatctcagccaatcccattgtaattatctttcatggcctgaccagaagctgtcttggggaagcctgctccacagttccctgacactgagaaggaaccaagtttcagaaaaggggtctgggccatattggcctcccttagggttcttccacaggaagaaccttgggctgggagtcagagacctgggatccaggacaacatggctgcaatcacaatccgatgccctcttcctgggcctccatatgcccttctgtaaaatgatacgctgaacattctgatattgagggctggtgaggctctgaattgtaagggctgcaaacgaccttggggctggagaggagagaatcctggaaggctgcctgggccagggtcttcctgaaaggaggcttcacttccctcttgttggtgccccacctccatctcccagactgtttcaggccccagctctgccgccttcctcttcttgtgtctcctgctatcttaaagcctctgattacctgatgctgagtgcagcaaaaatctcaggcctttcagctgcaactgaagcacccaccgcccacctcggcccaggctggctgtctccctctgctaccattttggggtccccagggcccatycctaagaaatttcttcccctaagctgaccaggtcttctttcattgcagaatctgaccatccctaggggttgtctcagaggacaccgggaacggtctgctcccatctcgggatcctcacatgctgggggaaggagggcaagaagagggtccaggtcctgggggctcagtgagagtggggggcttagtgaggggatgggggcccagtgacagtgggcagcctcagtgaggtgatgggggcccagtgaggatatgagggctcagtgagagtggggtggcccagtgaggggattggggcacagtgagagtgaggggctctgtgagggggtagggacttaagtgaggggatggaggctgagtgagtgtgtgggggctcattgagagggtgggggctaagtggggaatgggggctcagtgaggggatggrggctcagtgagaggatgagggctcagtgaggggatgggggctcggtgaggggatgggggttcaatgaggggatgggggctgagtgaggggatgggggctgagtgaggggatgggggctgagtgagaggatgggggctgagtgaggggatggggctcaatgagaggatgagggctaggtgagaggatgagggttcagtgaggggatggggctcagtgaggggataggggctcagtgagaggttgggggctcagagaggggatggggactcagtgggggatgagggctcaataaggggatgggggctgagtgagaggatgggggctgagtgaggggatgggggctgagtgagaagatgggggctgagtgagaggatgggggctgagtgaggggatgggggctcagtgggggatgagggttcagtgagaggatgggggctcagcgaggggatgggggctcagtgaggggatgggggctcagtgagaagttgggggctcagtgaggggatgggggctcagtgagaggaagagggctaagtaagaggatgagggctcaatgaggggatgggggctgagtgaggggatggggctcagtgagaggatgagggctaggtgagaggatgagggtttggtgatgggatgggggttagtgaggggataggggttcagtgagaggatgggggctcagtgaggtgatgggggctcagtgggggattagggctcagtgagaggatgggggctcagtgagaggatgagggttagtgaggggatggggctcagtgagaggatgggggcttagtgaaatgatgggagctcagtgagaggatgggggctcagtgaggggatgaggccgagtgagaggttgcggctcagtgaggggatggggacttagtgagaggataggggctcagtgagggaatgggggctcagtgagaaggtgggggctcagtgcgggattgggtctcagtgagaaggtgggggctcagtgagagggtgagggcttagtgagggtattcgggctcagtgaggggatgggggctcagtgagaggatgggggcttggtgaggagatgggggctcagtgggggatgggggctgagtgaggggatgggggctcagtgagaggatgagacctcrgtgaggggatgggggctcagtgggggatgagggctaagtggtagatgggggctgagtggggggatgggggctcagtgacagggtggggctcagtgagaggatgggggctcagtgaggtgatggggctcagtgagagggtgagggcttagtgaggggattgggtctcagtgaggggatgggggctcagtgggggatgggggctcagtggtagataggggctgagtggggggatgggggctcagtgagagggtgagggcctggcgaagggattggggctcagtgagggggtggggagtcagcgggggataggagctcagtgggggatggagggtcagtgggggatgggggctgagtggtagatgggggctgagtggggggatggaggctcagtgagaggatgggggctcagtgaggggatggggctcagtgaaagggtgagggcttagtgaggggattggggctcagtggtagatgggggctgagtggggggatgggggctcagtgagggggtggagacttagtgagagtcggggggctcagtgagggtgggggttccctggggggatggggttccgtgggaggatgggctcagcaacaggcttggctgcttaatgatgcctgggacctagtgggtgttggaggggggcttctccaaagtagagaacgcgagaaggacacacacaggggctcagagaagtgcaggggacccagctctttccaggctgttggccctaccagcagagaacctttccctcgattctttttccattaaacaaatagttgttaaagggacggaactgccataaagtccacgcctgttcctctctccactctgtgcccatctgtccttatcttcagtggggcaggccatgaccacccaggcacccagtgctgtcattagccttcgcctgggcagctggccctgggttgtggagttccccacaacccccagcatgagcctggaaggcagggtgggggtggggtagtagtaagggaggaactggagaggagcagggagcggctctgagttgagcaaggagctatcgggggtctgagcagtggacgaagctcccgctcccatgtgggtgggggagactcagccttggcacattccccctcgcagtctgtgggcatctttggagacttcaggaggacagcagttctgggagggctatggcagaggaaaggggctcccatgggggtaggttgaggtgagtgtgggctatggggtcccgcaaagccgggggagggcaggctgcagagcaaggtgccgaggctgcctaagaattgagggtccttggaagccccagtgcttgggggcatctcggcttatcaagattggtctatcccagctcagcctctgtcttgtccagggccactaagatgataggaccctcactgagaccaggtttccagtgtcacagtctccttatgtggagagttttacccaggcagcatgatcgttctgaaatcatacctgaccattaccgtccctgctcaaatccctcccagggcaccccctgccctcaggctcaagcccagctccatagggccctggcccctgtctagccttgctctcggctgtccagtcacaccaacctccttgtggccatacctttcagcaggcacacaatcttctcgcctccaagccttcacaattgcaattccctggacatcctttcctgtctgcctcgataacctctgcctgtcctttaggactcaactcagrtgtctccctctacaggaagccttctctgactccatcacaccctgcacctgagtgggctggggcctgctcttcctgcctttggcagagctctcatctcccgactgaagcgtgggtctgtacgttgatctctgcgtgttcttggcctcctcaagtgaggcatatgtctgacccctctgctcatctcagccctcagcactgaacctgacccagaaggacccagtgaaatgagagactttaagtagaatgctccccgaggtttttcatctagaacacttattcttgctctgccatggagaatggattgaagagacccagctaggaggctagaggcttggggagaggctgcttcagggttcagggaaaaggtgtctccatgtgagctgggcagtggcttgggcatagagagcagaggacagttgtgagagacaactgggaggtgactcactgatcggatgggggaggtgaggaaagaaggcaggtttttggacaagccgtgaaggacctggtggatggttgtgctgctttgttgtgaggtggagggagtggagataataattcagatggtatgggggtccctgggccacctcagggacgtggtggggaggctccaggtggcctttgggtatctggggtctggagctcatgagtgagggctggagagtcatgaggccgtgagcacagaggaggggttttgtgcaaaagagaagaaaggctgaggacagattccttcatcagggtcctgggaaagagaggccaagcagctccagtccaggggtgggaggggaaatagttgggagtcggcaggatgaggctgcagtgcgcactgaccagcaacgcaaggaccagtgccaccttgtggcctccggttaaccagattgtctgaggccaaggagctgggcagggtttggccaggggtcaccccctgcctccgtgaagcctcagccttcatcagtttaatcatcaggaaacgtggctcccgttgccctcctgccaccctacgtccctctccttcccggggtgactggcaatgtggacagccgggaactggagcccagcacttcaggaaccttaaaggtcctgggtgtaggggctggaaggtgggagacaccaccggttcctgtagatcctggattacttaaagtggccaggaaygaatgggtttggttcagaatgctgcgtgagcttgaacgagatgctcaacctctttggtcctcgatttgtctagagtctctgacctagtgatctcgtgacttgcaggccaccccctccttttcctcatgtgacctttgctgggcttcccttagtgaccctgtatgcacacagttccccaagtttctcttctgtccaggccaggcagttcctacaagcacaattaagtggaggcagcatgagggatgaagaacccaggacaattaatcatcaaggagtgacatttggtgcaaactcaggtgcttaattaarcgggatgagccagaggctggggggtagaggaggtgggttgtgtggtgggacagagagaaactcattcttcccataccaacctcccctgccttggttcccaccacccctctgccactgtcataccctgccactcacacctgccccctgttcaaagctcacacctccacaggtatttgggaaggttccagcatagtggttagacctagccctggtgccacctacctgggttcaaatcctggctctaccgcttattcactgtgtaaccctgggcaagtgaattagcctcttggtgccatagcttctccatctgaaaatgaagatatctaattcatagaattgctgggaattctgagttcatctatgtgagttgcttgggctgtgcacgggacataggaaatggccaataaactttagttatgatgattacctcctgtgcttagcactaaaagctgatcaacaattgttttctgaggatggtgacagggagggttcttctctctccaccctagttctccttgggaagatcagagaggtcaggtcatgtgcctaaggtcagattgtagcaggcagcctagctttgagcccctgcattcacttcctctgctctcccactgcctggaagatctgcactgggccccacccgagcctttaccagcaaggggcaccagaggccaaactgtggctgcctgtttctccacatagggtccagggtcccctacttttttacttgtgctgtcatcgtgtccaacctgaggcaggtcagcttgcccagatccttgcacatgtgcagggtccaaactgtcctgtgttcccaggccaggcctcgttcctccctgagtcgggggctctcaaggtggcatcatgtcctcttttcagggaggctatcatctcccagaagcggctgggctgcaatgggctgggcttctcagacctgccagggaagcccttggccaggctggtggctccactggctcctgatacccaaggtaagggctaggggctgggcaggggcaggggcagggagggactgtggcccctgcactccaggtcatgtgtgtcttctattcctcttcatctctgtctccttctttctcttgctctgtgtctctagcagtccctccatctaattctctctctattgtactactaaattctctgagcctcaacttcctgactataaaatgggacaatagtatttaccttgagggggtgtttcaaggaggtgcaagtgagatcatgcatgttaggggcctggcacaagcgagggctcagtggcccgtggctgtggttgtgatgtgcctgtgcctgatgctggatggggctgtagttgytctcacattctctctgtcactgtcattggccctatttctctttttcttctcctccatgcctcctgtccgccatgtccctctctgcctcgtgtctcagtctctctaggtctctgtcctctgtctcgatgtggaaagtgcacaagactgggagtcaggagacctgacttgctgtgtgatcttgggcaagtcacttcccctttctagacctcagtttcccaatctgtaaaatagaggtgctcagcctcacctgccttcctccctgcaaccctgggaggatcacaagaaggttgtgagtgaaggggtttccttccatgcagaggctgttgctgtggttgtttttgttgctgcctcaggacccgcctctgtgtttctgtgggttttggggtctctgtgtgtctctgtcctggcctctctttgtctgcatctttgtctcccccacctgggtcccggctcggtatctytgagcctcgccagccctgcaggagcacctcattgccctctccccctcagtgctggtcatgccgctagcggacaaggaggctggggccgtggcagctgtcatcttggtaagagcctgcctaggcggtgggatgtagggagaggagaccatgggagggagtggtggatggagcctgtccagtnnnnnnnnnnnnnnnnnnnnnnnnnnnnnnnnnnnnnnnnnnnnnnnnnnnnnnnnnnnnnnnnnnnnnnnnnnnnnnnnnnnnnnnnnnnnnnnnnnnnnnnnnnnnnnnnnnnnnnnnnnnnnnnnnnnnnnnnnnnnnnnnnnnnnnnnnnnnnnnnnnnnnnnnnnnnnnnnnnnnnnnnnnnnnnnnnnnnnnnnnnnnnnnnnnnnnnnnnnnnnnnnnnnnnnnnnnnnnnnnnnnnnnnnnnnnnnnnnnnnnnnnnnnnnnnnnnnnnnnnnnnnnnnnnnnnnnnnnnnnnnnnnnnnnnnnnnnnnnnnnnnnnnnnnnnnnnnnnnnnnnnnnnnnnnnnnnnnnnnnnnnnnnnnnnnnnnnnnnnnnnnnnnnnnnnnnnnnnnnnnnnnnnnnnnnnnnnnnnnnnnnnnnnnnnnnnnnnnnnnnnnnnnnnnnnnnnnnnnnnnnnnnnnnnnnnnnnnnnnnnnnnnnnnnnnnnnnnnnnnnnnnnnnnnnnnnnnnnnnnnnnnnnnnnnnnnnnnnnnnnnnnnnnnnnnnnnnnnnnnnnnnnnnnnnnnnnnnnnnnnnnnnnnnnnnnnnnnnnnnnnnnnnnnnnnnnnnnnnnnnnnnnnnnnnnnnnnnnnnnnnnnnnnnnnnnnnnnnnnnnnnnnnnnnnnnnnnnnnnnnnnnnnnnnnnncatctcccacaccccagccttctgccccacctcgaataggtaggatgaagccattggcccagtcagcagctttctgaggggtgtgcaagcccctgctggactctcagcccccataaggttagaaggcccagcctttggcgtacgcagcactaaccttggtttctctttgggatcctccagatggggtggggataatgtccaggagggcatgaaccaagtgaggtgtgaagagagatgctgcggagggacagatggacataagggcctgaccaatagagatagtgtggaaaactagccagagatttggagtggctggagctgggggccttgaggagagaaaggccatggtcaggccagccagacccagggctgaggctgggcggaagacaggcagctaggggggctttctggagtggctgaggaaggagtgttagtgggaagtggtggatgctctgccagagccccagaacccagacaagcctccctctgcagcccctcgaggagttcccagggtttctgctccgtggaggggattgtggaagtgcagagcctgtggggacgggattctgccgctctttccgtttcttctcctgtatggaggtgggggttcaaactcgttctatcctagtaaccaaaggatgagttccccaaattgctattattgggggtctgcttctgtcgagggggctgccattccagtaaagggcaggcttgggggcatggacagataaatgagcaggtgttggttccccggggactcctctccagctcattaaaatggaattaaacgcttcccaggcgcctgacctttctgagctgctggcaggagagggcagtgggagtcagggatggctgagaggggaggagaggggggaggggaggaggggtacttggctgggtctcctctgcacccatcttcctgactgagggagccaaggccgctgcttggtttctccgcaagctgctccccccacccccggtttctggaacggagctgctgttgcacggagttctcagggggtcgcctccccctattctttgctcttggtctgccccagggctggtcagctttgaggggcactgaggtgaggggctgtgtgcagaggtggggattgggaggtggtggctgggtcacgcacctccttctctgctgagggcaaagggcctggggtgccaggtgcctgagaaggacttccttagattgaggctatgaggactgggtcaggagggaagtaaggggaagacatttggaaggttgcttcccttgtgggcggaatgcttgccatggccgctgctcaccttggctcaggctgggccagaggccaatgtgtgtgtgtgtgtgtgtgtgtgtgtgtctcagggaygctggtgggatcagatcacttacacttaactcacccagtagaactctggtctggtcctgcggcaggctgggtgctggagccgactctgccttcagggagctctcagtctgggggaaggcagggacaccctccccaccacaggccagatgaaatactgttgccagcaggtgttctggtggcaaagcctggagcagcaagtggtacctcatcacagagaaagcatttgtgtggggccttggggcacaggtaggaggtccacaggcagggaagaagggaaaggggattctaggcagaggaggaatgtgagcaaggcaggaaggaggccgggggaaggggtggtgtgctgaggggagagtgtggtcctggggaagctgaagtaggggtgcatgctgttgagcaggatgctagccagctgggctctggctgccaggagttttcaacaaccgtcccttcacctcctcaaataccctgggcagggaagaactcttgaaaggtgtttagattattcacatctgcctctcctctaagcctgcaccttcccactcatgtgtaaatgcacttccctaggatgccccctccccaaggcatacatgtctgacagatgcaccctggctcacaggatctcactgcctcccagaggtagcacaggcagccccagacttcccagctgctgccagatcctgagggcagagggtgcagaaggaagatggagagccacagggtcggttgatcttttgggaaggccgagtcaccagctccttcctggacaagccccattcccctctctcagtctctgctcttagtattcatccactgatccacctacccatccaccccctcatccatcagttgaacaactatttcttgagtacccactgtatgtcaggcatggagtgctaggtgctgggaacacagaagtgaccaagacagattagacaggccctgccttcacagaccatatggtctggagggttggtggtgagaagcactaaagtgagcataaccccagctacttgggagtattccttgagctcaggagtttgaatctggcctggagaatagagtgcgactccatctctaaagacaataaaaataacaaaaatactgcaaaacaagtgagcaaaataaggataggatcacacgtgatggcaagtgctagcaaggaaacccctcgagggagtcctgcaaaggaatgctggggtccagtggcgacgccatcagcgagggctctctgaggaatatgctggccaggtgcagggctgtgtggctgacttctgggcctttacagctcactgctcaaagcaccttgattgcaaattttttgtgtggaaagtctttggctctgttccttaatcctgggataataagtccctttgaggagtggcagcccttggtctctggcatttgatgcctgatttgtgcccactcttcccccagctgcaccagccacaccagctccctgcacggggatggggtgttcatgccattaaccattttgaacttggttagggtggggacctgggggctgtgctgggttttaaccctctcttacagccacagtgcccaatgttgagtgttcccactgggtcccagacacttgccctgattagcaagagcaggtgtaagtgtgtgttcctgttggcgaacaaaaagccatgagtgtgtgggggtgattgtgtgtgtttgtgtatgggggcgccaggtgcatgtgcatggcttttgggtaagtgaactatttcctgtgtacaggcatgaatgtgcctgtggggatgctgtggacactgtaagggtgggtgtgtggatgtctttgtgtctgtgactgcaccgtgtgtgtgtgtgtgtgtgtgtgtgtaccacctccatgggagattgagtgtaagtgcatgtgtgtgagggcctgacgttcttcatgagagtgtaggtgtgtgtgtttgtgcacatgctgggtgcaagtaggccaaggcagcccgagaactggttgcccccacagccttagaggggtcccagccttctctattcttgagagatgggaccaggtggaaggaacaagaaccacgtcctcctccatgtgctaacagtaaaatgccaacatatttatataagccatatgcaaatgaaccatagccccagcttctcctccctcccgcccccgctgtcctgtaggagtcacagattgagcctcatccagagcttaagtttaaacaccatccttgacagcccaggtctcttccaggtcttcctgcctccaatctccctccctcaaattcaccctacaccccacagacagtggccctcagatgctaaagtctgccatggctccccagtactctcaggctaaagtctaacttcttagcctggcactcaaggcccttccttctgtggtaccatggaccacacccctacctggatcctcatctccccgcaccacctaccgccagtgtcctggtctcttcaaggtctacttgtcctccccatgccaattcaggaagccttccaaatgtcctcccctctgagctacccacctagttttctctctccttcctcaggtatgaggctccacacctcctcccagtcatgtctccccaytcgtcccaccccagacagactgtgagcttcccgagaacctgctggtctcctcctccccatctgctcctggcaggagacccagagctgaggcaggcattggctgctgactggggagggaggaggaaggaggagcccccagtgcaggcgctgtggggagctctgcaggtggtgagcagctttgagtaagctccggaagctagtgacgcaggtggggagccttgctggcagggcctgtagtgggtccctaggctgccaccctccctccccaccgtctctcattttcctcgacaagcacccaagtaggagtgggggaagggacttcacagagtatgaaagatgggctgagttccctggtgactggcacagggagcttggagagggacaggatgatgggggtggtggagagagtggatctagaggggggaaggtgtgggcagagaacgggagggagtgggtggtgctgtcttcactctgccactttctgctatgtgattttgggcaagtcactccacttttctggccatggcttgcctgccaggtggaggcttgcatcacagtggtgagaatcacatgtaaggcaaagcacttcacgaacccatttatccatttattcattcacccgtccatcctcaccatggcaggtgcatcatactgagcccattcctttatccaagacttaggggcagctcaaaccctaactcagacaggatagagccgggaggctgaggctaataccaccaattctaaaatcaggacctgcagcgctccataatctgtgagctaaaaaggggtctaaggtccctccatcccctgaaccatacacccggactgtgctcttgatgagacagtgattgaaaaggcagagacaaaaaagtttcacgtccttaggttagtcctaggagacttcctacaggagggattttcctggagctgtctgagtggtcagaaagatggggttatcactgaggcccacagactggagtgtgtatgtgttggtggggaccagtgtgtgctgcgcatggggagggcactctggcagagacagacactgagagaggtcacagctagttcccttctcccatccctccaggtgcactgtggccagctgagtgataatgaggaatggagcctgcaggcggtggagaagcatgtgagtgggagtggggccatgtgcaatgaggctgaagacccttatcacagctggtgggaagatggcctggccagggagctggacagacctgggtttcagcttcggctttgctgcttttgagctgtgtgaccttgagcaagtcactaaacstctctgggcctcagtttcacacctgaaaatggggataatgatagcaccgactgacctagggcagtggtgaaacaaaactggtcaaatatcttgtaaatacacacggttgccaacttacaattttcgactttttgatggatttatggggaagcaaccctatcctaagtccaggagcatctgtacttagaaagaaccctccacataatgatactgaggctctttcatgcctgagactttatgattttgtgactttaacaaggacttacgacttcctgagggggctggagacagaaatctgacatcttgtcttggaagaatctaggggctagggatggagatagaccctgtaccctcctgttcctggaccgccggacgctccaggggctgtgggagcccccgggggagccctcaggaaggtagagtccagggatgaggtgtttgggacggyggcggggtccctgggcccggcaggcagagggaacggcgggagcaaaggcaggaatcccgctgcagcaagcgcagcgagcttggggcgagcggcgcgctaaccgctcggcctgccccagaccctggtcgccctgcggagggtgcaggtcctgcagcagcgcgggcccagggaggctccccgagccgtccagaaccccccggaggggacggcggaagaccagaagggcggggcggcgtacaycgaccgcgaccgcaagatcctccaactgtgcggtgagggcccggcctggacaggtcacgagggcggggccgggcagaacttggaggggaggtgggcgggttaggcgatcccgggagccggcggcgggcccggcgcggagctgagcggcgcctgagggacccggacacggaggtgcggaggggccctctctctgaccggcgcctggcccttgcaggggaactctacgacctggatgcctcttccctgcagctcaaagtgctccaatacgtgagtccctgcgcccctgccggccacctccccgtcctgtctccctcsggggaccaacttccccttgagccctccatctcagttccaattacgatgtccttccttcctctctcctccacccgcctgaagagccccggagaggggagcaggtggggagtggggtgacccggatccgcggtcaccccctcgccctgcctgtccctctctcagctgcagcaggagacccgggcatcccgctgctgcctcctgctggtgtcggaggacaatctccagctttcttgcaaggtgagggcccaggtccactgtagagcgggggcggggctgggcgaggaactcgggtctccgagggggaaatccattgcctttcctttaaccagccccctgcactccgttcctcaggtcatcggagacaaagtgctcggggaagaggtcagctttcccgtgagtcccgcgtctgtcttctcgttggagtctgcaggggcggttgaggccgggtagacactcctgggatctgcctggagtatttggatcttctagactcttggaatccgatggaattatctggatcttgggactacttagaaatgctgcagggatcacaacctgtgatcagcaggctctattaggaagaatctcttagcatctacagaaaggcttacctgggacctgttcacttctgttggagtatttctggatatggatctgctagaatctgttgacgagaatccttggagtctgcttatctctctcgtagttagggaagactctagagtcctttatagcgaattctgccagactcccctccatctctgctcatcaatgctgaccctgtccaccatttggactgactgaagggttctttgaaacttccagatttgagggtggggacaggttgagatcccctgacctggggagtactgggccctgactcagtctctcctcaccccctagttgacaggatgcctgggccaggtggtggaagacaagaagtccatccagctgaaggacctcacctccgtaagtcatggcctggctgacccagaggggaaagaggagaccccactgccagcccctagagccagggtctctgttacagagcagcctaggaatggggcagataagacctggggactttctactgtcccatctccatgacacagagcttccagccttgcatgagtcccttagaactgcctgttgcaaaatgtgatggagggctggaggagggaagcatactgcgccctgcttccctgccctgacttgcctcgcctttgcaggaggatgtacaacagctgcagagcatgttgggctgtgagctgcaggccatgctctgtgtccctgtcatcagccgggccactgaccaggtggtggccttggcctgcgccttcaacaagctagaaggagacttgtgagtctttgtgggatgatgcagatcaggagatgtcactgagaggctggctagggctccacgagggtaacaatgtgggatgggtactgggcaggggctactgtctcagcagcagtgggttgaacagtgtgttagtgcaagagaatgaaagtcatgttgaggtccaagctagttcctcttctcttctcctgcttcctgaagtttgggtaatctgctcttggggtattgggttccctcccttgccatccctgtttttgcattactgctataaactgctagatggaggggtgggtgtgctctgggttggatgaaccctctgggacccacaaagcatcatcaacacagtggacagtggctaaagggaatatgcttggggactgggaaaagctgtggatcttttgagcccctgacagggcagctataaaaatgatacacaaaaatctctttttttgtgggcagggcacagtggacaggaaagcaggcttggaggcttagttggaaaggatatctcgagaactgaggacaaacctggggtctagaaatggtgtcataaataaatttcatatcctacaccaactcataaacaggcagtaggtgcctgaattttattgcaaatggatcttagttcagggagaaacagtgctgygtctgatgagccatttctgtcctgggtgcaggttcacacttgggctggcaggatgagcagtttgtgctgtgtcacataggtggggagaagtagacagatgaggggctgagtcctgatgcaaagagatgctgataggatgctggtctctggagtccaagcaaacaggctgggtttcagggcctggagctcctgcaggaggtggacactagagagcctgggactaggtaggtgtcagagcccgggcctgaggtctgctggggtagggtggagatccaggagtcctaggtctgagctgcagaacctaccagcatggaactgtgttgacagttgggtgggcctggagaaacaaagataggggcaaggcagaatcagctgaggcagggagaatgtgggattggtggcatttggaacttgtgggcatcctaatggtgggagaatttatgccattcagcaaacaaatattgagcacttaatgttgccatcccagtgctgaccagatggccttgggaaggcctttggggaagggaaggtagagtgaatgggggtccagcaggggccatgacttcttgctgctggctgtgagattgggttctaggatggccccagagctggagaagaggtggtatcagcaggaaataaggatggggccttggtggcagctttgaggcccagggcaggggcagggctatctctgkgtcccacgcatttcagggagtgagtgttgaatgactgcatgagccagggtggggctcagctcagtgcagtgactacagagaagcttcctgaaacacagctaagtagccagagaacaggggctccagaagcccttcagctgtgagtgggatggggctggtggcaaggccagggataggatacactgacgacattagcaaagacctccraagtgtttcctctgtaccaggctctgcactgggcatgggtgatatagtcatggccccatttcataagactcraagctcattttcagggcatagagggaagagagtgagaagggtattctaggccgagggaacagtgtagaaaaaaaagcatgaaggtgtgaaagagcccaaggttttctcagaatgatgaggatctttgtgtggctgaagctgagagatgttctgggttgaggggtgacaggtgggtggggctagctgagggaccacaaatgtaagaaaggtgtgcagacagacccaggatggtggggatgggatctagatccgaatcactggatggcaagcatgaatgggggatgccccaccagggtggagcaccaaggccagccaaaaagtggggaagggcttaggcagggacacctcagggcagcgtgatgtgggctaaggcaggctcttcccatgacccacaccattggtccacccagccccatgcagctccccagtgacaaatcatttggtggccagattgaatgacgtgagcaggatttggggcttatcttgtctcaccagagctagctccatgagcagggcaagcagtcctctccacaccaccaccctaagatttctggaggcaccgaatcagggccagcggagtccagggagagtggggtagtgacaggagctgcacaagatagggcagtgccaccgcccctccccaaggctggaggtgtgcctggggaagagcagaacaccagcttgagcccaggcaatctctagtctgagggaggagacccagctttgggctgggtaaatcccaaatcagagacgggaggtatggctctggtttcaagcatctaaggaggactggagccctccccttgggcagcccccagtctgcagggtcatgggggtgggaagctgttccaagggcctgtgcagtggttatatagttggcaggtgggtacccctgtgggcttctgatggaacagaastaaggagagtggggagagaagccagtcttcccttccctcctgagtgagcccaccccctcctccaggttcaccgacgaggacgagcatgtgatccagcactgcttccactacaccagcaccgtgctcaccagcaccctggccttccagaaggaacagaaactcaagtgtgagtgccaggtgagtgacctgccttcagcctctctcgggcaccgactcgctcagttttcagccccgagagccattcagaagggaaatgcccatgtctttctggactggtggcagcccttccccaggtggctccataacctcataacttgaaggcttgcagttgttcaggacccgcgccactgcccgcaggcactgtatgtgatcgccctctagtgttcaatatgtgcactacagcaacacctaggcagctrgagctggcgtgaaggcggctgagacactcaggagactcctcacctgcaccggggctattccctcactccttcacttagtagccaaatgatataattagacactgacagtttctggcttgtccagtgagccctagggaaggaaggagaagacccgggtgctgttggaggcagraggttggatagggtgacccctacaccccgacccccctatgatctccatttccttcattccaggctcttctccaagtggcaaagaacctcttcacccacctgggtgagtgcactgttctctctgcctggctgtgtgtgggcatgggggctggcatttgcagaggagaggcgggaggtcttggcagcctggtctcaccctgcctggtcttctcccttccccagatgacgtctctgtcctgctccaggagatcatcacggaggccagaaacctcagcaacgcagagatgtgagtgactctacccaggggacagggcgagagaggctgtgrccttcagtccccatcatctyctttcctgcccyacccacttccctttctctgccttctgcgggacttcatcaccttttgagggatcctttatttcatgcctgtctccctcgctagactgtaggctccaatacagcagggacagggctggctttggatcctcagctcctatcacagtgcctggcacatagtaggtgcttccaaaaaaaaaaaaaacaaaacacttgaatggacacgtttctggagccagccagccctgagcagagtgtcttaccttggagcactcctcccaggcctcggaaatccggcctttgcctccttatgggacgtgagggmgatcagagggggttgtcaggccccagaggaccaaacccctccctccacagctgctctgtgttcctgctggatcagaatgagctggtggccaaggtgttcgacgggggcgtggtggatgatgaggtgagagggygtggagggagtatgtggccctaggrgtgtccgggagtccgccggcggcgctggggagcggcccgaggtttaacagtcccctctgtggccgggtcactaacttcttcctctcgactccatctctgctccggcagagctatgagatccgcatcccggccgatcagggcatcgcgggacacgtggcgaccacgggccagatcctgaacatccctgacgcatatgcccatccgcttttctaccgcggcgtggacgacagcaccggcttccgcacgcgcaacatcctctgcttccccatcaagaacgagaaccagggtgcgcgtggcggcccgggcgsaggggcggggcctgcgccgggcggggcgggtccgagcgagcgggggtggcaacacttccccaccgcctccrgcgtcccggagcataagggagtcgggttccatgcctgggacgtacgtaacctgcggaaactgcgagggcaggtcccggccggatccctccctccaaccgatccctccctccaccggtggttccttgcccctctcccttccccagaggtcatcggtgtggccgagctggtgaacaagatcaatgggccatggttcagcaagttcgacgaggacctggcgacggccttctccatctactgcggcatcagcatcgcccatgtgagggcggggttgggagtggggtgtggggtgatagggggcggggcccacgaaggaccctcggttctcctcctccgactgactctccttgtggattgatcccttggtctggcactcagagtcccgccgctggggtgcagccttcaggacacgctggccacctctgggctcagtttcccatctaaaaattgggcatacgatttcctgccctgtccactcagcctcctgggaccatgagaaactcccgttgtcaaaacctcctctcttccctggaagcagtctcaacccaagccgagtgcttttttggaagtgctgggtctcggtgtccaggcctactggcgctctggcctgggaatccagccccaaggtccctgacatgatcccctccttgcttctccttccctgccatgggccttgggctccatcactgaagcctggatcaggtgtgggggagtgcaaagggccagaccaaatgctgggagaacttgatgaggaggaaccggcgcgggggtctggatgaaagtgggggtgrggtctttactgtggactggagcttgaaggttttgactggggccagaatgggacaggaagtggggtgtctttttgaccccttcatcccagtcctgggcattgctaaattttcacagccaccttccttgagccccatctttccctctttcccctagtctctcctatacaaaaaagtgaatgaggctcagtatcgcagccacctggccaatgagatgatgatgtaccacatgaaggtgaggcttgcagagacctctggtcctcctcycagattcccyggggacccagggccaggcagggcttcctgatcaatctctactgaggatgagaggataggcccagagccacagcaggcctcctgccctccttaggggcagctcccacccctgcttagagacctctcctccaagctgcttctgagctcagtcccaaggctggaagtagccagaggaaccagcccagggagtaattggttcagccaggtattccccatgttcagggaataattcccatcttgggaattactgagggctaggaagctcacccaggacccgtccccatggcttccctaggtacaatgcccatgcagccctgggcagtcttaattgctgataatctatcccattccctaccctgggtcacaaaagctggcttagttccatgtatatggtagtcrctgttcatttggacatttcctctcacctgtgtccaaaccagagaggcccagaccttgtgagttggatcaaaactgtagtaggaagagttaaggttagagagtagaaaggtctccacaaaaggaggactgctacagttactgtgtatgaaatgctgccatggttwgggggtgtcatgaaggggtgttgtcgatctttgccaaggttatgctrttacagataaagggtggtcacctgcaggraggcgcgcggggtgggctgcagggctgtgaggggagggtggtgatttcctgcccagttacagtccacagcgtggtggcccaactgtggtacattctgggtgacggatcccccacctgccatgggaatttgagggtgaagacaccagatggggtgaaggctgtcttctaatgctctggctggtctcctctaggtctccgaygatgagtataccaaacttctccatgatgggatccagcctgtggctgccattgactccaattttgcaagtttcacctatacccctcgttccctgcccgaggatgacacgtccatggtgagttgctctcctccacttgactggccaggccgaaggtatgtagccagaggcttaagttaaatgcgcatcaagaacttcctgggaagacagagtcatcaaggaaggctgtggagggtccctcagagatggaggggcttgtagtctgccatcaggaagccatrgggcctgcccaggggctagaggctggactggatgatcccaagggctgctcttggaccaaccatgcccagggcatgtgacctcagggtttgcatccctcccaaccctgtttttctaacattttgtgtgggcttggtttcaagagttcttagttcttagakctctaaaaatgcatagctcygagaacggttgcttcaactattttgtggttctctagtttagatgtaagtttctaagactccagatyttgagtgtggagcttgaagaaggacccaggcaagggcccygtcttgawactggcagcccctctgatacctccctctgccctctccaggccatcctgagcatgctgcaggacatgaatttcatcaacaactacaaaattgactgcccgaccctggcccggttcgtgcgcccacagacagccccagtcttcgcctccctctttcctctactgtcacatccrttgcccccggcattctggagaggatctctctaaggatgactggggagacccagtcttatggggrtggggaggatccatgaatgagaagcaattcctagacactgaactgtcaataaaggcaagaaatgaggcaaggcaaagcctggaggcaaggccgagagtgtgtagccagaggtttaagttagatgtgcataggaacttcctgctaagacagagtcatcaaggaagkctgtggagggtccctcagggatggaggggacatgtagtttgccatcatggggccgtgatggaggaggagaggctgaggcccctcttctgscctcttccctcccccaggttctgtttgatggtgaagaagggctaccgggatcccccctaccacaactggatgcacgccttttctgtctcccacttctgctacctgctctacaagaacctggagctcaccaactacctcgagtgagtggctgcatctcccccacatctggcagccactggggtccccttccctgggacagggaagcaccccctgtgtgtcaggcactttacacgcactgcctcatgggatcttcttagccccaggggactagaggggaaggctgtgagccccatcttccaggaggggcttgctcacagccaagcagctagtgaagactgagcctgatttaaacycggktctgctggactccaaacmagtgcttctttccaggaagggaacccaggtgttccaacctcctgtcccagtggctcctgggcatgtcatctcctgtctgtcctcttggggatttagggagggaactgtgggctgacctcttttttttctcctttctgcctctcaaccagggacatcgagatctttgccttgtttatttcctgcatgtgtcatgacctggaccacagaggcacaaacaactctttccaggtggcctcggtragaccctgccctgctcacagtggggaccctccatggggtgtctkggagtctcatcctctcccagcctgaagatgggtgggagcgagtgagamcaggagccaggtttagacacaggaggaggttcccccagggtttgcccctggctctgagataggsaggaggggagaaaggtggaagggcaggacactgctcagcctaaagcagtggcacttggatccggatgtgaggagtgaccacagttttcctgggcttttccagaaatctgtgctggctgcgctctacagctctgagggctccgtcatggaggtatcactcttctgtcccaccccgtccttcttcccctttaaggccagtgacttgcaaagttatgacccagctcctcctattcccaaaccatgctctccagacaggctgcgagagctgcagccacacctaggacatgtctggctcattttcctggagtgggcttggaagggtgcaggtgcggatgatagcaaggatttgtgttcagcgtgtttccctttggctgcctgggaacaccccattcagccccctcctgccaaacttgggatgggctccactcccatcacttagcgtcaccttagattgtttggtttgggtctgcctacctcctcgtgcacaaggtctgagccatttctgagttccctgcacttggcacagggcttggcacagagtaggagacacatttccaaggtcaccttgcctcatgctacttcccacaacaccyctccagaggctgcccctgcttgcacacccccagagaygaggttctctgtctctctcccaggaggcctggtggcagtgctggttctgccctctgcccccctgagataagctgctccttttctgagtgacagcccttcagcatccggaaatgggggccttgcccttgcctcatcactgcctctccttgtcagcaaacaaatgtgttctgcatgatttggtgtctaggactccaaaggatcatttcaaaaatgttccagctttcagggaccccagagcttaccttgttgggtccctgcatgtgacagctgaggagtctgaggctcagagtggtctagggactcaccctgggtcacacagagggttgaaacagagctcagaaagggaactggggcccctgactccccctttctgactgctctgctkacctgggggctggagctggacgaggcccctgcttcctctcttggggtcaatggtaagggagcccatctgccccagctgggcccccatcactcctctccccccagaggcaccactttgctcaggccatygccatcctcaacacccacggctgcaacatctttgatcatttctcccggaaggtgatggggttgggggtggggtggggattgagggggagctgggagctggctggaggtgggataaggagccaaggagtggaggctcactgggatgggcaaatgggtgggggtgtccagtaggagggcatgacacccctgccctcgcctcaggactatcagcgcatgctggatctgatgcgggacatcatcttggccacagacctggcccaccatctccgcatcttcaaggacctccagaagatggctgagggtgactgctgttagccccagtccttggggctggggaggaacaaccaggggaaggatttgccaggggagcattcccagggtgcagacccatcccctgcaacatcaacccttctctggctgcacggccccycccaggcagacccagcactggccccttggctcccatcaagggtgcccaattccctggaccrctctgggttgggccctgggagccttgtcctcagaagggcaaagaggctgggccccgctccttgaccccatcctcccctcaacagtgggctacgaccgaaacaacaagcagcaccacagacttctcctctgcctcctcatgacctcctgtgacctctctgaccagaccaagggctggaagactacgagaaagatcgcggtaggtgtagtcctccctgggaagksacaggctgcccaccctgcccagctttgggtgccccctgtgcctgaataccctctctctgctcagctcagcctggctgtgttctggggagacagaaacctagaccatctcagggtgacaaatggagactcagagaggggaacagacctagcaagtcastggctggtggaaggtgggccccaacccagccactccctgcctcaggccatcccactgccaagctggggctggtggggayggctcctgagctgggactgaatccctgggcctcagttttctctcctgggaacgggctgtcagaggagcttgggtggatgtatcctacatagaggatgtgatgagagtgttggcctttcaggagctgatctacaaagaattcttctcccagggagacctggtatgtgtggagtgaccccaggatgtccaggatgggggagggttcctggcctgggacagggagggcttgaactagcctgaccctggtacccgatggaggaatgagagggacaggcctgacgactcgatgcctgcaggagaaggccatgggcaacaggccgatggagatgatggaccgggagaaggcctatatccctgagctgcaaatcagcttcatggagcacattgcratgcccatctacaagtgagtgagctcatggggacaagctgcaccctgcacagagagggtaggctggagtggggacatcacaggaaacacaggtgctgagattggcctggcccagstccaactgattcatccccttgcctctgggcataactgtctcccgctgtgcccctcagtgggtccttcacttcatccttggtcctcagtggaaagagaccatcatgctttcctaggtgtcctcctctgtctcacattcttgtggaagttcttgttttttttgagatggagtctcactctgttgcccaggctggagtgcaatggcacgatcttggctcactgcaacctccccctcctgggttcaagcgattctcctgcctcagcctcccaagtagctgggattacaggcatgcaccaccacgcccagctaattttgtatttttagtagagatggrgcttcaccattttggtcaggctggtcttgaactcctgacttcaggtgatccacacacctcggcatctctgagtgttgggattacaggcgtgagctaccgtacctggcccttgtggaarttctatttgttgtgtagccctagtctttcttgctgcccatggtctgatttctggcctctcrccctctgcccccatgcacccgcaggctgttgcaggacctgttccccaaagcggcagagctgtaygagcgcgtggcctccaaccgtgagcactggaccaaggtgtcccacaagttcaccatccgcggcctcccaagtaacaactcgctggacttcctggatgaggagtacgaggtgcctgatctggatggcactagggcccccatcaatggctgctgcagccttgatgctgagtgatcccctccagggacacttccctgcccaggccacctyccacagccctccactggtctggccagatgcactgggaacagagccacgggtcctgggtcctagaccaggacttcctgtgtgaccctggacaagtactaccttcctgggcctcagctttctcgtctgtataatggaagcaagacttccaacctcacggagactttgtaatttgttytctgagagcacaggggtgaccaatgagcagtgggccctactctgcacctctgaccacaccttggcaagtctttcccaagccattctttgtctgagcagcttgatggtttctccttgccccatttctgccccaccagatctttgctcctttccctttgaggactcccaccctttggggtctccaggatcctcatggaaggggaaggtgagacatctgagtgagsagagtgtggcatcttggaaacagtccttagttctgtgggaggactagaaacagccgcggggcgaaggccccctgaggaccactactatactgatggtgggattgggacctgggggatacaggggccccaggaagaagctgccagaggggcagctcagtgctctgcagagaggggccctggggagaagcaggatgggattgatgggcaggagggatccccgcactgggagacaggcccaggtatgaatgagccagccatgcttcctcctgcctgtgtgacgctgggcgagtctcttcccctgtctgggccaaacagggagcgggtaagacaatccatgctctaagatccattttagatcaatgtctaaaatagctctatsgctctgcggagtcccagcagaggctatggaatgtttctgcaaccctaaggcacagagagcccaaccctgagtgtctcagaggccccctgagtgttccccttggcctgagccccttacccattcctgcagccagtgagagacctggcctcagccctggcagggctctctcttcaaggccatatccacctgtgccctggggcttgggagaccccatagggccgggactcttgggtcagcccggccactggcttctctctttttctcygtttcattctgtgtgcgttgtggggtgggggagggggtccacctgccttacctttctgagttgcctttagagagatgcgtttttctaggactctgtgcaactgtcgtatatggtcccgtgggctgaccgctttgtacatgagaataaatctatttctttctaccagtcctcccccatggggctgtttgcagactttgtgcttggggtgggtggagggggggaatagaactgggagaggcaaacgccctttggaactccatggcttccagggtcctccacccttggtgcctagccccccttctggggaagtcatagacctgttggggtactccctaggccagatcgtggaggctaaggggtgggtggcagatgagaaggcctggccatggagcagtgatgggacatgttggctggcagagattgtagaatagaggaaaaacaaaggttgaggcaagcaggcaggctgcctggaggaggtagcctggagcttgtcctagaccctcccagcgctggcctgccctggtcatgagtgcccatacggcgagggcctaggcctctgaactctgtttctagctgcagtgatgcctggctgtgtcccaggaagtcccacatcccagttactctgagtcctgccgaaggtgcacgcctgagtcagactccacaccagatccagccccgggttgtgtctgaggagttgcgtctgttcctctgcatgagagtgtttacttccgcccagtccaagatgggcagactgcaggttggggctacgcggaggctctgcctggcacagtctccagaccctgtccccgacttgcctacccccctctgagctcctctccgtgttcatctcttcctggtcagtaaaggttgatgtgttaagagggtgggcactggggtctcctttcttggtgggagcaggaaggagatggacagggccatcctgtgaccatcagccattgccagctttgcctttgggaccacagagcccatctgcttcctctgcagctccccctgccccactagcctgtctgggtttggaatctgctcctctggctgaatggtctccaggtttccagcttcccttagcgtcatggggctccaggctcctcccattcccagctcctgctgtgggctccccaagtccgtctctatcctctcacagcacaggacccaggcttggccagtgggtccccrggtgggggtgggagtggtcagtttgtggcccacggccaataagagatggctattctaatggtgcctggctgaccccagggtcactgtgggctgatgtagctgctcttctgcctgacccctgaccctgagtgtgtgtgcgtgttcctcttccacaactcttcaggcaaagagaaccttgaccctgcatctgtctgtccccagcccagccctcctttgaggctcatgctgtgacacatccctgtttttcaccaaatggagggaacaaccacagatatttccttgtgcacgcaggaccctgtgctagggctgagggctttgtctttgtcctgctctggaaagtctcacagtttgattggagagctagatctaaactcagatgcaggccatgacaacgctgtggggtgcccggccatggggctccaggcaggatcataaccctgagaacaacaatgaggtttgaaagatgagcagatgttgtttataggcaaaaggggacaggcactcctggtagaagaaactgcttttgcaaaggcctcgagaacagaagggactggcaggtggaggagccgagagatggaggaggaggcaaggccagatcctgaagggccttaaatgccaggttgtggagtttggctttattctgtgggcagtggagaaccagagaaaggttttcagtaggagagtgactcagaagtgcattttagaaagatccccctggagagcagggaagtgactgcaaggggagagggtgggcagggattattctatgggtgatgtgctgtgccctgggctgggcgaggagaggaattcaggagatgctaggttggcagaacatggtgaccagtgggtcgggggatgcagagggaggacttggaggggccctgggaggtggggtctatgccactccatgaagagctgtgggggctctgttcagcatcaccctcacccacaacaggtattgggtggagcctctggcaggggtgagctccctgcaaaggtgagcaaaacagctatctgaggatgcccagggaggagaggtgggaggaagggagagaggacagatgggaggaggctctgcacagagcctgaggacagccctcaccaggttacagaacacaaggcttgaccccattggcttcctgtagctgtcctgctctcccaacttaatggtttcattttgcattttatttaaatttcacaatgattctagcagataccattagtctattctgcagccaagttgtctaaggtttggagaggttaagtaatgcaccaaggttaggatttgagccctacctgtctgattcccctccgagagctgtctgattcctttctcctcctctgggataggggaaggagactcagaaggacggggtctccatcttcagtctttgcaagactattgtagggcattgggatggtgagcacaaagtgggttgaagccccagagaaagagctgagagctgggatcaactgtgtgtgtgcatgtgtgtgtctgtgtgtgtgtgagttggagtagggggcagggagaaaagagtggggtggtggtggcttgtagtgcagctcagggccaccaggtggtgtccggccctcgctgtcctcacctccccagaggtcagagaaggatatgggagggggtggggtggggtgagggggacgcggcggggacggsggggacggtggttggtagtctcactcctgtccattcacctacaggttgagtatcccttatccaaaatgcttggggccagaagtgtctcagatttaagatttttttcggattttggaatatttgcatatacataatgagatatcttgggaatgagaccccaggctaaacaggaaatccatttatgttttatatacacacagcctgaagcagttttatataatattttgaataattttatgcatgaaacaaagtttgtgcacattgaagcaagtgtggaattttccacttgtggcattatgtcggtgctaaaaaatgttttagattttggagcattttggatctcagaactttgcattaggaattgaggactaagtctgatattctgtcttacccagattcctacctaagaggtctaggaagtcatgccctacaaaccatacattctcatcagatgggttttatttgaccctatatgttgtgatttacttttcaatctgactctggcataacattatgagacaaggaaaaaaatatttaaccccaaaatatatttccgtgccataccttgaaattgccctgcaaagtctcttgtgggaaaaatccacattctatagagattccccttccgcctttgttttccttcctttctttccagatccaggagataatcaactaagtaagagccaggcacccttttaagtccgataagagacaatttacaacttgctctgtctgaagtctgctatctgagagcttcctctgcacaataaaacttggtctctataatcctttatctttaaactgaacattcctttctatggatcccaggtctttagacaaactcaaacaattgtcaaccagaaaatgtttaaatttacctatagcctggaagccccccgctttgagttgttctgcctttctgaaccaaatcaatgtatttcttatatgtatttgattgatgtctcataccttcctaaaatacataaaaccaagatgtatcccgaccaccttgggcacatgttctcaggacctcctgagggctgtgtcacaggccacggtcactcatatttggctcagaataaatctcttaaaatattttacaggctgggtgcagtggctcacgcttgtaatcccaacactttgggaggcggaggtgggtggatcacatgaggtcaggagttcaagaccagcctgaccaacatgacgaaaacccagtctctactaaaaaatacaaaaattagtcgaccgtggtggcaggtgcctataatcccagctacttgggaggctgaggcagggaggattgcttgaacccgggaggcggaggttgcagtgagccgagatcgcgccactgcactccagcctgggtgacagagtgagactccatctaaagaaaaaaaaaatttttttttacagagtttgactctccatcaacagaatgctgcacctatatgaccctctcacactcacaaacacagaggcattctcatgctgacacatgcacacacacacatgctcattctttgacacacaggcatgtttacctgcagactccatacagcatataccctgtacagtacacacccatacagactcattctttgacacacaggcatgtttacctgcagactccatacagcctataccctgtacagtacacacccatacagactcctcagggaaaatggaaactgtttcttggaggcctccagcctgtatagctgttctctgaacagaactgaggcccatcagttctaccttagtgagatccctggaggtggtacctgcctgatgagcggtctccctctgcagaacggtccctgggaaggcagagccagccttgcgtgtgaacagggataggcagaaatgatgcttccctcaccccttctctgtgcaggaaataactactagagagcattgcaaggcttggtgctgtgctggtgagggcggacgtcatgacagggagtgaacccagaccatgaagggggcttcctggaggagggtgaggtgaggcaggtcttggagtttggatgaggaggacgggaaaggacttgaggacattgcagatagaccaggaaggcaggctgggaggtgaggaggtgcaggaggctgtgcttctcggggctcagtctccttgagacaggggtgggactgaggggtggattggttgggggtgtgctgaggaaggatggtgagtagatgctattttcataaccttggttgcagtctcttgggagggtgccaagtccaggcaggtgaaggagttgaaggtctcctccgagcaggagctaagccctccccctctagtcttagtttttctgtccataaactgggatgatgaaccccgctggaggtggtgagggtcgggggcagagcagagcagccattatgctcaagacaggctctggactgcacctggggagagaagggagaatcagggttggggcrggaatgaaggaaggggcatgggaaatcaggggaggaggcagcatgggtggtgtgggaggatcaaggatgtcagggcaggcctcttacctgactgaggtttgcactcctgggttccctgtcctgaaacacaaagcaagagttgtccccatacagcaaatccctgctcttcagcactctttgcaatgcctctgggctttcctttctatcctggcaggatgagcgttgggattcctcactggtcttagttttcctgtccattaacttgaaggatgaacccactggaggctttcaggatacagaagatgttctgagaggaaggctgccctgtgtctgggcagctgtgtgggaatgaagtctgatagacggcacagccagatttttctctgagggaataccaagatcagtccatacaggaaacaaagcacaacatcaagtttggggactggtgggtcagatgtgagaatgggaggtgtggcaacatcctgccaagatggctgccactctcaatccctaaatcacccctgggagaactacagaactgattgggatgcataggattctaggaaaagacaacagtgttatagcccaacgagttcttcttgcctgctgcccagaaagactaatgcactgagaacagcaggtgctgcagcaaagaaagagtttaataatcacagggccagccaaggacaggagatgtttctcaaatctgccgtcctgagaatttggaggctagggtttattaagtatagtttggtgggcaggggactaggaaatggggaatgttgaagaataaatcacagggagttgaagctgtcttcttgcactgagtcagttcctgggtgggggtcacag

SEQ ID NO: 95185 - DNA, 115319 bp, Homo sapiens
cttagaggtgactgcctcagttttcccagcccatggactgatgggaaggtcaagaccctaatgatgctccatgggagaagaggacatgcttgaggcaaaggccagcccatgcttagcccstggccacgagccaggattgcctctgctgcttgccctgtggccctgcagatgaacttaggccctctccagagcagagcatttgttgccyttcstgctcctttagcctcagggcaggaggctgccgggtttcctcacacgcagggcctcttctctctgaggtcttggccctgagggctatatatgaagggccatgcccatggagactgagatctgacccctgcagtaggtctcagggatgaggaccccagcatcagacactctgggttgcttggggcacttccttccccaacagaagcttcagtcccaacccaggtcccaccagtccctgcttgcgttcctgctcaactgctgcctgatggaaaacttagcaacgagctgtgactggcactcctcccgcaggggtaaacacagactcctctagccctgactgcagagacagataaaggcccttaccctggatatctacattctctatccttaaagtgaaaaataacttggtttgagctagaataactggagcaacaaaataaagatggatagcattagtttataactgatgaaataaaataagtatgtatgaacctgtactgatataagttaacaattgcatacattaataaatagatgtggaggggaagctcttcttctcagaagaattccaattaataaatgttgaaggaatcagaaaatgcaaaatcatcactaggcaaactgcagtaataattgtttcagtcaagacctagtgatgaatgctaaaatcagtgaataaaaatttgaggagacacaggattttgtataatctcgaagaacctcccttaagatatttattagtgacagaggaaaaaatagtacctttacagcagagaaattccacagacaccaacttgacaaatgatcaaggttaacatcaccagtaataagacacatcagcatcatgtacccactggtatgatgcccagagaatgcatcacttctaaggtatcattaccaaaaagtgcataacgcaatctaattgtgagaaaaatcatgccaacccaaactgaggagcattcatcaaaatactcataaaaatgtcaagatcatgaaagataaggaaagactaaggaacaatcacagattggagactgagacatgacaactaaatacaacatgggattttggatgggatcctacgatagaaaaagggcagtagtagaaaaactggtgaaatccaaacaaagtctgtagttcagttattactattgtaaccaatgttaatttcctggtttggataaatgcataacgcgtatttaaattgttaacatcagagaaagctagatgaagggtatatgtgaaatctctgtactattttcaaacttctctctaaatcaaaagttatttcaaaataaagttaaaaaataatcgccaggcgcggtggctcacgcctgtaatcccaacactttgggaggccgaggcaggtggatcaccttaggtcaggagttcgagaccagcctggccaacatggtgaaaccctgtctctactaaaaatacaaaaaacaaacaaacaaacaaacaaaaaactagccgggcatggtagcaggcccctgtaatcccagctactcgggaggctgaggcaggagaatcgcttgaaccaaggaggcagaggttgcagtgagccgagatggcaccattgcactcctccaccctgggcaacaagaacgaagaaagaaactccatctcaaaaaaataaaataaaataaaataaaataaaataaaacgaaaaataatttgactcttagtaactgcacaggttgaaaaacttggacctcacaatcaacccctgaagaaggaaactaccttatacacatgtacacacacagacgaatgcactcacgcaaaccccaactcagacaccttattgctacctcctggcatactatgaaaggcatttctacagcacagcatgccatccttggttcctggctaaccctgtcctcctgtgaagaggtgttggggggcagttcaggcagacttgtctgtccccaaagatatgcccattgggagatcctggcacggcagtataaggcaaagacacaatctgaggacagtcccactacctgtgttgtgccaactgggatgcagagaaccttctcaggggccctgggcttggccctgtacactggcactggccaagtcagtatgggtttggacttgtgttctattctctgaggcttggaactgccactgtggggagaggggctcagcctccagcaagtcccatcacctattacacaggccacaacctggactttagaacagctcccaccatgcccactgtccccagccagtggagaaggcaaagaaggtgctgagcttctgcctttaccactcctcaccaccacctaggaagcccatttgctggtgccacactctttgctggtgccacactctgtgctggccaccaccggatggggcatggggcattatctcactgagtcctcccaacaactcagataaggtggcttctcttattatccccattttgaaaactgagataaagtacacataatatacagtttaccatcttagccatttttaagtgtacagttcagaagcgttcacactgttgtgcaatcaatctccaacactactttcatcttacaaaactgaaactctatacccatgaaacaacgactccctactccttccttcttccagtccctggcaaccaccatttactttctgcttctgtgagtgtgactactcctgtagtgaaatcagaaaataatttgtcttgtgactggcttatttcactaagcgtagtctcctcaaggtttatccacgttgtagcatgtccttcctttttaaagctgaataatcgtccattgtacgcatataccacattatgtttatccatttgtctgtggaaggacacttgggttgctttcaccttttgactattgtgaataatgctaccatagacatggtgtacaaatatctctttgaaaccctgtttcaattattttagacatatatccagaattagtattgctggatcatatggtgattctatttttaatttttttagggaccaccacattattttccatagtggctgcaccattttacactcccactaggaatgaacaagggtttcaatttctctacatcctcactaacacttgttattttctgtgtttaaaaacaacaacaacacttttttagaggtggggtcttgccctgtcacccaggctggagtgcagagatatggtcatagctcactgcaacctcaaactcttgggctcaagtgatcctcctgccccagcctcctgagaagctggaactacagtcacatgccctcatgcctggctaattttttatttattttttgtagagatggggtcttactatgttgcccagtgctgtcttgaactcctgccccctagcaatcctcctgcctcggcctcccaaagtggatttctgggtgttttttttttctttttgtagtagctatttttaagggtacaaagtggtacctccttatgattttcatttgcatttccctagtgattagtgatgttgagcctcttttcatcgcttgtacccccaatttatagacaaggaaactgaggctttcatcagtgatgtaacctgcctggagtcagccaggtggttggcagtggagtcaaaactggccctctactgagtctgactccagaactctgtgtgctgccgcccctctgggggagagccatccatccatcctgcttaccctggtacttgcttccttccctcctcctcccaaccaccagagcccagttttttgttgttgttgttgtttgtttgtttgttttgagacacagtctggctctgtcacccaggctggagtgctgtggtgtgatctcagctcactgcaacctccgcctcccaggttgaagtgattctcctgccttagcctcccgagtagctgggactacaggggtgcaccaccactcccagctaatttttgtatttttagtagagacggggtttcaccatgttggccaggctggtctcaaactcctgacctcaagtaatctgcccgcctcagcctctcaaagtactgggattacaggcgtgagccactgtgcccagcccctagttgctttttattttacttccaccactcaaaaaggaagccaggaagggaaaagctgccaaaaaaagcaaatcctggtgcatgtgtgtgaatgtgtgatgatgtacatccttagaggtccctgtgaacagcgtacaacatgagtagctatggacttggaggccagcagctactcacccctcacgccctacagtgaacaaaaccagcgagcaatggaaaagcagacaggtcagcccagctgccagggaaggctgccactcatgggtccagcctccataacaggcactgataacacttccaggaatcgacgcgggatgagctggcccccagtctcagctgctcccaggccatgctgtgggcagggagtgggcaagcactagagcccctgctagggaagcaaatccagagaagcatggccaccttagggcccagggtaggtatggtgccaatgctgggggatccaaaggcagtccctgggctgagcccacttcccacaggtgccacagattcgacaaccaccacgcctggctggccaccattctcttgcagaggagagtttcaaaacttcctcactggtcttcttgtttatcatagcagctagagtgagctctttccaaaagcacgaacctggccttagaatgcttactattttctcactgtcctccgaataaagtcagctcctcagtatacatagaaggccactatgaactagcccttgtggccatttctagtctcatttgtcatatctgtcatcccttgagttccagccactccgatatatgagaattccattacctgaatttcccatactcttgcctagacaggtcttgctcacattttcagaatcagctaaaatcatatcaccccttcttggagtatttcctccacctattgtcccacagagagggtgatttatttatcccaggtcacatagcaagcaaggcaggacttgaatttgggttccagaaccctattgctaaccagggttaatgttagccttctcagtaacacagccagtgtgccccatgggcatctgagggtaggctccacacaccagatgtccacaccttagtgctcagcacaaggccagacacaatgtctgatgaccgctataccgtgctgagggaaagggataagggactagcagaggccactcaggtttttcttgggaggagcatgaggcagaggagggactagcagcagggaaatcctacctgcctgaccaatagcaggcaacagctccatgaggatgctctcctcagaagaaaggtgtatcctgacccaggtccttaccagatgtgaagcagcaaaagcgggagaagtgtgtgtgcatcctcattcctggaacttagaaaacctgccactaaccacgcagggtgctgaggggctacagcccctgcctgccaactcaccctgtgctcagagaggtccctgagggccagggcttccagctggggtttcgccttctgtgcttccttgcacccaatgagcctcaggaggccatctgctgtcttagagaaactggggcctcaggaaaggaccccaaacctcacaagtatatggtacggcagtacacctcctgatgcctccagaagtctgtggccagggaacagacaagatttggccccgccctgcccagtaacaaggtccctcacacccctcctcccatgcctggcaggaaggtgactcaggcagtgcgtctgggtagcctggggctgcgcttcccccaacgcaacatctaggttcttaggaaacttcatttgttgtgaaaatcggaaatgaaaagacagttggtgacaaactcctttctccatcacctccttattggacagaaacgacccaggaatgcgcctcgcgtgagtcctattctttctkggggtgcacacccgctgctggaagtatgaacagcaggtttgagggggaggggagcgctgacccgggcactgcgcagggagtctcaaggggggctgacgcagagggagggtcaggcactcccgggtcaacggtctcggcctggcacccacctcggtcacgacggtggacaggtagacgtcctggctgaactcccagccatccaggcagctctcctgctccagctgccccaggtccacgtcgcgccccggctccagcccgagcgccgagaagttggcgatggtggcgagccggtagcggctgcagctgtggggcacctcgcggccgtcccgcagccgcagcgggacactgttgttgcgccaggcgctgctcaggttcgcggcgtccggcactcgacagcggtgctccggggtccccgccaggaacacgactgacataccattgaagccattggggatgatgctggcgctgagcaggaagaagatgaggcgctggaagggcccccactcgcccaggaaggcgatcacctcgtcgtagtcccgcatgcttcccactgccgctccgaaacttgcaactacgggtgatgacagcgttctcaggacagtgtcttgtagctggggcgctccccaaggatgttagaacgttcccgggggacaggcaggctgttagaaattggggcgcgaagccggggaccgttcctgggaaacaggctgaaggcgttggagcgttcccgggagctcgcgctgagcttgatgccactgtacacttgggaccacacccccatccccggccsggcgcggggaaggggagggcggcccagcccgggaggctgggctcccggctgtctccgccctgtgcttcgcgcgcccgcccgcccccaaggacctgacgggggcttccaggctgggctcagccattccgcccgcgtgccggggaagaagctcgttctcggttgtccccagccacccccgagcgctgattcccagacctgggccccacgtgggagggcgggcgcaagggaggagccgaggccagagagmgagttctcggaggggtcggccctcgatctgctsgggccgygtsgcccsgggcccagaccccagcagggttccctccgcggtctcctccaatstggaggctgagcttaggctsccacgcgtggggcgcggaggggcgagtcagtggagtcggttcccgggaaacttctgggggcggcagagcgacaggagcgcgccctctcctgtggcgcctcgcgcaggcggctggcacacgccgacagggagctcatttcccaacagtcctagcagagctgaattcggtcacccctggcggcgcccggacagcgtcctcaggacagccaggaccctcatcttgcacagggaaaacaggcccacagcctggaagggatgagcaaggtcacactacgtcagagatgggcccggatcggagggaggggcgggggcaggagacaaccgagtgcccgggaggcgagtttcctcccccgcacgccggcgtaatggctgagcccagcctggaagcccccgccgggtccatgggcgggcgggcgccaggacatggagcctgcgcattgcgggagcacagtcatggaggcactgtcgtcacgctgggttctgattttgagccccttgctctcctcacgcccccagggccctttatcgcggcaggctgycagagctttctccgactggaaggctttctgttagcagaagggcctgcccccagtccaggaacagagggagggagggagagagaagtaggagatccgatttggcgctcagacccggcagggtaaccaaagcagggaccacagcctccctttttttggctcagtgcccagacctaaggcccttctgctgttgtgtgagctagcccgggcctggagcctgagccctggggttcacgaggcagataaaattgacagggtgaagagctcacctctttggagattttgcacgagtgtgtttgtttccccaggctccgattaagaggcggagggacatttctgcctctttttgtgtagcttccagtctgacccctcctcttaggaggacttcccacccccttggaacctcagtttcctacctgtaataagactatacatcctgatgtgctaggacagctctgatttatgcctattaatccagtgaaattattaatagagcctccctttactttcacaagtatccttcttcgaatgatatattatggtcattatcttacttagcttgggtttcatctccctactccaccccatataatagagcaaagytggagacaagaacgtatataaggtcgtttattctgagtaatgataccataaaacagaagtgagggactagggaggagagtgaacagagagggaggtaaagccaacatagactgtgaaattgagatggttwttggcgatgaccaagatcagtaacagtgttgtgtggagccctagtggagcctaagaataaatggaaaattagcaatactgagcctgtctttattgaaaattttgatattgcgttcatcatgggtatttgcattaatttctattttaaaaaatattgcattaaaatataattaatcttggttactgaatttcttggtgcctccttaaatttgcaccagagacaagtgccttgctctttttcctcacctcagccttgtctcaatccccattgctgtgggttactgaggtttaatcccactgggggcttctaaagagccatatagaatgaggaggtatttgtttcctagttctgtctccattggtcaactgcttgcacttccagattgcacataagtgagggctgaacaggtaccactcgactatttgccattgctcacaagtgtatgtaaayctctatctggaattgttttgtcctccatacaaaatgaatgaacaagtatactgcttacagcttagcccactgggggaatttcccttcaaagttgtttagggctaccccctaaatggagctatgttacaggaacaatctcttttyytttttttcttttttaactagtatcaatgtctaaagctwatccatctgtgagtaagggctattttcccctccatcagttggttacagagaactacctactaaggctgtaggtctgagctaagacagaagggttggtatagccgatagctgaggtaggtgtcataggagtctgagccaccttttgttgacttacatgcaccctattgacctgcttagtcctgatcctgaatttaccattcctgttctattattatatgatggattgctgataagtctgcttttttttttttttttttttttttttgagagagattctcagtctgtcacccaggctggagtgcagtggcacaatcacagctcactgcagcctcaacctccctaggctcaagcaatccttctacttcagcctcccaggttgctgggactacaggcaaacaccwccacacccagctaatttttttttctttattttttararatggggttttgccatgttgcctcctgggctcaagtaattctctgccctcagcttcctcccaaagtgccgggattacaggtgtgagccaccatgcctggcttaaacctgcctaatcttacgacttggtagactctgacaatacctggcttacaatgggtatctctggttgcatagacccttgatgtcccattgctaggctcttggtttttattggggccaaacagctgcttttcaaaagtcgaatatctctctgctgcatggccttgctccagaactttagagatctgtgctgaaactcttttattagggcatgtcagagactctgccctgtagccttattcatcatgtatgcctctagccccattgtatctgctggataatatgaaccaaatggtagagaagcttgtactctagttggacacactgtacagctctctcctgctctgggtttcacccgaaactgaaagccttcaggggcacgaaatagatgggtcagaggaatactccaccaagcactatgccttagtgttggaggatacagagctcaataacttgtctttactttacaggggataacctggcatgactactgatccctgataactttacccatttgtttcaaaataatatgggatagaagaagttggtggggatatagatgaaataatatgggctgtgaatagtggttcaagggattcgttttactagtttgtctacttttacatccatttaacttattctagaacaaaaargtaagaaaaaagttgaacaatatgaatgtcctgaatcttcatatttttatctgctatcctttggcatacatgtgtctttactaggacatctagagttcttgcttcttcttgcttactaggtcaaattagcattaggtcatcaatacagtggactaccatgatgttcaatggaatattgagacaatcaaagtcgctagatactgtgttgtgcagagaggagaactaacatagcccagaggcaagagagtgaatatgtactgctattattcctacataaaagcaaacagtttttcatcctcctgactgaaggatattgagaagaaaatatttgatgttgaaattaatctctgcaataccacccaggatgtggttttacttctcatttaataaatcagtaagaaaggtgagggtaagtgtcaggggctttcatttggcccttcctaccttaatggctcttaataaaatagggagtaaatgttagtgtactgccagttgctasaacatctgtcctagttatttacttagggataaggaaattagtacagtgtggatcttcagacttctggatctgtttgcaagagtaytccatttacctggctttcatgagcctctgtcacggggggaccatgatagtgtttccccccagcactgatgccagctcatactctgtacccaatagcctttgaaagtctggttctttttcttccccctgaccagagttactatgataaatggccacagatctctcatgtggaaagattggggaaataattatcttgtatacctttggcagcattggagggctcttctataaaaaggcttggcctttccttaaatcaataggctctgagcctgagaactggcctagatcaaggaaatttatgaggaaatactattttccattatggcagctgtcatctgccttctgctcatgagcccttgattttggggattgctgttgttacagtcaagtaatacacagtcatctgccaatttagttaactctagggacactatggtctattagccattgccatagatagaccctatgggtcaaagcacttagctgccactttggttttgtggtaattattattattattatttttagacggagtctcactctgttgcccaggttggagtgcagtggtgcgatctcagctcactgcaagctccgcctcccaggttcaygccattctcctgcctcagcctcctgagtagctgggactacaggyacctgcraccatgtccggctaattttttgtatttttagtagagatggggtttcaccgtgttagccaggatggtctcgatctcctgacctcgtgatccaaccgccttggcctcccaaagtgctgggattacaggcgtgagccaccgcgcctggccattttgtgataatttttatatctaccctgcctctgttgattgttacccatctrgtctctgcaattccagggtcctaccatccccactgacactaagaattcctcacctttacatgttgtgttgcctcggtgaaaagagtggcctctggacttcccatgggaatgtagtcttctagtaggttctctgatcttgcataataactacaatctaacatgctaatccctctgagacttctgactccttcagtattctgccaaggaagtttctggcatctctacttcatttccgaaggtcgtaattgtgtccaagtttcaaagaagcatctcagaagcatgtgaaaatggttttatgtatcctygattggatgtkaatccctgaataatgagagtgcccccagattgatacattcttacaaccctctcctcacacccctgttatccctgttcctgccacaacataggtcccgtaattttttcaatgtgtatgctatttgcttataaatcagatactgtatttctccacttaggctgtgctgagacctaaccctagttattggtctgcaggcaatgaagggaggtaggggatatggaggagaataagcatcatcgttggggcccttgccttaggaggagtcttggcaggattccaggcaaggagaggcttgtctcctatagcaggagaaagatagctgcttctgctggccttgaaggtttaggagaatccasgaattcaaaattctcacattaatctattcaaatgttcccattctttgttccagggttccatatgtttcctatcagggccatgactccattgtagaaagtagagctatcacrgctgtgaatcccttccttgcaggtctgccttctakgaccactcttatgtcgactgtcttagcccagatttcctcctgaaagcaaagcctgagtcaagagtttgtgtgtaggtgatttatttgggaatggatccaaaggaacaggaataagtgactggggagagtaaaacaggaaagaagggaagccaatataagagtgcagaggccagatgtggtggctcacacctgtaatcctagcactttgggaggccgaggtgggtggatcatgaaatgaggagttcaagaccagcctggccaagatggtgaaaccycatctctactaaaaatacaaaaattagccaggcgtggtggcacacacctgtaatcccagctacttgggaggctgaggcagagaattgcttaaacccgggaggcagaggttgcaatgagccaagatcgcgccactgcactccagcctgggcgacagagcgagactccgtctcaaaaaaaaaaaaaaaagtgcagagtctcagaccagcccgaagagctgcagccgccttttgcgccctccctgccttccccatcctccctgccgacatcatgctccagttcctgcttgaatttactttggcaatgtgattggaatgtatctggctcagaactatgccacgccaaacctggataaaacacttgatgaaatgaaaaagggcaatgccragaaaamccccctagttcatgaggccgactccrgcactgccttctggatacactgattgcaccactcttgagggcctcctttaccatctcaaccaaaggcttttgttttcatctccaacctcagcgattttcgtcttggctagacccggtgctgccttaggacaaaaatagggccacaagttaagaactacctatgtagtgtgacagatcccctgccaggttgtttaagggtacatgtccactgcctgaaccctgaaggccaggcaatgagccaaggccatggtgtatagctgaggaataggtgtccctgggaacccaaacatcctggagaatagctgagaacctaccaagggaaacagtcccatcacacacacatagtaggtaaagagacagaaaattagcttagagatgggaggtggcacrgatctctaaagctgtccygctgccattcaggagtgcctcatgcataagtcctaataaactcatctactagccaagctgaacttgtcccagacatgcttggtctctttgctccctcccagtttggggtaaggttttttttaaatacaattccaggtttttctcattacaattgctgtcatgagcaggatctgagaaaccaatggatgaattaggaaggcgcatctgcggggagaatcctagggtggttggcaacatgcatgtggcgtggagttgcccgactgctcaatcttcacaggccaccgtggactctgggaaaacactggcagaaactgaatcacctattgtaagaagttaagatattaaaatacgataaagataataaatgtgctattgttgcaataagggtagctactgagaaatcatgagagcagraaagggagaaagggtaaaaactcctgcagaaggtgaaaggcatgccaggttttctaggacaccagcaggttacatatgatggcctattcttgtgcacgttctaaaactgatgggcaaataacaacaacaacaamaaaaaagagctcaaatggttaagctgcaactatagagttaaatagcatcttcatatgctctctgtttctctctttcttttcccacatgctttgaatctgctgttattaagccaccgtgttgagataaaactcactgtttatggtaacactaattcaaggttatttggagattttgtttttcttatacaattaagccagttctagttaaaatgtaaacaataaaatgaaaacgaaaaggaaaaaagaggtttttaaaaatcaaactgccatggaaacttctttcccccaaattttgatccacagctttccttggattacctatcagggaaaatagagcttagccataacaggtcccaattttgtcaaaagtaatttgggtccaactgtcttttgtaaaaacwacaaatttattatattgtctcatggctagagttctgaagtaaaattatcagatctttgtgtatgtatgtatatacatgtttaaatatattatatatgtgcatgtattatatgttctaacatgctaccaaataaaattatagataaatgggtataaagtccaaatgcttttcaagttcacaggaattcaataatctttgctaaataagttggcttttaaattattagtaaataaaaataaagatatcttcaaaagtgtcagcatacatttttgtctgagtcttctgataaaatacactttatatttgcctctgctagatactttaaagggtcagggttttacatgaaagttagaagactgtaaacccagccaaaaataaaatgatctttgtctgtatgatttttttgataagcaagactaattcgatattgttggtttaatgaaaacaactgaattttctgagttatcagcaggaatccccatgtgtttaactttaaggctcttgcttagatgaacacctgatattcacaagctatgaaaatggttaacagggaaataacttgcaatgacgattagctttgttgactgtcttggttctcacaagtaatctagataaactgctaaaaatgaataaactgagtacatgtaaatgagataaatgtgtgtaggtgaaaattctgtatagtttaaaatcttaaaattactttaggtactcattgaatgtctaggtcatttccagtttaaaaagggttatgatatgggcgaggtatttgtggaccttaatgagctagataaaaacaaggactgggccgggcgcggtggctcacgcctgtaatcccagcactttgggaggccgaggcaggcggatcacgaggtcaagagatccagaccatcctggccaacatggtgaacccccgtctctactaataatacaaaaattagctggacgtggtggcgcgtgcctgtagtcccagctactcaggaggctgaggcaagaaaagctcttgaacttgggaggcagaggttgcagtgagccgaaatcatgccactgcactccagcctggcgacagagtgagactctgttgcaaaacgaggaccaagtccaggaaataatcaaagaacaaaaaggggatgagccaattgaatgtacacttgccctggtataggcaggcaattaacacgaaaaaataccacctgccagggggatgctttgaaatcacctgaacaatccaggaattacataaggcacaaatagtccagagcacctataacagccctatgtggcctgcaaagaagccatatgatacctagaaaatgacagtaaactgccgtgagctaaacagagtgatgccccccgtacctgcagctgtacccggtattgctcagctgctagagcaaatggtccttaagctgggaaatgtccatgctgtgattaatttggctaatgccttttaaagtatttctttagcagacgattcacaggagcagtttgcattcatttgggagggcaaacaatggattttccaggtgctaccacaagaatatctgtgcagccccaccgtctttcatgatatgattgcacaggacctgtctagattcttgcctacctcagtcttcctgttttaccatactgataatataatgttaacctcagaatctcttacaaatctggagactgccctgcacaccatcttagacagcctaaaaaggacagggaatgggaagtcaacccccaaaacatacaagggcccagtgtagccatcaaattcctaggaattacctggatgggtaagacacgaaacatacccagagctgttattgataagatagcacagtagcctattcctcagacaataaagcaacttcacgttttcctaggtttattaggctactggaaaatattcatctctcatttgacacaaaccctctggccttyacacaccctagtaaaaagggatgcaaaatgggactggacacataaagagcaagaggcatttgacaaagcaaaaatgttggtaaaacaagcccaagcattaggtgccccacagccacagcacccttttgcattagaagtcactagagataccgcagggatgaaatggtgtttgtggcaaaagcaaccaacagtaatggtacttgtaagatttggtctcaattatggaagggggcataatcccactatatagtcctggagcaataastctggctgtatatagggcattgcaacaaatggaggccatcaccagaaagcaaaccatcacaataaaaacttcctctcctataaaaggggagatggagggccttctagccaagcccatctctgggatgatacaatcacacactgctgaagtggcatgcctatctacaacagaaggtgtcttgtccatgagtcctgtaagtcaggcaccacagaaaatgctcagacccatccactttgaacaagtggaaggggccgacatggcaatgaatctacctactaggccaaccatcatatatgaagggattccattgatacccactagggcctaatacactgatgggtctagcaaaggcacccaacaccaatggttggcaatcatggtgaatatggacactgacaacatatggttagaatgggaattaggacaaagcagtcaatgggccatgctacaggcagtttggatactcatcacccacaagccctggccattagtcatttgcacagataattggactacatacagaggccttaccatgtggatcaatcagagtgccacagacaattggcaagtttggggcaggatcctctggggaatgaccatgtggcaagacatccacatcaggttacaggaaagggatgtccatcttgtgatgtaccatatggatgcacatagcccaaacaaccttctggaaatcaaaaggcgaatggccttactcattcacgtgcaggcaatttgcccaagcccatccgaggaaatgccgtatgtgcacatcataaaaacggccaccaggggcaatcacagagtggcccatagcaaaagcagcaggcatccctatccaataagcaaatgttttggcagctgttcagaaccatgagatctgctcacaactgtgacctagaaagattccctccacaccaggtcacatacattgagccatacaaactatgtgagcctggcaagtcaattgtattggtcccctgccccagaatagaaagaaaaggtatgccttaacttgtatggacacaacggggctgctacaggccttcccaataaaatgtgccactcaactggagatcatcaaatgtctcactgctcttttktgtgtgtgtgtgtgagacagaatcttgctctgtcccccaggctggggtgcagtggtgygatcttggctcactgcaacctccgcytctcaagtagctgggatcacaggtgcccacctgtaatacaaaaacgcctggctaatttttatatttttagkagagatgggttttcaccatgttggccaggttggtctcgaactcctgacctcaagtgatccacccacctcagcctcccaaagtgctgggattacaagcgtgagctaccatgcctggacctcactgctcttaacgtcatgtatggcataccaaaaaggatagataatgatcaaggccccaattcacaggccataatattaaacactgggcatcagaacaaaacatagactgaaagttccacttaccatrtaacccaacaggggcaggccttacatgcattgtcttaggactggactaagaatctccctgtaatacaaattttaaatgtcacccactaccatgcatggcatcacttcctgtgaatggttggcaaggtttgtaaaccaggccccacaaactcttggggttacctctgagactcagatccatgatcctgaaacaaatggccagactttgcccctgagcacatcagtggatctaccaagtggcgatggctacatggacccaaagttgagctggaaaatgcccccatactagatcgattttatagcgctggaggacaccatgaagactgactgaggggaaatggtcccagccgtgctccctgatggagatccgagatactgacgttatcaacatgcagcaacaccaacacctgctagatgcgttaaatgtggatagcacaggcaaggccagaaatttaccaattggctttatgcccacccctgtggagggaaaccctatatagtactgtaagccaggctcgaggcccagggcatctgccctaatagggccaatgggaaaaatgattatgttagcaataattaagttacaaggaatagatatacctatgagggtttctactaaacgcctgtgtttatgcccaaaggccatggcttctgctacccatggtagctagtaatgtcttcctggactgggctgcagctgcagcaacagtcaacaaccagccctgttactgggtatagggatacctccccctgtcaaatgataatggcatgccttggaatattctgcctttctcccaacagaactggaatgattgcttcaacagcatcaataaggcaatccggctcactggggactgcctccacctggaggccaaattgccaacatgacagagaccaaacaacatacgtcctcataggcactacctgttatttctctgataaagagaatcatgtcacagatgctttaaatcatttgtcaactcagatccatgatatagttcaattaggttactttgactcattcttaaattaggtacacagcttacctacttgctggaattatgttttgctaataggcatcataattatagatagcttctgctttttatgctcttatgtataccatggaagtggcctgtatccacaaactgtggctatacattatagacctctatagctcttcccctcgtttcctgctcagggactctcgagcaaggttggtggaaagaatataagagctggggaatgggatgaattgaagtatgacaggttccccggccaggtgactcaagggtgtatgtccgctgcctgaactctgaagatcaggtgatgacccaaggccatggtacccagccaaggagcaaatgaccctgaggacccaaacatcccagagaatagctgagaacctaccaagggaaagagtcccatcacacacacagaagaagcaaagagccagaaaattagcttaaaagcagcttagggatgggaggtggcacagatctctaaagctgtcccactgccatccaggaatgccttgtgtgtaagtcctcataaactcatttgcttaccaagctggacttgtctgaggcactctttggtctcttggctccctctcaatttgggagaaggtattttttttaatacaattttgggtttttcttgttacattacccttatatttccgacatccttatctctttccacatcttcctttcagccgtttgggaggttctaagactggaattacggtgctagattagtgaacatgacctttaatgagtagtctttcccttattctttgggattttgactaccttttgtcagatgaaaaattggtgagttttgtgtagctgattggatgcaaataatgctgatttcacattttagcaaagatgcttgttaaacatttggtacgaaattgtgttgtttctaagtaattaaaatctatttagaagccaaagaagaagaagaggaagaggaaagaagaagaagaggaagaggaagaagaagaagaagaagaagaagaagaagaagaagaagaagaagaagaagaagaagaagaagaagagaagaagaagaagaagaagaagaagaagaatgcagcagtaggttgtttacagatgtaagaaatttgggtatgggtctcagaaatgtccatctttaaggttcagaagtagggaatatttaggtctgggctggagatacctatttgggagtggtcayaactgcagagttcctgaggcccttgttgtgacagcagagccagccagggttcctggttgcaagcatgctcacagaattgaygggaaagctgaggtactgctgagataagcagaaatcagctgttggagatggcacccgcctgggaagtagacagaccagagtggasccctaacagggcagcctgcttcagactgagcctgaaggggaggagtggctccttgactgggccaggtggcctctgatcactgtcctcccagaacaagtccagtgtggctggagtaagagcacaaaaggagggtagggacagtttaraagggatgtggttattagacagcgcaaacagcacaaacaaccctagacaatgagcatctggggaggaatggaggagctaggacagggccttgaggrgtggtgcctcaggggcaggcaagagagtggacaggaacactggctgggaaggcacagggtgacaggactgaggagaaagagacttcttccacccagaaatctctttctgggtggtgagacagtctccagcaattggagagagagccctgggggctgggaaggggccagtccaggctgtctctcagcaggctcctggaaccacggagggtcagtgagtggtggggatgacccatttagccgggatcatgaccagacgagtgagtcaagcaggcatggtggtaggttcatgcatatcagagttggtgatcaggtgctgtggcaccagccttgtccacactcagatccaaagcttcaggggtcacctttactttgyccagcttccaccattccatgccccatgcaaaaagttggtaaggttgagcctgcactctgggctgttctggggaccttgccaagtggaaacagatcagcacccttcagaaatggcttggtcagagtcactaaaccattggtaggcaggcaacactctccatggaagactggtatgcgccgttactttggttgcccctgccatggagatttgmtagggtgtgtgtgaccttggcaagttttttaacctttctgagctcatccataaaatggggataataaccatacttcctttctggttggtatgaggattaaaaacaatcatatcgttcactaagggcttggagatgaaggcctgggacacattagctcccataatagttattatccaactcccttcccttcttctgagactgtgggtgtgctccagcttcccatgaaaattcaattacagaccaagaacaccctggatggcagctgagtgttcttgcactgcagccattgtcagtgaagctggtgtgtgtgtgygtgtgtgtgtgtgtgygygcgcgcgcgcgcgtgggtgtcgggggtggtgcatcagcctctgagcttggctcaccgggcctgacagacccacttaagggctggttaatgcggtttctgagcccacatggctgagaccgactccagaccctgcaggacccagtgaggtctctagcagtctctcctgggatttctagtctctgcattccagccacaaatggatctatgtcagacactagcaaagttgaggtttggtttctgtagggacccaaatagtttcccacttgtggtagaggggacacaggaggacagtgcttgcttattagagaaacctcttcactacccttaaacctttttagaggttccacctccattcagakgtgctgtgggaatgttgttagaaagacagattattctgtgagaaaatgataaaccaggaagttacatgaaaagcaagtcaggggtcggcctggggtgcaagacaagaagttgggtaagaatgagttgtccaggatagcactggagtgcacgtagctggacaggggcacccagaggtggaggggaggtggggcactccccaggtggggcagagggactcagggcccacagcccaggcttctgggcatcatggtgtkgtgcaagtcacaacactgctcccacccatccaactcagcagttcaagggctgtgagcccagggccaagctagcacaccccctagaggggctgagtccttggccatgaagggagggctggcttgaagctgcatctgggctccgcctaccttcacccctttctttggttctctaggaggaaagtatcaaataacaaagcttgtcactcagagaaccagaaaggactccatttgtgtttcaacctccttggagggtcaaggaagcctgcaagagtcttgaggagagtttgatggggctgaacttacagataagcacaatgagagttacagaggcacaagttrtccacagaggccagcaggggctgtgtacctcatgtggccctgtgagctgggatttggaatttagactctgtcctaagagcagtgaggagccatggaaactataataggcaagattgacagggaattgcacttgaaaaacctcctttagctgttatgtagagaaaggattgagggaggggccaggcaggagacagggagacaaggcagaggcccttacactgttcagcatgagacagtggcgtctggactggggagagtgggctagtttggaattagttagggatgaacgcagtcatgcttgctaactggttttactgcgtctacctttgccccttagggcctattctccatacagcagacaatgtgatcctagttaaaacataattccaggtcatgccgctcctctggcttttcatctcagagtaaaagtcaaagtccttaccatggctgtaggagaacagcctgttgcgtggcaagaatgatgcttttttttttttttaacagggtctcactctgttgcctaggctcgagtgcagtggcaagatcatagctcacygcagcctcgaactcctgggctcaaggggtcctcccacctcagccttctgagtagtttggactataggtgcatgccgccacagctggctattttttttttcatttttattttttctagagrgggggtctcgctatgttgcccaggttagtctcaaactcctggccttgaaagatcctcccgccttggcctcccaaagtgctgggattacaggtgtgggccactgttccaggccacttgatccaaaaccacygtaatgaccaatgtttgacccctagatgccaagatattcatcagcaagatctttaaacaatgcctgtagaatagaaaactcttcataaagatgcttatttaacctctccagtggtcacgagtcttggcaagaaagtctgaagacgggaccagctgcacatgttttaccctaagagcttgctatataaaggatactttctggaaggctggttggtgtgaggattcagtcttgcagccactcgagacatcacttctgttcgtaagtccctcttatatatttctctctgagaaaatggatttgtcaacctctttctttggcttctcagctctctcggcctttgggtttgcatagtcctgctatccatggaacaatggctcacaagggccaacacagccttgtctccctcacatctctctracgacctcatctactacttccagccacctcacttatactacttcagtcactgcttgcctagggccttaggatttcctgtgccctctgcctggaatgtaatccccccagatacctgcacagatgatatcttaccacctcagttctctgcccaaatgttaccttatctgtgaggcctttccagattccatatatgaagagaatcccttatgctctactgtaatgccttctttatttccttgatagcactgcttatagcctgtagttattttacatgttcgttcaaaatgttttcctagggtgcaacacaatgcctggcatayagaaggttcttaataggtatttttgttttttgagacagagtcttgctctgtcacccacgctggagtgcagtggcgtgatcttggctcactgcaacctccacgtcctgggttcaagcaagtctcctgcctcagcctcctgagcagctgggactacaggtgattgccaccacaccgggataatttttgtatttttagcagagacggggttttgccatgttggccagactggtcttgaactcctggcctcaagtgatcccccccaccttggcctcccaaagtgctgggattacaggcgtgagccactgtgcatgaccttttaataaatatttagttgactgagtgagttgaggttgaggatgcaggagggagcaggtgccctccaggacagcagtccccaaccttttcggcaccagggactggttttgtgaaagacaacttttccatggatggagggcagggatggtttcaggatgattcaaacacattacacttattgtgcactttattcctattattattacattgtaatatataatgaaataattacatgactcaccataatgtatggtgaaggaagccctgagcttgttttcctgcaactagatggtcccatctgggggtgatgggagacagtgacagatcatcagacgttagattctcataaggaatgtacagcctagatcmcttgcttgcacagctcacaatarggttcatactcctggaatcctagaatcctagaatccctactcctagaatcctagaattagagaatctaatgccactgttgatctgacaggagatggagctcaggtggtaatgcaagcaatastgagcggctgtaaatacagatgaagcttcactcgcttgcaagccactcacctcctgctgtgcaasccaatttctagcaggccatggtctatggcctggggattgaagacccctgctccaagacttacctcccactgagaactcaggcaggatgcttggaggtgaggtgaaaggtagtgggaggaagggaagcccagtgtatgtgtgagtgggtgtgtgtgcttgtgtgcctgagtgagggtgggtgcttctccaggacccctgtacctcccagttcctggcctgggtggaggctgggcaggacagaggtaaatctgagccagggtctgaccaaggagataacaggttgtgccagaggcaccaggcaaaactggaagggatgggatggagggcatgtggatggaaactattaactctccctggggatggsagggccgaggctttgctctaggggagggggcagtagagttgggccttgaagagtgagtaggagtttgctgagccatgacaaaagaagaaaggcattttgagcttcagaggtctgagggctatgaaaaggtggactagctcagaggatgctggactggactgtctgctgtagcagaggaggtgagacaaagtagtcagcagcccgaggtcagagaggctttaaatgctagtgggaggaccagggactccatcctgagggccccgaggtcagagaggctttaaaacgctaggcagaggaccaggaactccatcctgagggccctgaggtcagggagactttaaatgttaggaggaggaccagggactccatcctgagggccctggaagagttgaagcaaaggaatgagagattccttcagctgccctgaaatgggtctaaaaatgcttgggaggcaaaatcctagacacagtgctgggtaggatgttatggctggcatgagggtgtagaggatgatatccatgtctttggtctgaaagcccctgaggtaaggaactgggccctggggttcgagggatgtagcaggtttggggacaacagtgaaagttggttctagccaggtaggctggagcctggagcactgtgaattggggatcctggatctggttccccctcctggagagagactctgatgtcccctgtctcagtactggsaccctgggccatacaaaccttgtcctatgaggaccctgtcccaagcttttcatggtckactacactcagggcccctgggcagacgaggtgggctgggggactgggtagaggctgggccttgaagctggggaaaggacaaatcaggctgtcagctctgaatgccactccccttagctgccctccaagccacccccaaccaggatgcccaggcaggggctgctgtagttgctgcaaccctgaaggggtggagctgttgatctcggggtagcctatggtggcagggagcctcttgggtggtagtttctgttgggggaaggggttattgcatgtcatgggattaaggtgagtaccagcrgctagtggatctgtggtggccagtgggagagtcgagtttctgcgggtgagtgggagtgagaggtgggggccagggcccatggctcccggtatttttccacccactcctgtgcttaataatgcttccctgctttcctgggtgccagtcatcctctcctctcccacctatgactgggtggggctgggaccaagtcagcggaggcagggtgggcaggcaagggcagactcctccaccaccccaccctatttgggtgtggctgcagggagcgtgtgtgcgtgcacacctgcgcagcgctacggtggggcgccctcagggcctcaacgcacacagtctgaccccttgggaagcaaaaggagacaagggccagacatgatctggggtcaccagcaggaccaggacgccaccttgcctcactgctctatcagcacctgcccattgccctgaactgtgctccttcagggaagggaggaggcaaaaggagccttaagagggaatctctagcacaaatttaaccatgaacagaagatctatgagaagaaaggaaaataaaaacttaagcgaagacagacacaacatctgaataaatgcacaggaagtgcagatcacagtcctctctggaggaaaagactaatgccagttcttcccaagtgagtccctagattcagggcaacctggtcacagttcagaggtttgcttttccagagcctgaggcatgcagtctcaacttctgacaactggaaatgtagaggaatagctttgacaggtttgtaaatgaccaacaaggaggagagattggctattaaactccaacacagtagtaattatacattaacagggaaatagatcagatgaccagaatccagtaacaaagattcgtacaaaattaggaaaagttcctaccaatcattaagaagaagttaaataagccttggaaaaaaatcatgaagggtttggggtaacttacacaagaactgctcttttgagagtgaggaccactctgttcccttagtgctaggcacccagcaaacacaccataaatgctcaaaaactgaatgttcatcactggtaatcagagaaatgcaaattaaaacaaacgcatatgacattttacttaacagactggcaaaaatgaaaaaagaaacataatatcctgagctggcaggagcacaaggaaatgggtctcgtgctgatgatgaatgtgaattgataacagtttttttgtgatttgcgatagcacaaaattgaaaacagcacaaatgtacgttactctgggctcgctaaataggcactaaataaaacgagtcagtttcttctcccgagcaagtaaactagagggtagatccacgcgacccggagtctaggacacatcctcgggagtgaacagccacaattcacagacgatgtgtgcagccggggcatgaaaggcccaaggcaaacmcaccacgaggtaaacgccgggactctgaggagaggggtggaagccgggacttcgaggaggggtggaattgacttagagacaggagggagcctcttggagggcaaagctgccctgggcaagtgttcttttctttctaaaccttccttctggtctctgtctggaaatttaagcgcgccccctggtgggggagagaggaaggggaagaaaagggggtctcggaggagaataaagtgctcgtgggtggaagaaacctggaacagaaaatgccagaaaaacctggaacagaagtgcagacggcccgcggcggccccggtgatctccacactcaatcaccctctccaggggagcgatcgctcctgaggctgccagcaccccaccaccacccccaacccgctagtgccgatgacggccacagaggcctttctcgcccccagctcacctttgcacacacagttcccccgtgcagagtttgtgcctccctcatctcttagttctcagctaasactttccctgaccccacccaggtcatacctcctgtcgtcgcgccgcacgcagcatcccagacctcaccttcgtattactagagctggcccgttgtgattcaggtctgccttccacccaggctgtggcccccttcagggcagcatggtacccgtcctgctcactactgcacccagagcctaggacatgcctggcacctaagcagatactactgtactcgggagccatgcatggcctgcgcaggagggtggcaggccaggtgacaggttcaaggtggagcagaggagctttattagagggacagggtgaaacatatttacaccggccgagcagggaccttaaraagcaggsgtgggagcagggtcccagctcaracgagttccaccttggcattggggtacaccgccaccacgtcgtagccctcgggcggcttcwcgcgmgccttggcgtggctctcacagtagagccgctcgtccagaaagaagtaaccacgctgcttgaggttcaggccgcagtcactgcacatgaagcactcgggatggtagagcttgtcccgtgccttgacgatggtrcccctgatggggggaacgagacaggacagcgtcgagtgactgatgggttcacgactgcgcccgcatccagggccctggaaggctagggtccgggaggggcagcgggggcggttactcacacgatgccgtggcmgcagcgcgtgcactcgggcagcccctgcaggccgctcagcggagcgcccagcttgctggccgtgggcttgaggttccgggggccgccaggcccrggccaatcccctgaaacccggagcgtagrtggcatgaacggggtgaggaggtcagaactccatttctgcggggtgtttggttgggcgccagrcgggccatcggcacccgagactggggaacgggtttggcgggcgtggggtgaggggcagcgacagggggtggagagggaatcrggaagccagggcgtagcaargtygtagcaagggcgtgsgaccgggccgcagagaccgaagagggcaggtgactgcgaggcgggacgtggggtcgctagggggcaacctgggcactgcagggagtgggaaggcagatggggacaggtggcaggcgtcttaccgccctcgccggcctctagcatgccctgcaagtagcggaaggagcctgactgcttgggctccgcggccacgggctcggcyggctcccgcagcatcctgtacacctcggagcccaggtcgaytctgcagtcccggctccgcgggaggcctctggctgggtcagcgctgggagggagaaagaaatagaggaggaagggatgcagttccagccttcaccctgtggayttggggtctggtaaggcttatgagtcagaatgcaaccagctaagacccaaggatcaagtgtcaggggtcagagtgggactgggtgagatttgagggatcaagggttaagatgggttctgggcatggcaccgaaggcatctctgtgctacctggggggtggagacacatgcagggtgctcatctgggctggcagggtggcctcgctgctgccattgtgagggactggaaagcragggggttgtccatatggagatcccaggcttggtctgccatcttctggcccagtcccggtgcctgagggccgcctgctggttgttgggctgccgtcctattagagagaggcctaaggcactgggagaccctctggcctccagccattccttgttcaccccacccccaccctgctgtgctgtgccaggtggtggatgtcagttggcttcctctgcttcggcatctctggcctgtggtgctcagccagggaagggatttctggggaagggctgggcctggggactggttatgcccctgcagaaatgagaaacgtccttggaaagtcagacacaaaaacctgggcagctgagactcagcctgggcttgtgagccctgcagtggttctgcccaccaccactcaggaagggacagtactggggcaggcctatcccaagaagcctaaggtctgtgtggctacagcagagtatgtggcctcctggcagaggtggccctggtgccaagccttctcaccttcctgaactgtggtgggtactgggtaggcccatggctgggaactcaaaaaacgtaactcctgtcctacagtcagaaagggtccttgactgtcatgtgtccaaggccctttgggcaggctgargctcaagagtgccattgtgagstcagccccttctgggcctacacctgtcccccatttcctgctttccaggccacaatgagtagccttctgcaggcacagcagatgaggggcagagaccaggctagggctcaaggctctctgccccactaccccacagccagcctggtgcccatggctgaaacattttgggtgggagtgtcctgaacctgccccctcagccatgaggagagggcagtatctctgtgtgtgkgggtctgagtggggactggggatctttgtccctgcagagtccagagctgtgcagttcccagcttgcaagtgcacacaagcaccccacagcaatgtaaacaggggcatgcacactctcacaattatgctttaaagmcacacacacacacataaggacaacacatatgcacctaccaatctccctacatacaactaactacatgcgcatggttacagagacttggagccagcactggtcaccctgggaatggccatagtggcctccatagctgagactgggctagtagccagagcagcctgattttaggatgatgtctgaggccaggccatggggtaggtcttagcctcagcctgggagtgacgtgtaaacctcctctgctctacagtgtggtcagagagcccagtgtggacaggaaaggatgcctatcgtagtgggaagaaccctggtttggacttaggaagctctgaggcatagttgagcctgtggggttctgccctgagtaccccctgctttttgtagggtgggaacctggggaacaggcagaccagcagttgggtgggcccccctccatttcccccaccccaacagacaaacaggagggtcttgctgcccaggtggcccccatcaatgcagcagcaacaggaaaacccctatccacatcaggcccaacaaaagcccctgagaaacgtgagcgctctcacacgtgtgtctgtcgggcargcatgcaggcagggctgacctctaatggggaccagatgggctgtggccagtgggggtggggctcagcctccgggcagaggctttggtgggagggaggagttggagggactgggactgggaggaaggaggccctcactcacccctacccagcagggtgcaggggtccactgcagggccatcagagccactgcccctcccacggtcacccatgcagctgcctctctaggcctgaactctgtggctaggacacacatggctacctcagttttagtttgagtcccagggttatcccctaactgggcaagtctcttcacctctctgaacctgtttctttatctatgagctggggaatgtgatgctttccacatcaggttccttgtggagatgaartaagacaattgcatagtgcctggcataaagcacatacttgttggatgaatggctgtcaggggaattcctgggcccccagtcctgtattttccccctctgtgggtggtacacctcgtaccatatgctcctctgctctgagaaccagcctgctgcccacttggttgttgaagcctcagtggatttttcagcaggatgggggtaactacctgctttgggacactcaacttggatggaggcaggcgctgagtccagatgagcaggtgccatctcmtagaggctcagttctagctctctgctggtctggggagsacaggctgagtgtgcaaggactgcctgctccacctgacttgyttctccccatcacstggttctgagcataattgccactccttccagaaaaccctactaacccagaaggatagtaatragttactatccttcctccaccctgggctaggccaagtgcctcstgtgttcccacaagaggcctgagagaaggaggttctcctatcgccccacagggaaggtgggcctgaagttccagctggccctgtcccatcccactcggggatgtgtgccagggcaccttgtgctggtcctagggccaactgtggtttcctcctcctcgatggctccagctagctccaccccctccccaacacccccactcaggcagagggtgggagcagcatggggacaatgggccctgtgtctgtgttagcaaggactcagccctgcaggggtggggtgggggtgtttttgtcaccacccatggagcccatgaccttttaagtacaaaagtggggcagcagctgaggggctgccctggtgcttgtggaaactccctccttctccagtctgagccactggcagcctggtcttcaagggagtcaatgagaacaagtgtgggggcagggggagctgctctacagtcgccagcctcccaggcccaccggccctgagcctctcctggaagactgaaccccctccccaccacgtcatcctggcactgctacctctgagggaggctgggcctcatgcatgagcttgaggcccacaccctgctgctcccctctgcctggcctgtggcaaacctggctcatttgtctatggcaacatgtacccctacccctaaggtctggggtccatggggccatcagagcaagtttctgagacacagatgtggccatgaatccctgtaagaacagctgaggtccaggatagagaagcccaagagcctttctgtggccctgctccaccacctcatctctcacctctgtcctctcactccttccatcttgtcctcccttcccctggacctttcttttctctgaacttgtggtgcaagacctcacctctgggccacacttcctctccctatacccctttgcctgccttaccattcctagcccttcaggtcttggcttcaataccccttcctccaggaagcactccttgactccttgtctgagtcatgtgactactctgggctcctttggcccctggcttcccctagcccagaacttctaagtgcctttcccctgccagaatgggcactgcctggaaggtggtaagcatctggctccagggatgccagccaggcagggtagggaatagagcaagatgggattggggtagatagtgagggagaagctggggcacatccttccctctggttcagtgaagcctctccctgccttggccccttttctttcatgttgagagggtggacaaaggcaggcccaggaggcaatggtcccacatgctgggtcccatggttctggctccatcacagaccatcccagtctccttgcccaaactctgtggcccagagatggctctggatacctcagtcatccccacttggctactccttatgccatggcaaaacaaggccctagaayagcctgaccccctcactcttcttgaggacaggaccagagatatgacttctatcacacacagaaaggtgactgggcagacaggcctgcagcctaagttctgctagaagcaccacaggatggccaggagagaacttcaggcttggatagggcactcagaggagtgtcccatagcctgaggtcactccacagcctgagactgccaccaatctcccccgctgcaagcacagtgacttctttctggtctggcatcactgagcaccagagtgaactccagctggctgtgtgatagccgcaaaccaaggcctagcccagatcctggacatcataggcaccttggtccagaatccaggattgcccggagtagagacagagcccacaccaggtgctcatcatctgaggaacatgggatggggtatggatgtggtccagagaaaacttctgcttcagtctctgtcttgggtatctgagagccccagtgaggacattcagtgcaggtgaacctgcatgctggcccctctgccctgggctcactctgagccaggccaggccaggcagtgtctgtacatacctggatctcaggatcgatgtggatcctgtgtgcctgagccttgctgtcatcaggggcactgggccagctcctrccctcaggcctgtggcagaaattgtgatggtcagatatgtctcctaccacgcccaccatgcctgggagccaggatcaagaggggctgggctctgggctgtgccctgcaggtagaagaacaccactccagtgctttcccctgtaccacaatggtgactgttgtggcaatgagccacaactctagctgccatcctcctggggtagggctatatgcttctgtccccatcggctgcccaatccctctctagtctggttcctggagaggctgcaggagaagccctgtgtcttccctaatcttccaccctcttcgtggcctacagaagctcagctcaaagaggcccagcttatagcactgcaagccaggcctcacacattgaccagctagaagcctatccacgcatcctctgggcatctacagcctctggtggggtgtggggtcaggcgtcygtcggctctggggtaggtggaatggaggctctgaggggtgtgtctttcctcctgctgctgctgccggcagagtcatcactgagtctgcccagcccagatgggaaacaggccattaggaaattcctgcttcgccatagaaaccaaaagccaaacaccactcaggagggagaaaaacatcataaacctgccataagcagggcaggcaggccgagaggctacgtgcctaaggcccagccctgtcactcagtagccctgtgagaaggcaggccaggaaggggcatggaccctggactggcaggtgggtatgaggtgaggctggttagaccaaaggggaataatgccctccaactcaccccacgaagcctcctgaggcttctcaaggtctcattactgacctagcagcttgcccctgcctcttctgcccccttcagttgagggttttaataatctatctatgcctatggtccatactcactctgcacttcctcgcctctgcccattccttagtcccttggaggctacctctctactccaggcctttggtattagagctctgctgccccagggcaacaccagccccatagtccctgtctctagccccctcaaccaggctcccaagtgggtaccctaactcacagctctaactgtggcctctatctactcagaactcctctgggataaagctgggacatcttgtgtggctatttggccttcaacttccctgaagttctgcccagaagagcagtacaagcctgacgtctaaggtcgaagggcacaaagtacccagagccattaatgtggcccaatgcatcagatcagaatgaagggcttaatcatgtgtcaacccccatcccaggctgggctctttaaacaaaatgacaggcaaagggtaggctgtgcaaaggtaccttgggccacatgtgatggacaacagggactctatcagtggcctcagtgttggagttgatgtcagaaaggtcctggacctatagaacatgcccaggaagtgtgattttgcttggattgttggatgcctggctttgggctcaaagcaaaagaagcccagtggggaagctgggcctttgatacacttttcattctgtgggggagttggtggggggattagagctctctgtacacaagagggcagatagggaagctggtctggggtagaaccctgggagtgagagcacagggtagctcactccagccagctcaacaggctgatttactgcagagcccttgctgtgtgggtgtgtgtggtgggggcggggaggagtgtcgttgggggccaggcataggtcctggcatagcaggcaagatagggagcagagtcagaaagcttgcaggtgggcaagtgtccaggagaagaaatgttggctcagaaagtcaaggtggccctcatgtcttgatcccccagagtctgcatgtgtgagggggctgcagggcaggactcaggttttcactctgactgagcaggcctggtacatcatcactcaatgtccagagcgcaagatggtccatatttttggttgaggaagttatgggctcaagagattaaatcactttctggagcacagcatagttatctctccctctctctcttttatgggtaaaattatgagcataattctcaacccagctctgtaatagtagagaatgtgctctcatctgctccatggccagtgacattttggggctgaaatgctcagagtggaacaggtcagtggacctctggctccatccatgcctggtttggaacaaaggactggggaaggaaggaaggaaggaaggaaagaaggagggggacctccaccccaccaccctccgctgacatcatacactctgagaagctcctgactcaggccccctctgaggcactcctccccactactccactaccactagggctgcccttgttcagccacacagagtcaaggctggaggtgagtcaggggccaggatcccagccaagtggggaagcttcagaggtcactcatgggcagagcaatgctgacatttcccccatccagcctgtatctcagtctggaggagggtgatgaatgtgatccrttaatgggaaaggaaaccccgggctcatagaggtcatctgggcacctaaggctccagaggctggatgaggaccagctttgctgaactccaaagatggagcatcctcaccgtgtgccagggccaagcacaaacagggctgacctcacaggcctctccaccatgtttaaaggctccaagccagtggcttacctcccaccctgccagctcagaggcatggttagctgtgttgtggtttggggaggctttgcccacgtacttccacagggggtcatggaartcccctcagcagtgaacacggcagagctgataagttatgcccgacttctgtggatcaaggtgggcaggggagtggggagatcccactcagccaggcttargccaactgcttctcagagctgagtaaagacccaggacctgagcaaggctgggtccccccacccccacccccagtggaccttctatcccaggatcatttatggagcacagatgggcttggtaaccccctgtcctccccttcttgattggctgcaaagcattacacagtccttagtgggaacttttcccaaatccagatttaaccagggcagaggtgtgggccacggtggcgacagctgtggcagggcagctgaggggctggtaggagtagtcagcagccaagttaagggtctgtagtcttaggagagagccccaaaatcaaattttgctaccccactccctctctgtgtgactttaagcaccatctaacctttctgagcctcacttgtctcatctgtgaagtggggactatagtagcccttttttaagttggtaaatgagggttaaatgaggtgttgcacaagaaactactttgaaatggtcatcaagctggtcactcaggggaggggaaaggaatgaaacaaatgccccagaggctattcaaggtcttatttcagttgcctgcaacacttgccataagtgccccaacacacttctagtctaagttaaaaggggatttcttcccttcttaagctataactctaaacagtatctgccaggcccccatgaaagtgctactccttgggactgttcctggatggggcacccaggagctgaggcagagaggctgtgtgaagctgggctcacccaaaatgccagctgcccataactgcccacctcgtccttccatcctcccagcccagcccacctgtgcatacctgctcacagacagtgtgaggtgatcgtggcagcccttgatgcggttctgtgcctccaggtgtgtcatgagctctgtgctctcaccattgatggcctggatcaggtctcctgggcacagggcagccaatgcagccttgctgccagcatggacctgcgagcagacaagccagatggctgggcacagtcatgatatggtcttgctgcaagctgtgccctaggcctcctccaacctcagaacctagccagtgtggcctgctaccagcatggcctgtggatgggcaagccgagtggctggttgaggtccccatgtagcctggctgcagccttgctggaaacacctccaactccagcacctggaggcctggcagggcatgaggatatacragaagggcttcctcagggctgggacaaatggatgttgttcttgcagcctgcgtatgtgcccaaggacatgcaggggacacagagacacatggagacataggtgctcacagatacatacacagcatggacatatcacagataccctacacagacaaggccccaaccagacagactacacaccttgacctaatattcaaacccttagtgaccttgccttcctacttgcttgatttcaactctcatccccacctccacacccacactctgtccagaccatgtgaatgtctatggggtgctcacaggcaccatatatcactcacctctacacttctgcaaaagctgctccctccacctggaacattcctttgactcccacatcctcatccttcagatctcagcatagaggccacttcctctgggagcctctctgggatctcactacccagtgtgctcccatgaccaccttttccccctacactgttcatgttaatacttcattataattaaaatgggaaggtctgaacatcacctccctgagcaagtccagggccatccagttccagctgacagcctgcgtttgggggtcagaattctacctctacttcccctgcaggacaggaactcaggctacctcagtgccactattgacccctcggggtcaagcagtgttcacaccyggaagctcttacaatgctggtcaactgaagaaggctagaatggggggtggagttagactcacagagatatctaagtaagcaactcaggggaatccaggccatggagcacccctcaccctgccttgaccccaacatagcctttagaaatatatttcttacccagcctctccagccagtgcccagctggttcaaaagctgccagtgaccccattcttttgggtgggagctcctactggtgggaactcctggaagcccagctaggctcagttcagccaggtctcagtagtgagtggacaaagctgaggtgctggcagctccttggctggaggcctggtgttggcactgcccaagctgacctgccctgaagtaggctgcctcaaggaaacgttcttctgaagcatgacaccctcagccaactagcccatcattaatgttcacttgtagggcctgggcacctgtgcaagcctgtcatcctgggggagacacccacttggcaccatcccaccctcccctcaaggccatcctctgcctcctccccttcatggatacctgccytgtgccagggcctgggctctatgctttacccataactagctcacagcaacccctcaaccacctggtgaggcagaggctgttctcatccctattttacagatgaagagaaagaagcttgggggagggatgccatgccccagtccccacactggagaggagtctttcttcagggggcggctaactgcggcaggatgactcagccagcacaaggggtacattcaggcttctgtgggcggaggaagtttcttgaaagcagtggtggctgggatgctgccagctctattgagctaggggagttctggtcagagagggcgtgaggccaagaaattgtgactctcccagtcacctttacatgcattatctcattaatcctgaaggcaagcccatttcctagatcaggaaacggaggtccagagargtacagaaggatagttaattgataaaagactgaatcaagatttcaatccaggccacctgattccaaatttaaaamtatgctcttaacacctgcatttttcttccaaagggggtaagggaaaagagagtatctgagggagagatagtgttccaggcagaaggaccagcatgtataatggcatatctggagagaaagaagaaggaaggttgtatggccggagcatcatgagtgaggggagagtgggagagatgaagtcagagaagaggcagggatcagatattgcagagtcttgtacacccgggtgggaagctggcatttctcctgggtggctgggaaccatggagggctctaagcgggaagtcacaggacagagtggaattcaggccgatccgtctagctcctaagcacaggataaacagaaagaaggaacagagacaggaacagtgaagtcaggtgggcggtgagggcatgaatcagccccttaccggtagtggctgcattcccagcccctgctccacccagcctagatgtggtgggctgggagtccaagtcagaaccaggtgccacattgtcctacacagtcacagcaaactgcagactgcctggattcctcctgtctccactctgcttctctrggttgattacattagcctctctgtgcctgggtctccatctatgtaaggccagagggagtccttacttctaaaggctgttgtaaggactatttgagaaaaacagggcatgtaaagcccccacaggaggctgggcataaggtggtgctcactacagggactggagggagctgttaccaacacccattagggtagggcctggcacaccctggatgcttggccaaggccagccatcattatagcttgtggggaaggagccccggatgatgttcttgggactcctggaggcttcatgggctgagattgcaagcccccagccctgccgggcygatagcctcctccctgtctgtgtgaggctgtccctccctaccaggtcccgcgtaggggaggtcctggaagcaagggaggggctggatcttgagccccactggtgaagacactcccacatatcttcagtccctgtagacctgccccagaggtacctgctaggcaagctgtggcctgtgcctccccagcgctgtaaatctccccagatcccacccaaacccaacctcagccatcctggctccttgggcctgagctgctgccgcgtgactttgggggacaaaggaggctcttcctggcaaaccttctcccagactgcctgcctggggcctgcatccccagtcagctccaaacaaggctgttgctgctgctgctgccgcagccgcagctgtgacgtgtggaggcctttcctcggagggcaggcagccgcgtgggcaacagatgtctcagctccctgccgcctgcagccgtcagccgccgccactgagcctgtcagcggcctcacgcccagggtgcctggccagcccgcttagtgtccccaccagccccctcagcggacacacagcatgacacacacaagcagacacaggcttgcgtacacacacacacacacacacacacacacacagcaggaatcctataggaaagaggagatgaaaggctctgggatgtgttgaaggcccacctcactcggccccagggacctggcagtgagggcagatgtgggaagcctcctaggacagctgggcctgcctgtcaccctggcccccagaaacgggattccatgattccacgctccacctggtgcccaccccctcccaagaactggacagaagtctcttaaagcccagccggcttggcccagcccccatggcaagaggtggcagtagggtgggggaaggtgcttctctgtgcctctgacacaggcccccaaagacaagatcagcctgtgtgggagcaagggatggccgtcagatggtttcaggttatctcctctgctccttccagactgagagccgccaagggcagggcctgggttctctcctcttctgtcccttaggctggggacccccaagggcagggtctgagtcctctcttttggccctccagacacgaggatgtcgaggctgggccaggatcctgtctcccctagacaggcaccccctmgaacagggcctgagtcacctcctccactcctctatcctcagactagccacgctccagggctgtgccggctccttttccttctctgtgggcaaggcagggccctgggaaacttgaggaacrggcctgaggctgtcctggcccccggctttgtgtcatcttgtggggaggggtctcacaacctcacagttaagtctccctttcccctggaagccaaaattcctcctggtcacttccccttagggtgactgaggtcgtgaatgagagactgactcacgcccaaagtgggaagtggatggacctctgtcttctcagattcagcgaggaccccagacctccctgggtcaccaagctctgccggcagggacccctgataggggaaggggggctctaaatcattttgccccagatcttcaggcagggggtgagtctgaagagtttctgggcctctgtagagctgtctagacccctggcccatctccgcgggtccttcccgggtccacagtggctcccccagatgaggccagcggggaggcgggtgcgtgaactcttgggagattcttcgcgggatcgggcagacaggcccagcgtgggaggagggcggctggggctgcctgcctctgcctggaagccgcctctacagcatgcggggcgcccaggccaaccctccgccttcaagcctcggatacacaggggatctgggtcccgggcggaccgcgagaacccggtctcagacatgggaccgccctgccgccacgcagccgccagactcacccgtgagatggtgaggggcgcgctgaagtcccggccgcccaccaggcggaagccccagggcgaaggcccgcgcagggtcacggaatggggcatcgcgggctggagccgcagccggagcctgagccggactctgaggaggagccgccgccgccgcmgccgccgccgccgcctggacgccgcgccccgcccccggcccgcccgcccctgtccccactcggcccagcccccgcccccgctccctgtgcgcctggattggccccgcggccagcccgaccctcccacttcggggggctctgaggacccgccctcagccccggctgccggcaacccggcacccccactcagctctcagagatccccgcgttcggacggccccgacggcctggatcctgctcgggccttggatctgcaggccgcggacccaaacccagctgtcgacaccggccctttgaagtcgcttttaggggcggtgctccagcccgaggagggatggagggcccacttgggggatggggctgccccagctcagatacctcctcatgggcccgactggcacacctgcggcccatcctgccgtgtgaggagccctctgaaccaagaaccctatgaaccaggggcttgcgcagcactgggccggggacgcagacccaaracgacagcaggcagcgccgagcgtgggagtggacacagaaaggtcctcagactagtttgtggaggccagtaaggcttcctggaagaggtggtccctgacttgtatctggaagcaaggtgtccctgcttccccagaacattcaggccttctcttgctgcttgcaggctcctcgcaggccacctccctgtctgcacagccccctcccctcgtcctttgccaggagatttgtttccccaggtctcctgagaaagtagcagctggagcggctggggtcgtggctgtgcagtgtaaagggaagaaatatatgcagcgcttcactttgggcccttttctctccaaggtcttctctccattcccaaccattatcctccggggatgtacttgaacagccaatgcagatgccatggcaccaccaacctccctctggttctctcggcacttctatctggctacatcagggagacaccttttacttttccagactctgtggaggtctctcatttagcccaaatccttaaccttatgtgtccttttagtcaagctgtgataaggaccctgctcttgggctcctcacaggtggtgggatgaaatgtgtccactgggtctctgacaacccgcaaagaggagaactgcttgagaagcacaaacctagggcagtccaaggaagggaggggcccttcagagtagaatgtgggtgcctctgtaggaggcaagatgctgctatctgttcagctgggagagaaacaagtggtgtgtggtagcggtgtttatatgggagtgtatttggggtgtgtgtgtgkgggggggtgcggtgtctgaatccattagagcaccagccattgggctgttctccatcactttgtggtggaggaggtttctgctcagccccttgcagacttggatcccaagtgaagaaaggtggaagggccagcaggagagctggtcactgcattgtctctctgaggtctgtaggccagaagctccccaggacttagaccctactaaatggggtagagagtaaggggcagccatcacttatcactggctgtcctgagggtttggtgtacagcatggcttgtggtcagaggcctgtcagctgggctccaagagtcctagtgaatgtaaacagtgcagaccttttctggggggaagggatcctcaagggtctgtggaagcttccacccaatgtatcccaaagtgaattcctgaaactcctcttcatacattgcttgtttcccccgatttcacatcccaaagactgcctacactccttgcctccatcctgaaattccttcattacccgtttacttctgtccgggggaatgtgaagtggtcctcctgaatatgaccttcctggcccctgagtctctgggcagtgtaatccatctccaaaggcttctatcacaagtttggaggtggaggtggggtggggactctggatgaattttttagaatctggtccataaacttccccatttcattgggcagcatctggacagattggaatgatgcaggatccgggtccaggccagtcattccctcacatgagctcatgttgacatccctgacttaagagaacatcagaggcttacttctgastgygccttcccacaggggagatgccaggtcaggttstgtacctggagtttgggggtggcccttcttaggggccatgctgtaaacccactcataaggtaccctgagttmtaggcagcaggtcagacaagctgcagattmtatggcttctccagctctcccgaaagttctttaagraagccctcagatttccttttcccctgtaatggccttggtccttggagattgctgtattgctgagascctatcatgctggaataccaagtcataaggcagtcacagggtctggaagccctcttcagggtggggatgtgtggtggccaggtcacacatcacccctgccmtagtggccttcacgtatttactgcacacccatcaggtgtctgtgctgctgggaataatcagactgcttatttcatgcattcttcttctctgcataagtacgtattgagtactcagggatgggtccaggtatcatccataagggcagaggctgtgtctgtcttatttatttgtgtctctccagcaccccgcagagaacttggcacacacaaggcattaaaaaacatttgctattaacaacaccacabttacasgaattattatcttagcttaccctttggacatgacccagagggacgcagggagggcataagggggcttaggaaggtgaagaattctgcttctgttgccttcgaggccacacccagtggctcagggcacgatgcccaggccttctgtatgcagccaggtctgtccaaggtcaggagaagtcactgtgctctttcctcaatgggcaggcagggctggcaggctccagcaggagcagacacccttgggaatgctgttgggcctgagcctagaataagagggaaggattgggacaagaacaacctcaggctaagggtgaggtcaacctggaggacaatccaggagagtgcccagaattgatgtagccctgagtggggaggtgcggtggagctgatgaggcagcccatatttgaggataccttcccgtgaggccctgggggctagccagagagctcagctgctgaccygctcctccctggcctggtggcctcaggtctctaggtagagtctgctccattctggctcagctcctggaggccaagacatctctccttcaaggcccagccccstctccccagccaagagcctggattccaaggggatctaaagccttgcttgggagttccatcttcctggaatgcccagtccacagtactgaccactccagggcctcagcaaacagccagagagaactttagatgccttcatttcagtgtgacctgtctggtccagctccacccagatgtctgctctcttagaagcctgctggtcaaggccaggaactcgaatggtggagaggaagcagtctgtggtgggcacagctggatagagggggcagcgtgggtctcctgcagggctagaactgcgccttagagtgacagggagttaaggcaggcccactgtaggcaggggtcaagggctctgcaaggggtagaggcagccacaggcatgggcaccaggcaacatccaaaaggaaggtctgagacagtayagcctgtgaggtgggctgggggctgatgcccagcatatcctggaaggacaggactcagtcaggaggcaacaaaactggtcctggagccgtggttggttcagcagaacacacaggggagggcgtgcctgtggcaaagggcgtttcccagctctagttttgtgccattcaatccctcaacaaacacttattgagtgcctgctctatgtccagcccagacctggtcaactaaccttggagtgtggtggggattctccaagctgccacacctctctaggggctgagatgctggaggctccagagggggtcagtctctgaggatccaaacagggacaaagctggctctgccaactgggacccagttactggccctgagccagattccagggcggacacaagagcagaaccaactctcttcaggaaactgagcctgggggaggtgtgtgaccaccacacgctcacacagtttcaagtggtaggtctggggttttagaccctgtgttggtgcctttgtgccatgtgccttgccccagggacagatgtgtctcagctggacctgcagtccccatcagcacccctgtcagacctgctctttctctgttttcacagagaaaaccagtctgctctgggacccaacaaaggggttgccaggcagcagggcggggacaggtttacctagctgggcccagagaggccctggccctgaggcctgggtgtagaaaggtgttgggaggagtggcatctcacacggtgggggtggggggggtgggagggggaaggcagctgacaggtgggagagccagaggtggctcagcgcagccccagcagggaagtgacagaacaggctgtttgtggtggcagcgaggcccatgtgatggagccttgtgcaactggggcctcaggaaggcagcttgcaaaagcatcacagcctcacctctgcctcaaggagacccccatcctttcacccctcccacttctcattcaggccagaggattcgggcagcctgccggccatcccttagtctcccccagcatcagatgtcccaagtctacctgtagtccataaatagaggcccaacccaggtgtcttcaggtttccagtttctcctgacagctggagccttcccttagtcttgcctcttggtgtctgtgaggagaaggtgcctccatttacaaatcagctcctccaggcagagcagcagagggattgcagagcaactgtaccatgtgctcattctacgccctggacctagaatgtcttggccgtggcctgaccatcactgtgcctggacaaaagcaggggtgtaaaaacctttccttctcagcccgagagagagagacgctgctatraggtgcaggtaaggcttgagcaaaagtgcagggttgacaagaaggagacggacatacatgcagcccagaaattcagttactggggctctccagacatactctgtcactcatctgtcagctggggcctggactcatggcccagctttagccctgccccagcgcacacatccacagacactcaaatttagcagtgrcctggccaggactgtctggtctctggcctgaggcccctccttctcttcttgaccactagaactgacatccagggctactcagaaggcaggagaggcccatgctacttccatatttcttcctcccatccttcttttttttttttttyaatagcagctagaacgagcttggagcactttcatatttctacgttsccaataaaataaaaaaggaagaaatgtgaaaatagtgtttcaagaattatggcatttgttacttctgctttgtttatttattcatcagatatttttgagagcctcctatgtgtcaggcactgttttaggcctcagtgttaaactattaagttttatttatttatttacttatttatttattgttattatcttttaaaaagagacggggtctcactatgttgtccaggctggtctcaaactcctgggctcaagcaatccaaccaccttggcctcccaaaatgctgggattacaggcatgagccactgtgccaggccttaagtctttataatacatatttaaaatggatagcctcatttggaaataacttcaaagatttaaattccagtcttcctggttcttcgtctcaggagggacccccataactcctgatgcccatgattttctcactggtatagattagacctctgtctcttgatcctgaggggtcctgggggctgtgattcakattggcagaggtggtgaagctctcctcaggagtctggctagcataggcctgtcgctagcctatcctccctgccccatcctttctatctcttacgattggccctctcccctgcagtgccagctcctttagtcactgattggtcttggtgaagtgccctgccccgtggtgcccagcactgcccagtggtgactgagtcacaggctggcggggactgttcaggctgacctcacctccaggcctggccataggacgccagctgtggccactgggtatgagcctggccgcctgtgttgctgggagagtcaggcagagccatgtcgccragtccagtagctgccagctggccgagaggtctgggaatccaggtgcagggggccatagggattaaartcggaagagccagatccaggcctgtgagggtgaagctgggctgaggttgctggaggctcttgagagaatggattggagcagggcccatgagtcagcctcatgtcctgggtggctattttcttggcttctaagaaaatcaaaattctttctcacttcccctcccaagactaggtccatagctgtgtagattcaggatcagcagtgtggagttggaggcagagctttcattgggagtgggactgaaatcctcacaccctgcatctctcatacccacccgcaatggtaagagcattcacaggacttgagcttccagcaagaggatgcctgatcaaattgtttgccccctgtgaaatcaccatattaatgggaagataggcttgcttaggaacaacggagtytgtgcctctcctgcaggagaaaccaggagctctaagagaatgtataatgagaacttctatgtgtggakagttaaacaagaagctgtctcatcccagggaagatgaasagaaaatggcggatctgggcttgaagtgcacacagtgttggaaaaggccccacctaaggctctaggaccagcagtcccygagaagtagctgtgtgtaggattaagacaagctgactgcggagagctgtgacattgggcattcaagcatgaagcattgttggcccagagagggtgcacaagcattctccctcagagaaccatggtgttccrgagccagagagagatggagagcttccacaatccttgtgaagatctgttatcctaacaccaatatatcccctttaagaaaatggtggccccctgtaaattgtcaatatagcaaattggctcccataatatattgaaacactattaccaccttggggattctttttcaaattacaagcttgatttaatataaaacgtaatgattaatacattagattaaaagaagaaaggaatcttgtaattatctcaaaaggcattgacaaaattcatcagccattcacacgataaaagttagaaaaccatgaagagaggaaatgttcttmacattttaaagaacagatataaaaaaccaaaagccagcattagatttaacagtctagraagttctattaatgggagaatccaatgtcctcttcactactgttgttcagtgttgctctggaagtcctaaccaggacaatagggtgaaaagaagaaataagggagaagtaaaggaagtaagtaatagagtcaaaatgatcattatttgcagatattatgattttcctttcataatatccaagagaatcaattgaaaaatgattatgaccagtaggagaatccagtaggagggagcagagtagaataaattaatatatgtatatagattttaatagcttttaagagtgctaagtcacaactgattggaaaatgtgatgaaaacaatttaccattcacgataatggtgaaacattaaaaatatctagaaatgaattttgagtacatcaaaagcctataaacttttttcttttttatttcctttttcttatcctagtggtggtgagaacaaagggcctatgaactttgatctaggatagatttaaaagaagacaaaaggtatgcaggcatatgtcatgtttctakaaaaatcaatatttttaatttattagtaaattcaatgcaattccaaacaaaatttgtttgggtgggaggaattgacaagatgattctaaggatcaactgaaaagtaagtatgaaaaaaacccacaaatattggattaagagactaataaagtaagatttgccctataagtatcaaagtatgcaatagagctaaaataattaagaatgtgatagcagcataggaaaagacgaatatgttagtggaacaaaagagagtccatagcatgagataaagaaaacattttaattcagggaataaaaggtagtttactcaataactcatgtkggggccatttactattatgcataaaaaataaggctataattctatatgctatataatttcccacattataaagtaaatcccaaatggattcatgatctatatattttaattttcccaatgtgaatgcttttataaactactcatatgctttaccagaaatgactggtaaaaaaatatatagattaatatttttataatcatggtgctacggtttgaatgtgtcccccagagttcatgtgttggaaacttaatctacaatgcaacagtgttgagaggtgggctcttacgaggtgataaggtcatgagggctctgcccccaatggattaatgccaacagaggtgggtttgttattgtgggaatgtgtccttgtgaaggaggagctcggtccccctttgtctctctcaccctctagccttctgccatggaataatgcagcaagaaggcccttgaaagatgctggcaccttgatattggacttctcagcttccagaattttgagaaataaatttcttttctttataaattactcagctattggtattctgttatagtaacttgaagcagactaagacttgaggtgagaaacatctctttcgtgaagataaatacttgaaatatgttttcctgttacatatagatttcaaaaatcagagaaatatgctgcaaactgttggtagtttttgtttctggggatggtattttgggacatttactttttctgagttatrtatttgtacagtgttttaatttcatataaataaattttactgtttgtaattagaaaaatgaagataataaaaaggaaaataaagacaacagaaggacaaatactgcttcttatgtaagaaccttacaataatacacttccatttacttctcccttcttttttgctaatgttgttgtgcgtttacctctgtatttgctataaactccataataaatamtcattatttttgctttaaacagtcaactgtcttttaagtaatttraaaaacaagaaaacctattttctatttacttgttaggtttactggtagcacttgttcttttgtttagagctgaatttccaacaggtatcaatgagccacctcagcagagaaatggcttatttcccttcagccttaagaacttcctttaggccatgtgcggtggctcatgcctgtaattctagcactttgggaagccgagacagacggattgcctgagctcaggagttccagaccagcctaggcaacaacagtgaaaccctgtctctactaaaatacaaaaaattagccgggcatggtggcgtgcgcctgtagccccagctactcaggtggctggggcaagagaatcgcttgaacccaggaggcagaggttgcagtgagctgagatcgcaccactgcactccagcctaggaaacagagtgagactccgtctctggaaaaaaaaaaaagaaagaaaaaaaagaacttcctttaacatttccggtagtacagacggactggtgatgaattctgtcagcatttttttaagatcccgaagtatttttatttttcattccccaccctgtcccccaacctttttttgttttttttttttttttttttggagacagagccttgctctatcccccaggctggagtgcagtggcacgatcttggctcactacaacctctgactcccgagttcaggtgattttcatgcctcagcctccctagtagctgggattacagacacctgccaccacgcccagctaatttttgtatttttagtagagacggggttttgtcatgttggccagacttgtctggaactcctgacctcagctgttccatccgcctcaggctcccaaagggctgagattacaggtgtgagccaccgtgcccagcctctcattccycttttaaagataacttctctggatatagaatactaggttgcttttttttctcatagattatttaatatttaatatataattcctataattttattgttttctgtcttgcattactcctgstaagaaataaatggtgattctaatcgttgtttcccttatgtaatgtgcctatattcttttatcacttctaagatgttctatttggttttaagattttgactatgatgttcctagatgtagttcccttgtttttatcttctttggagttttaaaaccccagcttcttgggatggtgtattaataattttttaaatcaaatatagaatttcatttaccatttaaaagaattttttttgccccaatctctttctcccctttccttctgggactccaattttatgtatatattagattacatgatactgtttcaaggtcactttgttgaggctgtgtttgtatttttcagtccttttacttttagatgttttccatagtcttgacttcaagttcattgatcttttcatttgtagcatccagtctactcataagtttatctagtacattttccattttgtatattgtatttttcaattctagaattttcattcagctccttttttatagttttcatttctctgctgagatagctcatctgttcatttattatctctatcttgtaatttaaacttctttaacatatttataatagctatttaaagtcctcatctgctagttccaatatctgtgttacctctggatctatttctgttgattattttttgtcctggttatgaatcatattttcctgcttcttcatatgtttagtaatgtttgactgtatattaggaattgtgaatacttcattgttaagagtttggatcatrtttaaagagtgttgagtttgttttattagatagtaaattcactagaggctcaatttgagcctgaggcttggttttaggctttattatggcaggtctaagatactgcgtattacaggcacagagtagccctattcttaaagcgtggactttcttgggttttcattgagtgctcagggtgttcaacaaagtcttttcaccttgttgatcagaacagatctcagaatcatgagccctctagaatccccacttagttcttagacccagagaagttttttttgtgtgttttttgtttgtttgtttgtttggttgttgtttttaatccactaggccttatggaatcttgctctgcatgtgaggcttagacaaagcctcaggagcacctctgtatagctttccagagctccttctttgtgtagctccttcttctttgataccttatcccacaaatttcagccacctcagcgtctgctatctatgatctttgtctccttcacatgatgagaccattgttctctctctctctctctctttggagacagggtctcactctgttgcccaggctggaatgcagtggcacgattatggctcactgcagcctcaacctcctggcctcaagtgatccttctgcctaagcctctggagtaactggtactacaagtgtgcaccacaatgcctggctaattttttaacttttgtagagacagggtattgctatgttgcccaagctggtctcaaactcctggcctcaagggatcctcccacctcagcctcccaaagtgctaggattacagacatgagccactgtgcctggtgccattgctttctgggcaccacttccttatgccatggtttggaaagtatcctaggcaaagcactttcccttttgtttcccttctctcaaggacaaaggctatttgatgttcaatgcctataatcactggctataaatatttcgagttttatggttgtttacagtggggagggaagtttattaccaacttatcagttatggttggaacctaaggaaagtttgaaaactaaaagaagaaagaaaaggaaaagaaaatagggacccttaattcaagatgtggatctgatgtcataaatgtctaagagtctgagcttcatctcaaagcagctgggccagttgagcataccctgctgtagttctttctaacctggcatcagaattggactgaataaaatgtacagttctggccactatagcaggttgtgtcagacttatccttctgctgaaaacaactataaaagttggacaaaatgtataaaacaactatttgaaggcatttgagaacaaccaatacagctaagaattgaggagttgtgatcctggagaaaagggaataatgtgtagtgagttccacatttacctttgctttttccctaggggcatttcacacattgttacttgagggaatagggaccargcagaaagcatcagtcttaccagactgaggatacaaakgtcagagttcagggctgcygaagaagatggaaattaagaaggaaaattccagaaggtaggaaagaagagagaaggagcccaataattgcatgcaaattcctccaactttattggcttttttttgagacagggtcttgctttgttgcccaggctggagtgtagtggtgtgatcttggctcactgcagcctccctcaacctcctggattcaagccatccttccacgtcagcctcccaagtagctgggactacaggcacatgcaatcatgcctggctgactttgcttatttttttgtggagatgaggtctcactatgttgcccaggctgggcttgaactcctgggctcaagcaatactccagcctgggtctcctaaagtgttgggattacaggcatgaatcaccatgcccaccctattggcctacttttagcctatcaggctaaagaactgagcaaattgtagtagtcttaaagtgttggggagacaaattggaattcaacttctatcaaggtagagaggccttggtaaatgcgtaggtgttctgctaagtcccagaagggtcacacactargagagagggtcacatcctaggaataagagatatgtcctaggacaaaaaagaaccacaccagccaaamcatgacataaaccraagccttgacaggagtagggtatttatttggtactctgccttccagaagtcaacttaattctctcttyctggatgaatacaacatcacccagagactttccaacttttcatccaaaatgtgtgtcatctaatagagaagtatgagacatgctaaaaaacaaaacaaaacacaaacaaaaaaacaggkccaaatgactaaaaatcaagagaaaaggcagacaatggaaatagacccacaggtgtttcagaaatgagagacttccaataattatgatgaaaatgttcaagaaaatagagggaaagwwaaaaaaaaaaaaagatgaaaagctagagaatttaaatatagaattgccagaatactgataaagatagcagataggaggcaggactagcttgcagctcctgctcagacaaacagagcagtgtgtggagactcacatcctgaacttttgctccaagaactactgcaggaacataccaggaaagccaagagaatccacagaccctttgaaggaactggatcactactgcaggctcctcgagatgcaaaaaaactgtgagtctgcatgttttctcagcagggagggtcatggtctgggacaagttctcagccctgggcactggctacctggaaatagactcagtactgttgtggggccatggtgggagtgagattggcctttaggactgtgggttgcacaggagcagggtgaggcctgtgactgccagctttctcccacttccctggcaaacctgtatgactcagcagaggcagccacaatcacccccgggagtataactccatcggactgggaacaacacccctatcccccacagcagctgcagcaagccctggccaaagagaggctgagctctgaaatgcatatccctgcccccacctgatggtctttctctacccaccctggtagccaaagacaaaggtcataatctcttgggagctctatggccctgcccaccgtcttaaccaggtgtccctagggcaaatttgcattctccttataggactgcagcagatgtgctcttgaaagcaccacctcctgcatggaggccaaccaacacaaaaccaagtaccctcacagagtccatttcactcccctgctacctccacaggagcaggtgctggtatccatggctgcaatacctgaagatggatcatatcacaggactctgcagacactccccagtaccagcctgtagcccagtagctcagctaggtggctagacccagaagagcaaaaacaatcwctacarttcagctctcaggaagccccattcctaggggaagggggagaacaccacatcaagggaacaccccatgggacaaaataatctaaacaacagcccttgaattccagacctgccctctgacatagtctacctaaatgagaaagaaccagaaaaacaattccagtaatatgacaaaacaaggttctttaacacccccaaaagatcataccagctcaccagcaatggatccaaaccaagacaaaatctctgaattgccagaaaaagaattcagaaggtcgattattaaattaatcaaggaggtaccagagaaaagtgaagtcctacttaaataaatcaaaaacatsatacaggatttgaaaggaatagtgtcaatagggatggtagcagttcttctttgaatgtctgatagaattcaacagtgaatccacctggtcatggattttttgttgttgttggcaattttttttttttttttttttttaagagatggagtctcgctctgtcacccaggctggagtgcagtggtatgaccttggctcgctgcaacctccgcctcccaggttcaagcaattctcctgcctcagcctcccgagtagctgggactataggcgcccgccaccatgcccagcgaatttcttttgtattttagtagagacggggtttcaccatgttgcccaggctggtctygaactcctgagctcaggcaatccgcccaccttggcttcccaaagtgctaggattataggcgtgagccaccgtgcccagccagcaatttttaaaattaccatttaaatctcactgcttgttatcggtctgttgagagattctatatcttcctagtttaatctaggagggttgtatatttccaggaacttaaccatctcctctaggttttctagtttatgcatgtaaggtcttcatagtagccttgaataatcttttgtatttctgtggtattgaagtggcttcattgtctggggaaataccctaggttcgtcttgcactgagaagattaacaacacagacacacacacgtgaagcaggttaaggaggggaargtttaatagacaaaaaagaagagagagtgagctttytcatacagagaaagcagggcaggtgggatgcgatccattttatagagaggcttgaggaggcggtgtttgatttacacaggggccaggggattggtttgaccaggtgtaaatggttacatagcccgagaagaaattggccatcccaccttaatcttttattatgtaaatgtgacctctacctgtccggtgccatttgaaccttgattcctcattgtaccacacataaaattaatttaagatggatcatagactgaactatgaaacaatcaagcttctaaaggaaaccatggaagcatagtttcatgacctctgggtagggaaacatttcttaaatgggacatagaaagcactarccaaaatataaaagattaatatgttggatttgtaagaattaagaacttttatttatcaaaagatcctattaggagaatgaacaagccaaagcacagattgagagggaatatttgcaatacatatatccaacaacaaactcatatggagaaaatatatagacttctacaattcagtgaggaaaatgcagaaatcccaataggaaaatggacaaggacttgaacagtcatgtcacaagaaataactaataaacacctaaaaagatgctcaatatcaccagggaaatgttcttttaaattgcaatgagatattgctacacacccaccaaaatgactgaaattggaaaagctaacaatarcaaatgttgacaaagatatgaagcaactggaactctcattcattgccattgggaatgtaattttgttcatccatttagaaaaatggtaatatctacaatagctcaatatatgcatgtcttatgacctaggaatttcactcctggatttttattatatttaaataagtgcttgtgcccaccaaaagacatgtgcaaacayatacaaaacagttttatttaacatgactaaaaacaacccaatgttcatcaacaaaaatggataaattgtgttatattcaaacaatggaataccacatagcaatgaaaaagaatgaggaactattacaaacaagatagatggatatcacaaccataatgtggagtataagaagccgacccgaaagaayatatattgtataacttcacttttataaagttcaaratctgacaaaactaatcaaaagtgaacaaagaaaaaatagtgcttaactttgggagagtttactgactatgaaaaggtacatggaagccctctggtattctggaaatagtctatatttttatgtgggaggtaattatgtgaatttatatgtaagcaaaacacattgagctgtatattcagacatgtttagtttactgtatgttaactgtatcttaataagtaagtttttaaacaaaagcacactggctgcccatgcctctctacccctgctagtggggattcgtgaggcccgaagagggagatactattaatagctttccagtgtatagaagatgggctcatattcgcacccctagtttatggagcagggcataccaattgcaggtcacacatggaacccattcatgcattccttcttcctctctctgcatgccactattggttccccaaatcaaagagggcttccagggtgacctgtgtgtttggccttgggggcttgtgacaataaactggggagatgcattagtgtgctaaggctgccataacaaaatatcacagcctgagtggcttaaacaatagaaattcattttctcatagttctggaggccggaagttcaagattaaggtgtcatcagggtgggttcctggtgaggcctctcttcctggcctgtagatagatggccaccttcttgctatgtcctcacatggcctcatctttgtgcaaatgtggagagatacaactctcttgtctcttcctcttcttacaaggacaccagtcctattcaagtaagtcttcacccctgcracctcacttagyctttatcagctttattaacctttttataggtcttatctccaaatgcagtcacatttaggtaagggcttcaacatatgaattttgaggctatgcaattcaatccacagaaggagctgatttactttttacacccatgtcaatttggccccctccaccccactgatctcagagcatttcctgggggtcacctcagtgtgttctgcaacaatcctctgcctctgagccagactgacagctctgccctgccacccattgctacttctgctgtccatggctctgggaggcctctgctctgctggaagtatcatctgtgtttgtcaccactggggagagatgctgtttactgttgatacccccagcccagtcccaatggtggtggggtgtatactctctcattaggcacttccctctacttcctaaacacagcaaggcccagagagggatgaggccctgcctggccaccgtaggtctccgtgggaatgagccattccctctcccaggctttgctcattctatctcctctgctgcaataccattctcccagacctccaacacttcccctggctgactatgcagggagayccacacctcatcctcctacctgaccactcggcaagtgagtctccccttctgtagtctccctcagcctctgcgattcaccgtcaatttcttcatctgtgcctcctctccccccataaaacaaaacaaacaaacaaacaaacaaaaaacaacatgagctccatgcaggcagggtgtttttctgactcatctctgtgtccctgggtacccaggactggacacaagggaggtgtcaggggatgtctgttgactgactgaatgtgagtaagtgagggtgtagagggttcctgaagccctaggctgagtgaccaagtatggaaaccctgcttgccacacttcagcatgaccaaggcagctggtcttctccttcaaaggcagtgctgaggcttgacaggtcatagagccaggccttcatgtctaggctgcagacagcttcctcaaagtccatctcctcttccctactgatcttttcctgctactccccattggttgaacccaaccagaagctgcagggcaggtgaacctgttgatgctatccatataggtcagcagtcagggcgcagagcaggggaaagaggagacaggagaggagatctggaagggyaagcagatgacatctgtcaagtgttaggtaacacttggtacagggagagtgctccataaattagttgtccaatcacagaagcatcccagagcatcatagaaacccagatgaggactgcccatcctgcttctctggctcttctcctccaggagctcctctccacagagccaggatattctgggtatgttcagagttcaaggtctccccatctcctttcctaacttcactgcattactagtccttggtgtttccttagggctactggctcctatggcctgaggcttccacagcctgaggcttcccaaggctacaagtcaacttagctgaccatgaaggcccctgatcactatgggctgaggaaaggatytggggtcttcccaatatcctccctgcctcctcagccagtggaggtcccagcattggagtcattccccagggcctggaaaacatctctcccttcccgttgctcatgattatgcaggcctagtcacaggtctcagctaaaccttggcaggttggaaggatggggcaccaagtggaggggctttttgagcaaggctggggctgctcctttgagtgagccctgttgagctccatgcaccctctggtggccawcctcatttttgcaactacagctctggacaagaaggaagcagctcccctaaaaagattctcccagaaggcctcacacacctttgccctgggacaaaaatagctgttggtgccccaggagagagtgcagagaaaattccagawcttgatgagggcagggtgtcaacctggcctacagctgttgggtgaccactggtgtcaacctggcctacagctgttgggtgaccactggggtgagagggcagtacttgcccccaaaattgcagccaccaatgacagcatctaacgacccagccagtttgaggaagccatctttccaccttcaccaccttgatcattcactcttcagccaagaagatgtactgtccaagccatcccttctcccatgggctctgatttctacagatgatagaggtagacatcttcctgattccaagtctgcaactagctggttcagggtcagagtaagtaataaggccagagcctggtccaaagtcaatatcaggctctggttcagagtcaagattaagggcagagccagaggacaaargacagaacctcctccttctcatgtgaaaggccagatccacacgctygcgtatgcatgtgaatccctctgtgcgtgagcatataaatgtgtgtgtgtgtgtgcgtatgtgtgtgtgtttgtgggtgagagccctcttactakaggctatggccaagttgctctgtttttcaggcactagaagstcagggattatcaagcttctcacaggtttatgcaaatgtttgaaacatgaaaaaaatatagaaagctataaaaaatgtaaatactaaatatagtaaatgttaacagtatgtcatagtcatagtcaactgaagttcagccatgttcttgtgtggtcaagtttaaaatgtatttatgtgggatgtgggtgtgtggaataggtttgatgtggaatgaggtagtcaggacctttggaggaatgagtgccctggcctccttgtggtgggtaagagtcccagggcagtgtactgcagggccacaaggcagggctgactagcaagttcaaatgctggtgtctactgaagggaaggggagatcagagctgcaactggagctgacactagcagggcagttgagggcaggaaagaggccacaggagggtttagggtccttgagacaggagtgagcaggcctcagccacaccagtgattcaggcttttgtgattatgtggtagcagactgggattagggctagccactgacagctcatgtggtgattttttttttttttttttgagacggagtcttgctttgtcacccaggctggaacgcagtggcgtgatcttggctcactgcaggttctgcctcctgggttcaagcgattcttctgcctcagcctcccgagcagctgggactacaggcatgcaccaccatgcccacctaatttttgtatttttagtagagatgaggtttcgccatgttggccaggctggtctcggtcttgaactcctgacctcatgatccacccaccttggcctcccaaagtgctggaattacagctgtgagccatcgcgyctggccaatttttttttttaattagcaaaagatactcccttttcaattcactttatttccatytactgaaaacttattgtaatgactatgcacatctatgatggctgccatgtaaatggagacatcattgtgcagtgcaccaattgagcaatgtttgattgggctaggatcactcatggatagattcatggacaccagtcttgctcctgaaaggatataaggtgccttacaaacaagtttcattatagcaaagtgaagtacattcatttaaaaatagagagaggcagcctgggcaacatggcgagacctcgtctctayaaaaataaataaaaaattggccacgtgtggtagcgtgtacctgtggtcccaccagagaggctgaggtaggaagattgcttgagcctgggaggctgaggctgcagtgagcctctgaactccagcctgtgttcgtacactgcacttcagcctggagagagtgagacccaaaaaaaaaagtgagtctcaaaaaaaaagtgagtgagtctcaaaaaaaaaaaaaaraaagaaagaaaaaaggagaggaagggtggcaccaggagagtttgtgctgaaactgtcattaaatgtgtggttacctcgcaatgaaaggagtctcgtatttgaggaagccagacactgtgattaggattccatgtcagcctgaaacccagaagagtgctggcgtgttctctggaggcagccaattttcactctctgttcttgtactttctgggggctgccactaatttcctttagcaagggctgctctagggtaacagggctgagggggcttggatgacaagtaggacctcatccctaaaagggagctcagaatggggggcagagcattcaacaaatatttacagaataaatgaatgagcaaaggaacatagcccttcctactttacgtcaccaattcttaactatccacttctctctctattcattggcagttcccagttcaggtcaccatcagctgtcaccccgcctcagccaagctctgctcctccttctcccccactcacccacagtagaaagggtgtttttcccaaatcccaaatcttatcctgcttctcccctgcctttgctctggggtgtctgctccttgtcttcagcctcacatccaaatccttttttgtggtccatgaggcctcaggtgatctgtccctgggatctctgcagctttacctcttattactcccctactgtctgctccaccrttgttccccaatcaagagcttccagggtttggccttggaggcttgtgacaataaactggggagatgtattagtgtgctaaggctgccataacaaaatatcacagcctgagtggcttaaacgatagaaattcattttctcgtagttctggaggccagaagtccaagattgaggtgtcatcagggcgggtacctgatgaggcctgtcttcctggcttgtagatggtcaccttcttgctatgtcctcacatggcctcatctttgtgcaaatgtggagagatacaactctcttgtctctcctcttcttataaggacaccagtcgtattcaagtaaggcttcacctctatgatctcacttaacatttattagctttattaaactttttataggactwatctctactggcttcctgacattttaacaaggccwgaaaaaaacattaaaaacactcaactttcagccttttagatagtagctacatcagatgcccaatagctatccttaaccctcaccttatcacctatccctaatccccacccagccccaatatagggtcaggactggggaaggaaggacgagtggctgctggactgtaataataattctaaaagtgtgctttacagtatatacatcaaaatatcagatttcaagcaccatgcctagctaactcctgccctctggacatttgcactagtccagagcctctcgcccaggatggaggtgaagtgaggaggaaagttgtagtgtaaactcactctttacaccatggggggcctgccctggacttgctgtgtaattgcagttcctgaaggtcttggcatgcctgtaatgacaactcagcctgattgctgactctgcttgtcttgggttgcaggggtccatgggggaggcaaatggtaggagagttgtagcctgctttggtttttgcacccaccagatgggttcagggattaggggggcactctctagggacacacttggtcctgcccagcctgtccccacaggcttctggggattctgccagattatctttcccttttccagggtcaaccaccaggctataagaccagactactggataggccctatttcagaagcagtagggcyactactaggtagccccactcaagccacaagtcttgctgtctgtgtttggccttgagtcaaagcgccagccaactgagacacactcggtctttcctcagtctctaaggggagaaacctagggtgggttgagctccagtggacagctgcatgcggaatgtaccgaagaatacagatgtgtatccacatatacaatgccctctgtgtggcattggttgaacctgagggccttgctctgggaaattccatggaaggccagatagtcgtaaaccctgaccacacctccagctgctgcagtggttccagggcctgcaagagtcatcagcattcagggagacttcagtgccaagcagtggagcttgccccactccccttccccaaaacagggatcacaggtgagtaggagtggaggaggctggggcagggcaggctgagtaggcccctgtttagagttaagggctatgccacatccaccctcctattcatccaatttcctgtccgcccagcacagatgtttttactatcccttctggggaaacaccaggttcttccttcggggtggggatggcaggcagacaagtccagactgcttcraggagccatkgsccagggatattgcctagggacagcatggaggtagagcctcatttggcaatgccctggccatgctggggtgaaaggtcataggccatgcctgatcttgagcctaggaagggtctctaagactgggtctaggtaggcagtacctcctactagtagcctttcccagctggaaaggcttgggcttttccctccctagacaaagttgctgggcrggcctctgcttatctactagtttttatactagacagagcccctttgatatgtgtggtccctgaatcccccgccttgacctcaactggtgatcagcaaatgtttgttgagtgaacacataaatgaacaccatagagctgttccagaagggaggtatggccttgttcatacaatggatttggggagaagggatgtgaatctctataacatgctgtgatgtgtggctgttaaagatggttgtggattcattaagtgacacacactgggtgtactcaatgaggtctgctagaggccacaatagtgggaatgtccactcattcattcatgtatttttgttcaccaattcctctctaggctctgggcgccagaccctatgctagagctggagacacagtgatgaacaggttagaggcagtccccaggagggccaaatggtaaatgaagtagacattgaatgaggtcaggtagcatgtgtgaaactcatccatgaggagctttggggcctatggcaggatctggctcaggctagacccagaaagccttttgaaagaaaccaccttttgggaagagaatgttctaggcaggaggaataacacattcaaaggccagggaactgaaaagtgcctggagtggctgcagcatcaagtttgaggctgtgcataagaagagagaccatcagggctggataaaagggattggcagcattggcaagatttgtgtctacccttgggtccatggaatacctttgagaggttctayacggaaataacatgatgggaatcacatggttrcaatgtcactctgccctgtgtaatggagtaaggatagagggagcggagtagaaaagtgggctaagatggattgtccaagtgagagatggtggtgtcctgaatttggtctgcgacagcagggttgggaagaagtaagtgaactgagagagatccaccaggtaagatctccagggtgggcatgcagtgggaaagaaaagggaagtgactgggagatggtgatatttgctgagatgtaggaaatgctggggcagaagcagtttgggtggtgtgggctgtggtatgggggagatgtttcatcctggctgaacctgcagctggagatgccccaaaagcagtggcaggggggtccccatacgggactaccccaaaccatcctgaaatggttgggattccaaagaaagtagcactaaatgccagggtgatcagtccaaagcatttattagggaaatttctcggtctctgagggggctgcagtacatcctgtaggcagacagcgagacaggsatgttctatctaggtatgcctgctgcaaggggggtctgggtatggaatttatatgagattttaaggaatttggctcagggtcggggctagtttctttcagtgtttcgggcgaccatctaaacacctttatcagtgcctgggaatgtttaaggccccagcttgggctcaagcctacaggaaaaaaccttyggctgtctgggtcatagagtggtcaaggcatttggtatttgtcaggagagagaaaaaagtgagggaacctgggggaccctacatgagacaatgagttcacttatcaagtggtcataaagaaaaggctgtgacgatgtgggtctggagtggacccaggctggagattcaaaactgagtgatagatttacatgggtccagaagcctttgagggcatggaggaatgtcaaatgtagtggattaaatggtgccccccaaccccaccaaattgcattcatgtcctactacctggatcctgtgaatgtgaccttatttggaaaaatggaccttacagatattattaagttacaggttattaagggagctgttgcagtggttccagggcctgcaagagtcatcagcattcagggaggcttcagtgccaaacctccctggattacctgggtagacctcccaatctgccctggattacctgggtagacgctacagccaatgacagttatttttataagaaacagaagggcagaagatgcagacaccgaggagaagtgcaggtgaagatggggcagagattcgtgtgatacagccacaagccaaggaactcctaagccaccaggagctggaagaggcaaggaggggttcgcccctagagccttcagagggagcacaccccggtaacattttgattttggacttctggcctccagaactgtgagagaataaaattctgttgacttaaggcacctagttcgtggtaatttgttgtggcaaccccaggaaatgaatagatcaggagcccagatggagtctgagggccttatgttaagggctgagtggtgaaagtgaggctacaaaggcagaggtcagaaatggtatcttctgggtggaggcaggtagaggaaaaggaatataaaaacaaatgaatggccacttcctgcaaggcaggaagaccaaggagacatgatcctcagaagtcctgccccttctcaaggctgcagatwttttaggaggatatctgaccaatgctgtggtcctgagctgccaggactccaagaccctgcggaggtcttactcatgcctttggagactaaatcttacagtgtggagcaaggtattgaggagatatccgtccattcaaggagttagcaaatattgagcccagttcggtggtgggaaaatggcaatggacaaatgcatgcatggtttatgtactcccagacctcccaggccagtcggggaagacgttacccaagcgatcattcaattctatcaacggtggcaagtgttacgaagcacacggggacatgagaagctgttatgggaggttttgtgtgtgtggtttttttttttttttttttgagacagtcttgctcttgtcacccaggctggagtgcaatggcacgatcttggcttacggcaacctctgcctcctgggttcaagtgattctcccacctcagcctccctagtagctgggattacagacaccgccatcatgcgtggctcactgcaagctctgcctcccgggttcatgcgattctcctgcctcagcctcctgaatagctgggactacaggcatgcgccatcacacccggctaattttttgtatttttagtagagacggggtttcatcatgttagccaggatggtcttgatctcctgaactcgtgatccacccgcctcggcctcccaaaatgctgggattacaggcgtgagccaccgtgcctggccatgcccagctaatttttgtattgttgtagagacggggtttcaccatgtcggccatgctggtctcgaactcctgacctcaggtgatccgtccgcctcagccttccaaagtgctgggattacaggcatgagccaccgtgcctggtctgttatgggaggttttgacctactcagggaagtaaggaaaatctctctgcctctgagggaatctgaaggattctgaaggttttaatcagggagggaaaaattttttctagacagaaggaacagcatgtataaaggtctggggtggggagggggaatggccagttagagagactggaggaagttcgatgtggttacagaagtgagcagaggccaaaccatgtggaaccttataaaccactttttgatgtttctcaagatcagggcaatttcccagctgcaagtaatgggctcagatctgcattttgagatcatcatggttgtagtgaaggagagatgagagggaacaaaaatggaggagcagccagtcaggaaagtgttgccatcactcatgtgaaaaagatggagagaagtgggtggattagagggagatttaggggtaaaattgaacagacttgggatataggtaaatagggtctggggatgagggagagggagctgccaagtatgactcccaggcttctggttaggtaactgatgggaagtatctccttcagtacagcagtgaagacaggatgtgtggagggggaagatgtagggggagaacaataactctgtgttggacatgttgccattgaggtgcctgtggacactcaagtggggatgtacactgaacagtgagttacatgaatctggggttcagcagtaaggataagggtaaagagagaaatttgtgtcacctgcgtgtaaagagaagcgtgaagtggaaagcctagacctgagttttgaggaacccccaacctttactaatagggagaggatgctgaagaagcttgagcagaggtggccagaaaggatgaggggaaaccaagggaaatcagtgttccagaggggctgtggtcatcgctgggtgtcagacactgctcagggccctggcagatgaggtctgaagaacagccgttgaaattggagattggaggctacagtttattgagacctggtttggtgctgttagggagctagaaggctgactgcagggcctgaagagtgggagagacagctcctttagggcctgaagagtgggagagatgtgaggatggggagacagctctttcaagaaattccgctgcggttgagaacagagacactcagtggggtcgaatgagggttttgttcccatagtagaggcttgaacacatttacaggccaatgggaaagatccagttgagagcgggtagttgagccttcaggagagaaaagggatgttccatggggcaaactcctgagaagggggaggagatggaaggaagcttctgtggatgtagcagatgcaggagggtttgtgtagttttagccgggctcgagccggtggctgacgcaggcaggaacaatggctcacccatgttttatgtgtatttccgtgtgcgtgctcctgctttccccaggtctgggccgcctgcctggcccgtgtgccgtagggaatatccacactgggcctgggcggaggctgggcatctcccgctctgggcttgctccctgatgagattctcagaccgtgcttcccctcattcatgagaggaaggttcacagagcaggcgtgggaacctgcctggccgccagggcctcctcccgctcaggctgaggtttgctgcatctctgtccttattcccttccagactggattggctgaaccaggtgtccactctttttggcccatggcataaagaagggtttgggcaacccagtgtgccccaggttgttaccgcccccccgcctccgcccccacccagcctttgatgggcccccttctcatcaatccatcacccctgcacatgccaccaggactgcctggaccagagcccgggactctctgaaacccactgagagctcggccctgggaatgggcctcccaatctcggtctccagggggtgggccccaggtccctagtcttcctcagggtcttctccactgttctgcctcctctcctgatacccagttcctagccggggtgaccccagcctcccgtaacagcctccttgtggtggtgctgggaagaaggggcccgtgtacccggcagggccccccaggcaatgggcatgagcgcaggcagggaaatccgtcagcctccagggacgctctccctacagccccggcgaggggatcgggtcgtggcgacctctccagacgcccaggggctgggcaggagggcgggccaaggcccgcaggtgggggcgccaaagccaggcgggcgcggagtacgtgcggtgggctgcgggcggcatgaagggcgcgggcggccagctccggctccggctccggctccggctcccgcgaggccgggtagcctgggcgttcccaggggtcgcagaggayggcgaaccccggcggagccaccggagctggggaccaggacgcaggcaggcgtgtggagcgtgaggtggggacgtggcggcggctcaagtgggcggagccccggcagcggccsgaggcggagtcgccaagggaggaggcgccgagctgaccgggcgacgccgcgggaggttctggaaacgccgggagctgcgagtgtccaggtgagcgccccgcccgctcagccgccagatcaaccttagcgctggggcgcgggctggggtcgccaggcggtgcgttctgcccgcgcggggctgagagttaggggccggggccggatccggggccgggggtcgcgccgctagccgccagcagcgcagtccgggccgccaccctgcaccctccgccctgtttctgcacccgtctgggttcttgtgccgccgcccgcaagccttcccgagctcagggtggtgaggtcagcggcgcccttcgtgcagttccctcggctgtcgggcggggctgggaacttggccgctcttccctgtcaggctcccgggaagtggcggcctgaccccgggctgccggctgttgggagcgggggcgcggcgtccgcctggccctgaggggcctcttcatattggctaagcccgttctgcaccctcccaagggctgggagtcctaggtcttgtccgggcagggtccagcttggagcccattagatgggccattggatcagaaagtcttttctcccccagacatccttgtggaaccagcgttgtttttccttggcagctgcggagacccgtgataattcgttaactaattcaacaaacgggacccttctgtgtgccagaaaccgcaagcagttgctaacccagtgggacaggcggattggaagagcgggaaggtcctggcccagagcagtgtggtgagcgctgtgctggaagggaatgcgggcagtgggtacttggtagagcactgactgcctccggccagaggacttcccggaggaggtgacccatgagctggagtggtcagaggaaggctggcaaaagggcatcgtggacagaggaacagcctatgtgagtgggagcagagaccttggccaatgccattccttatggccttgtagtggaagcaaggtgatggggaaggaacactgtaggggatagctgtccacggacgctgtctacaagaccctggagtgagataacgtgcctggtactgtgccctgcatgtgtaagatgcccagttgaccttcgcagcaggagcctggatcagggcacttcctgcctcaggtattgctggacagcccaggtgggtccctggcctttgtattctatttgactttaagatggtgcaggagaatacaaaaaactatccgggcatggtggcgcgcgcctgtagtcccagctactcgggaggctaaggcaggagaatcgcttgaacctgggaggcagaggttgcagtgagccaagatcgtgccactgcactccagcctgggagacagagcgagactccatcttaaaaaaaaaataaaaaagagagatggtgcaggagagcattgggatccctcccaagactgtgactgttgtcttttgctgtagagtgacacccgagatttgtgcttcttgataatagactacctggggcctcacagccccagccctcttgtaggaaatcctgtcctargagcaagggctggagtccgttacgttgtagcttggggcattcttaaatgtcccagactttgtggagatccattgtccacctaagaatttataggatgtttttggggtctgctgcttgttctcagcctgtgtctcatctgacattaggttccataatttagtctctgttaaatgaactaggatttcctttggcttgtacttaaactgcccctgaggtgtccaaggtgcagcctctcactgtggttctgggcctcagcrcccagtctctctggttgcttctccccactcacagaatgtttggtctttgaattcttttcttttagggcctccttgttcttacacagccgagtgtccactgtgtggcccagccaatgaagccacgtagcaaggatggagtgagttggctgggggcctcatcccaaagatgctgtcatactggatcaccctagttctctgagagctcagcaggcagacttggtgacagcttagctgaggcattgtctgtggcatgtgataggcccttgtatcctgtcgaaagctctgcattggggtactctagacagtgcttacttagtcaccggtttagactggccccagctgatctcagttcatcccttgagtgccttctgcctgtttggcttctgactggagcgtgcctggggctagaatgagggacgagagagaggaggtggcsgaggcactattcttgcctgtgggtagctcgtactctgagattgctgcttcatattggcagctggccatgtgccaggggaggagcccggctgtgagtgctcatcaaaggaagagactacgtgggtgcagctctgaggaatgagtcggttgagggaatctagggtctcctcatttcctaagaaggcctccctttttcactctgccctcccacatccttgggagggtctgagactggaagcaaggccttggctgatgtgtggccacgctggctgatagtgtgcagagggctaggaggtgtgtccctggctcctggggtctgtcaagagtttactattatgcagatggaagttggcaggaaaagctgtgatgcaagtacatgcaagcccagcagagtgctggagtgagagttaaacttcgggaaagttgctcacatctagcaatttggacatttgaagttccttagggtaagacatcagcctgtcctagagcaaagagggctggaaggtcctgtggtctgtgggctttgtgttacggacatggaatgagagatagaaagacagttttttttttttttttttttcctcaragcagaggaraatgaaaagtctggatgatttactggagccctagaagagagttcttgttcagctggtgtcattgcagggcaraggattaagtgtttgggtagagtgctctccagctcagatggaatctatctgagcctggtaacaggccagcatctgctctggacctttcaggaagtgcttgcttagagtgtggcctgttttgtacctggcactctgagggccagggtgtagtggagatcctcaggcctgggtacttgtaggagcctggaatgagcaggtcagaggcatataagtacatgagttcctagagtattggtccaatcccccgccttttgctagagaacattgcttgatgagctttagagccagtgattgaccagttccagggttatcccctgatgatcaatgtactacattatacctgattccagtctctcctgaattaaatgtttcatttcttgtggtgctcctggaacatggagatcgcccaatttctgccttgtttgcatcttcactgttccctagtctggaccttctttctcacccaggaatcagctgacttgggctgggcagctggctgcctcaggtccactgatgtttctctggtgcccttggtactaatgattgacataaattatgcctagtgcagggctacctgccaacatctgtcatcacattcagtcctccaacagccctatgagatataggtcctagtattgtctctattatatacatggggaaactgaggaatcctataacttgtccaaggtcacaaagccgggaagtggtatagaattggggtttaactcttagtatgtctgaccctagggcaggtgtgcctgtccatttgactgtactgccttgccctgagctggactggctggttatttgtgagtgctgtcatgtctaaggtaggagtgactgcccatctgaacttaagggaccatgttgctgttttctgggtccatgttgcgttcctccctctggtgagatccagccaggcgtgtcatggacctgctttatgaacctttggtgtaacccatgataaagtccttaacctgggcaggcatgttcttcctgggcaaagtgtggcttccctgtttgggagtccattgcactttaaggtaacagattattgagtaggactggatagctgcaatatctagcagagtgtgttttgggtttgactcttggttctgtcattgatttgctrtcagatgtcagatatgtaggaaamcttctctcagcctcagctgtttgtcatttgtatctatcttatatctgaaatggaggtagttatctagcttagaaggtttgggtgagaattagatagtagaaatgaaagatttttggaaacaaatagtgcttatctcagactatgttcccaggaaacagcctgagacagagcttaagtacttaatgctttattggaaggtgtaattgcagggcagccagggtgagggaaaacaaaagtgaggtgcaggcctgtgcgatggctcatgcctataatcccagcactttgggaggtcgagatggwtggattgcctgaggtcaggagtttaagaccagctggccaatatggtgaaaccccatctctactaaaaatacaaaaattagctgggcatggtggcacacacctgtagtccaagctactcaggaggctgaggcaggagaatcccttgaacctgggaagtggaggttgcattgagccaatattgtgccactgcactccagcctgggcgacagagcgagactgtctcaaaaaaacaaaagaaaaaagtgaggtataaaggaggatgggaggtggtgttttagcaagctggctactctgcacagagatgtacttggttaccctatgagggccctttggtagccactggggaggccagtctggtacttcaacagagtctggagatagtgagaggagccagagattctggcgtgggcctggatagtctcctccactgggctgaggcaaagtaaataccctgggacctgggagatgggtgagaccaagaggttgcaaggtgggacgtaagatgcatccaatatagtggtatatggattttatcctcaagtgtagttcccttttgtgggttagtctcatccagactgccaagtctctgccaagactatgactgaaaacccaacttggcttttgcatgtcagttttaacagccttctctgctacttcattgtctagttactgaagcaagactttgtggtggtgatggtacccaggtggggaagtggaagtcaaccactattcatgtaccagactgagaaagtatgtggatagatacagataaacatcttggctttattaggttcttcgtgaaggagaatattttttcacataaagtagttgttgaagatacgaaacctggcatggtgagatgaggctagagagggcagtagggcctggtcacacactcaaaaggaccctttgggctaaagagtttgaactttatcttgacggcagtagagagccaaaggagggctttgataaaccatgctggctactttgtagagcagaggtgggaggaaggccagatgacatgtggagaggccagtgtagtgggggccaggatgcctgtaggggaagttaggggtggctcagatcagggtgatgactgaggctaaggagagtagggtaccccccatacttgcctagggtgccgtggcagcagcttataggcctgaatggacatccatgtgctttggtggcagggtctcctggagcctctggatcctcttaggctgaacacacaggtcctttcagccctgttatcctagagttggaggcagcggggagccgtgtccagttaggttttcccccttcacagaaggcaggcaggttcttgttcagtgccaagcaagaccagtttgttctcagcaagctcatgttctgtctctaggctgttaaatacattgttaaaactcaggctgttgcatttgggttgcagctgggagcttggcagagattctgcctgatgaggtaaggagagaagctaaggacgctgctggtttgcagctggaaacatcttttcatggccatttggccagattgtaaatgtcttttccaaagttcaggtttggtgggacctctggttgtatgtcttggaattgccctgtgtttagaaacagtgccagtcgcctgatgggtgaatcactgttgctgggatgttggcaggttttgcaggactttcctgtgggggtccaaacactagggctggcagggcccgtttggagtctgtttgagaagggcctgctttgttttctttacattttaagcatatgataaaataattttaaaaattgctatagaatttcttgtagaaagattagagaaacaagcataaaaataaaaagaaattatttcaccaagatatagccagatgtatgactcttttcttgcatctctctatatacacatatacattaatttttccttacaaaaatggaattatagagtgcatattattggggcccacttttctcacttaacagtatgcttagatctcttcatgttgatatatagtattcatttttaatatactccataaaaactcattgtatagaagaaatgtaaaatcttctattgttgtagtttcctaatttgaacaagtctgtggtgaagtattttttgttgtgttcctggtatgggacagacattgttctaaactctggggatgcagcacagataaaactcagtattggttttctgctcaagatgtcactttgtttttcataaaagtgggtttgacattgttcacctccagacttattccagttggattctgagggtttctgggagggcttttagcagcactggacactttgtaggggcactcagcaggtacacatactttcacctactctgtcttaagcaagctgtgggcatagttatgagatgggttggaggttggcctttcccacattgtggggcacagtccctctcggatgctgcctcctcccaatctgactctaattagaggactttttgtacagagccttttgagttaaggggcccaggcttgggagaaatggggtagggctccagagtacccctgccagagatgtcagtgttgatgtggtagtctgggagctgctgcttggaggtgcccagctctccaggctagcagagttagttatccccttctcccaccagagcaagactttgcaggctcttggtaggtaagtcatctgtaattacctgtgattctttgaggctctgcccaaaccccatctgtgattctttgaggctctgcccaaaccctatctgtgattctttgaggctctgcctccaggctgagattcaagaatgggctcagtctaagccagatcgcacattccagagaaatcacagctggtattcatgtaatgaagaaacctggctttccctgagtgttgtgaggtatgaaccgtagatgataggagcagaatgatttgaaaggaatggacagacttcctccctggaatttatctggcctctaaaaaggtatgcaactgcaactggagacacacctgggkagagatgctgggttccccacttccaaccrtgtctggtttggaacctgcctgggccctgttctcccaccaccccagctctgaggagcagtcagctggtccctttctgatcacagatacatcctcccagctctatgttttcactgtcccctccctacatacatacagaaggtgctgagcctgagccagtcaagccttttgaggaacaagaaacagacacccaatcccttaggtataaggggcttgtgtaagcaagagagaagccttctgaaatcctgggatagagaagacagtatagtaaggccttggagcagacctgtggctagaaccaggagggcctggactctgcctcagggcaagcccaggcttactcactttctcttgatgacttgstctcttctgctgctctaactccctaatggaccccttagcacaatacgccctaccctgcagcaggttccaggttggaagataattgtcctgtgtgtcttgggacccccacacctagactatgacaggaagactgtcagctctgcagacatttggcataggcatgaacacatggcgccattcacttatgctttccttctgatagaggatccatttgcagatgggagttgtggttggccttctctgagcctaacctggaatctcaatggattaggatttcttctgaaagagtaagatgaggaatggtgggtgtgctgtgtgtctaatcaagtatggcgggcaaaaaactgatgaactggcattatcttagacttagaattctgtcagataaggcttatgtttttttgggaaagcatttgtatttcctttgttttgcttgctttgtcttagtgaatttccatttgagcactccagtggggtgctcaaaagcasggcaggaagaagaccggcagagctggggtacagatgggtgctaatcctccagcacagtctaggctgcatggctgagctgggagacggtatcggaggcttctgttgtggactgaggtttactgccagtggggtttgtctcaggttgtgcctatttctgggctgatgagaagacagtagctggcccctttcccatgtcagcagcccagcctgaggttttggccatgtgtgccatattcatttttgtatcctgagtgcctagatcagtgcctggcatctgcaggtcttcagtaaatatttgtgaatgaatggtgacgggccagtgagaacagtgtctgccaaggagccttactacaggaagaacactgtctacctaggagactgtctcctctgactgctctttctctggcaggtgcagactgacaagggttagttttattcctcttctggctggccatctgttgtacaccttagtttgggtgttggtactctggaggatattgtgtcaaattatctttctgttattgtctctcatgtactgttgcctccttgtgggcagggactggttccccaaaacctggcactgtcctggcatatgtgttggaaggtaagatagaaacaaacagcagtctgtgaaataagaaggagtgggccagaatcttggactgacagaccattggaacccgagctgactgtaccccactgcgattccgccttctcatggtacaggtggttgctgggagttgagaggatgggctctctccgcagggcacgtgacttcccagagcagggaccagaattgagcacacatcactggctgcacgctctttgttctttctgctgtttgtcctttttagcttctgtgtgctaggccaggattttgatatgtttgattatctgcatatgtgtgtacatgcctatgtgtctcctcacctaaattagtctttttcactttgttgatccagtgattgtcattgaatgcctttcagacacttccctctgtgaccatgaaactctgggtgtctgcattgctgatggcctggtttggtgtcctgagctgtgtgcaggccgaattcttcacctctattggtaygtgccaacaggactgtcgtctccctgacaccttggctcacatgccacggatgtctctggctgcagcctgttctcatttagagtgggatagccttaactactggttttggccagttctgaggagagtggaactggcagagttgctgttttcccctataagatcccaatgatctggatgttcagggagccagatgtctgaattgggtctttcttcctgggaagtgcaggctgcacttgggctctctggtctttttgaccaccttgcccatggaccagagagtggttctgagcagcaaatcctttgtatcctgaggatcaagcttttcctatccttccgacctaaagttcagagctttttatcctgtggtgagcccccaggatatccatgccccagtgtcatgaccagctatgtaacagtcggagaatgagatttagggctgcttcttgagtgacatccagtgcacttatctcaaacatccccttggtgcctctgcctctttcttcctgaagttgcgagatagagccccatgagtgcctaggccccctttaactccaagtccccataatccycagagagctgacatgttcttatcccaggggacttgcttctgtgctggtattctgtgccccaaggaaggaggctggacatccctcatctgtttctcactggtgtctttcttctctcccttgcagggcacatgactgacctgatttatgcagagaaagagctggtgcagtctctgaaagagtacatccttgtggaggaagccaagctttccaagattaagaggtgtcctaagtccccaaccatccttagttggccttccttcccttctgcccctcaaggaacaaggaagccatccagggtgcctataagaggaaacctttgagaggktgatgtggggctggcctggttacttcatgccagtgcttgagaggagctaagtacatgggctaaggagtcactgtttattttctatttaagacctwttcccttacattgggggtcccagctgttatctagattaagggrctagaagtatctgtggggagttactgtattcatttttcattgcctcttgatgaaaagggccccagaacctggcaccagggaattctcactaggaaaattgtcacaggtcaagacctatgtgggtggacgcattagtcttccttttcctctggttccacagctgggccaacaaaatggaagccttgactagcaagtcagctgctgatkctgagggctacctggctcaccctgtgaatgcctacaaactggtgaagcggctaaacacagactggcctgcgctggaggaccttgtcctgcaggactcagctgcaggtgagggacggtgagcaggtgcttgagtgagcccatatgtttgtgtgctcatgcctgggttgttgtgtctgagcctgtcttgggtctgggtgttggtgggcaagtacattgtggaaacaggaccctgctggtctcatggctctctcccttctctgtggggacctggaagttggctggccttggtttttaacatgtaatgatgttcagttctttttttagcgtcttttttttagtgtctgtcttttcttattttttgctaatgacatttttccaattatactttagtgatacatgtttatagaaaagtcggaaaacacaaaaacaagagaattataattcttaatccagttgcccagtggtgagcattattaaaattgtagtttttctacctatgcatatacrtttaaaaaatggaactatacatacataccagggcatgcaaactcagttgcttggagggacaatgaatttacaagtgtcaagtgggctggatggtggggccagsgcaagttggggagcataggtctgatctaaattcattcctattcatatgttttacaaacaaagcatatctgttggtagatttgtgacagaagaaaaaattctgtgaatttctcagcttctttatatgccattcaatgttcttctgcaacatgattttaatggctggatggtgattacctgtcagatggtgataatctgtcatactgataatactgtcaaatgggtcaagtcattggatatgggattttttctgaattatcagcacctttttacatatttcttggtgtatacttctgattacttttttagggtaagttcctagaagtgatattaccgatgagagtgtgaactttttaaaagctttaaactatacttggtgcttttattgtgataatactttttatgccctaatacttttctgtcaataagaagagatggtacggtgggcctggaggtgggctctcctaactcctagccctgggtttagtcccctggactcactgacttttttttttttttttttttttttgagactgagtctcactctgtcaccaggctggagtgtagtggcgggatctcggctcactgcaacctctgcctccgggttcaagcaattcttctgcctcagcctcctgactagctgggactataggcacatgccaccatgcccagctaatttttttttggtatttttagtagagacagggtttcaccatgttggctaggatgttcttgatctcttgacctcgtgatccacccatctccacctcccaaagtgctgggattacaggtgtgagccaccatgcccgctgccttttttttttttttttttttttttaaagggacagggtctcactatwttagcctaractggagtgcagkggctattcacaggtgcgattgtagcacactgcaaccttggactcctggcctcacgtgatcctcctgcctcagcctcctgagtagctgggactataggcacagtgccattgtacccagctcttcactgcctyttttccctgagctgkgagtgctgattaacttcaractagctgtctctctggctgaracattttagcccatgtggccaractgggttgggcctgggggcagggtggcctctggaragggattggtgagctcagccaggctggagctgtgcccagtgagctcactgcctccaraaaccacggctgcctttcccagactcccgcctctccgcctgggcctgcagctcgggacaggctgttctgcctgcacggcaggagactaagcctacccagatgacctcctctctccaatcttgttctccacaccctacactcccaccatcatctggttcctttggaaaaccttatgattacctggaaggagatagggcaggcccagagaataattggttgttttcatctctgactttgagttcttgcccctgaaacgagcagggcatgctgacagtgtggcttttcctggcagcatgttcccctactcccaccccaccagattctaaactctttagagtccctgaccatgtagctatgaagacaaggaaggcagggttacagcttcttggtccctgtccccagttatggctgaagtggatgtttaggtctgaagtcataggtggcagtggatacagctactcttgggaagaggttggggaaggaatggccttgttgttcccctctcacttctcagcttagaggcagaattgaaggccctaagtcagcctgggaaggcttggctcccacctgggattgtaggaggtacacatcttactttacagctagggcttggagtcccagaaaagcctccttggagtacttctgtggtcaaaagctctcccacgcttcaggctgtggtcttgagcaccataactggagagcccatgccctgaactcattgaaggtctgagtggtgggagtacagaggagaacagrcccaccgtggtctcttaggggacggaccttgctgggttggtgcaaccccaccttggtccttggcctgtctaggtggtccttcagctgtcaacctagggggagggggatgacttccaggactttcatcatcacctttctggatgataagtgccagtggtcagtaatgagtggccagctcggcttcattagttaactgtcattgtcccttggactcctcaacttgaaatgtgtgctggaagtctgtgtttacctgactagcccaattaccctggatcaaggttttccatgggatttattttccactgagtggttgacagttcttcctgagtcctctcccgtgctcttctcagttaccctctctatcctctgtttcttctgtctccaccagctctgactgaatgatttggagccaagacttctggactcctaaatattaaccaatatggggggctgcttctacttagttccaaagagcaacacaggcagtaggtatggtgaggagtaagaaaggaaaagtccccatagactggagtcatcagggacaacttcctggtggaagggggcaacagcctttgagggagggggcggggaaatttcactagccagagaccctctttgtggctgcctctctggtcccaagtggaattctgcccctggatcaagggtaatctcttgttctgactctcatttggaaggttttatygccaacctctctgtgcagcggcagttcttccccactgatgaggacgagataggagctgccaaagccctgatgagacttcaggacacatacaggctggacccaggcacaatttccagaggggaacttccaggtaactcaccactccaggcgttgcctgtcccgcatgtgtctctttagtggcgggacaggttkgagccaccaccaacttgtggcctttaacctcgggtgcacctctggtgcacctcttggctcaccagtttgtgctggactccctctcccatgacaggtttctccctcagcccctgccctgccacctccctccatgtattagccaaggccctctcctcttgcatctcagagaaagccaaagttgctgctcaggaaccccctccacgtctgtccccagagcaccacacagatctgcattcagacctgcttcttgtctcccaccctccaatgtcttttcatctaaggctgatctgggcttactatccccctgtcttgagtcctcttagttacagtctctgctcctatacattctgtctccacctctctgggttctacccttgagctcccatataggctctattcttgctcatcttaacacttgcctccctcggtatctgagagtctttcgagtctttgctgctgattcatctcttctcccctcctggttaggctactggatagagtaatctacactctgtccattttcctggttcccatatactcctgaactcacagtatctggcctttttccccactgtcactgatgctgttcttacaaggtcatcagtggcygcttggctggtaaacccagcgaacaaggttcacacataatgttctttaacttcccagcagcatttgacagatagattgcctcattctttgtgatgttctctcctcctttgaattctggcatactgatatctgcttctcttttagcctctctggtcattttctctcaagtggcccctctcccactgacttcccagtgttagtgtttataagaagatgttttgagggctgctggagacaagtaaccccagcgattcactgtgtgaggctcatgcagacccagcttattccagctccagaacctcagctgccccctttagactccattagagagagggcagttcagggcacctgcaagatctgttcactctgtagccttgagattggttgcttggaggagggaaccataccctggcgttgacctctcacgttcactcagcaaacccatgagtgtcctgaatagggttatggggcagaaaggaattactccctaggactccatccttacctcatcttctccctgagcaccttccccaggtgagcacagccatttccatcacctgaggtggatgacatccagatctgtgtttcttgccaaggcttgtctcccgagcttctaaccagtgtagacggatgcctttgggacatctgtacttgaatgtcccatggacttctcgaacttcatgtgtcctgaactgaaatcctcatctccttgtaaacactttaccttccccctcatccttctatctcagcaaaaaggacctccatcctctggctgcctaagccagaagcctaaggcctatggattctacctccttctctcatgtcttccgtgcttatcccctgactccagcctcacagctacttttttctcaatttgattatcaaaataccattctgacttgtctcctacctccagcttactgcttaagaccatcctccatgtggtcttaagcacacatttgttcacatgagttcctgattactgtgcttaatttccaaagctaaacccaaactcctcctgtgtgtggtctttggggtcctgcatgactccattttcctggcttccttgcccattgtactcagctttccctatcactcagctcttttgtctcaacccctctataggaatacctttacccatgtcagctaggctactccatgtctgattgcctatcagcactcagctcagctgtcactctcccaaatgctctccagggagtagacattcgagttggctctggggaggatgctgagtgccagggagccattcttagcattcttggcatctgggagacatgttgataatagctactggtcattagcatcctggggagcataggagacatcttcatatgtcatcttattgaattcttgccacaagctctttaaaattgatgatattatctttatttagagataaggggactgagacttagatatggtaacttgtctatagtcacacagctggttggcgccctagtgaggccaacacaaacctagtttagttcagctccagagccccagctcagtcagctatgttactctgccccagcaatgtaggttcctgggcctgcagagccagaggagacctgtggagaaggaaaaggggctccaggagccccccagtccctggcctacctagggacttcatcttgtgtttactgtcyccaacttcctattcctcgttattggttcctgagccaccggggttagcagaccctggtctctgaagcatttagcctactgtgtagtggtttcattccaggcagaaagagccttctctgagttcttttgtgtcagccatgcccaggttgctgttaatggggctgtggggagtcttccttgctttccagggagagtcacagcccccacttcccctccatggtatctgctttctcattattctctgaggaaccacacacatagtctttcccatcttgagctcaccctaaatcctgcatctccctatagctgcttcttcatattggcttgaaactatcttcatggtcactttccagcactccctctacagcagatgacctttggtcataagacccactgaactgataytcagcaaggtccctgccacttaacagccaaagctggcactgcaaccttggctcttggcctcccttggtgtctctcacaccactcccgctccctctgtttctcctatctttagttcattctcagggttattcattgtctgttctttctgggtaggtgctccctggagctctggccttagtcatcttctccattctttcctyagagttcctgcaagctattttcctcacccatggcttggttgccacctaaatttatgttttttatattcagctaatttttccatcctctagactcatatggcaaactgcccaccagacatcttcttctctgtggtccacaggaccttcccactgtcctcaacaatgcttcctggtgggtttctggggctccccctaaaaaggccccttcccacttgggagatggggaatctgaggctaagaggtggctgtgaaccccagtccagggcagggctgggccatctgtctgtgctcactgtgtcagtggccctttaggatatgcagtctaaatgtccgatggagttctgcttggtgatgccccctatccagtggctcaggctttccttgaagygggaatctctttccctaatccagaggctctttggagcctgacaatttacttcccctgctgtaggaaccaagtaccaggcaatgctgagtgtggatgactgctttgggatgggccgctcggcctacaatgaaggggactattatcatacggtgttgtggatggagcaggtgctaaagcagcttgatgccggggaggaggccaccacaaccaagtcacaggtgctggactacctcagctatgctgtcttccagttgggtgatctgcaccgtgccctggagctcacccgccgcctgctctcccttggtaaggagattctaggggaaggtaagatgggaatggagagtggcagaggaactgcactgtgctggcatctgcctgacccctctcctgggactgagtcagtttaccctgtcacttggccagtgactaatgccttactgactttaggaccagtccagcttcttactagctccttacccacctcaatcctggccttaggtttgcgcagtcgctgatagatacgctcaggcctgtggcacttgtgggcctttttaataaggactctgttatggtgtatctgtcaccatgcaggactacacagggtggaacctttactacatcaggagcagctcaggagtcaggttgtactttaggattgttacagtgacaaacagtagcggtgctattagaggcctgaggtctaatagtaggacttcatatggcattgatactttgtgtgccttgtgctgttggactgaagaaggccaaaagcactgtgcctttaaaactcatctacctttttttttttttttttttgagacagagtctcactcatccagcctggagagcagtggcacgatctcagctcactgtaacctccgcctcccgggttsatgagattytcctgcctcagcctcccaggtggctgggattacagaggcacatgccccatgttgtattttctttagtagagatgaggttttaccatgttggtcaggctggtctcgaactcgtgacctcacgtgatccacccgcctcggcctcccaaagtgctgggattgcaggtatgagccaccgcacctggcctctgttggttttccagttacgaccarcgtactctggttagatgctgtggaaggtagaatgcagcatgcaggtgagctgctgggagagaaacccttacagaataatttctctaaatgacctaacagatgtttgtggtttccttttccttctcattccttgcattttctagacccaagccacgaacgagctggagggaatctgcggtactttgagcagttattggaggaagagagagaaaaaacgttaacaaatcagacagaagctgagctagcaaccccagaaggcatctatgagaggcctgtggactacctgcctgagagggatgtttacgagagcctctgtcgtggggagggtgtcaaactggtgagatgtgtgagggggctagggtgccaaagctgtggacctggactctggctctgggcaggcagatttggggaaggtgttctttattctgtaggtacttttctcagtatatcccccagtttttcatggcatctcctgaggctgacatgtggatattctctgaggtgtaggaaaggagactctctcccctcgtgccccaggtagagtgttgctcctctaagttaccagtgagctcgcctccttaccccaatatgtcccactttttgcttcactcactgttgggaagaaaacaatgggtggacgtacctcaggccccaaaagaagtcatggtataagtggagagtaagtctctgtggtaaagacaccagcgtgtactagagcttggtatcgagcctttgagagccctgggatcctagtgcttcctgaggaggcccaggtgtgacaggctctgagccttttccatgcccctgtctgcatggcttctactggctcctccaccaagaaaggtttctcccctgtcccagcccttcagacctactcaagtcttcacgaaaagggtcaggaattactttctgccatgggacttgaggatgtgaggtgattttgggagagaagaaaaattgcatgatttgtggggtgttatttcatgccagttaagctgaaggggctctcctctcctctcccctccccccattcccccctctcctcccctccccccctcccctccccctcccctccccctcccctcccccttctcctcctctctcctcccctccctccctcccttcctttcttccttcctttttcttctctttttcctgtttcctctttttccttttcttttctttctttcgtctcamcctgtcgcccaggctggtgtgcagtggtataatcatagctcactgcagctttgacctcccagccttgagcaatcctcctgcctcagtctcctgagtagctgggactacaggtatgcaccatcatgcctggctaattttttagagacaggtctatgtcatctaggctggtcccaaactcctggtctcaagctatcctttggccccycagagttctcggattacaggcatgagccactgtgcatgcccacctgctgggacttttgttttcttctgtggtgtggtgggagggagcagctgctggccatgaggtgagtccagtgtctgcagacagccagactgggaccgaggattaggactcactcagctcagggcctgttactctgtgctttccagacaccccgtagacagaagaggcttttctgtaggtaccaccatggcaacagggccccacagctgctcattgcccccttcaaagaggaggacgagtgggacagcccgcacatcgtcaggtactacgatgtcatgtctgatgaggaaatcgagaggatcaaggagatcgcaaaacctaaagtaggtgtcactgtaggtccttctcgggtcactgaagggggaaggtcctttttctcatccctagcactatgggtggttggtttgcccatctagccaccctttatccatatctagcatgggcctaccgtggggatacagagatgcttcagactcagcctgaccttgtgagttcatggtccagtggaagaagaacagggtaaccaatgtggacagccaagtgctatcatagaaggtcacgctgggaacagggcaggtctacactggtgtgtcagttcacctggttgggagactggtgcgtgggtgagttttttggaaatgttccataggatgctatgaagctgggtcctgtggagctcctgattaggactgtaaatgaggtgaatgacttagaggagaatgtatatctttataatattgggtcttctcatccaagggcatgacaggtctctccatatctttttaagttttcttcatataagccttgaacatttcttaagtttattccttggtagtttctttgttactgttaatttactttatttcttcattattatttttaactggttacattattttattagtttactattatatgccaaactattgattttacaaatacatttcatagtaagagctaatgtttactgaattcttaactgtggcaggaacttctaagtgcttaacatatatattaagtgttatgtcacagttatgaacagctgctcataatgatgtcactgtctctgttttacctatgaaaaagcaaactcatacagattgcagctagtggttgaatttacttatttcttttttggtttttagctgatttctctttggttgcctggatagcattaacacctggaaataaggaaaattttattttctcctgatacttgtagttcctttgtttttataaccttattgaattgcccagaacttctagagcataattacgtagaataggcatccttgtctcattcctgaatttcctggaaattcytatggtattttactgctaagaatgcagttggctgttggttttgtatatatgccatgttttaaaattattcttctgtttctagttcataaaagatttgttccccatttgacatctttcaaagagacctatttgctgccatatcccatcactgatgattgggagggaggatttagctcgattctctattgctctgctcctaatagaattgtaggggccgaggtgaccaggaggcccgacactcatggagagacctgaaataggttcctatcctggcccctggacctcatcttggaacagctttggcttgaggtactaggacatctagggctttgagtcagtggttggcatcatcgatgtggctgaggaagggggctagccagatatatggagaatggggactaggactcccctttctactcagctccagagtcctccaggaaagaaaactactttgttggttgtgccaggatttcctgagagatttcttacccgttcttcagttccagacactgagaacatttctctgtgcatgtgtgcatatgtgtacacatgtgtgtggctggccagrgggtagtgttaggaaaagatatatttgaatagaagccatgcaaagagccaaacaaggttggcaaacatgtttggctcttaacatggcttctattcaaagataagctgacccctcctttccggagactgtgagggacagatgctattctggctttgaagtagagccaatgagcttaacttggcctgtggggaatgcctggcagctgtctgtggggtctctggcctgctttcaaaatagccctgtgcttcccctggggcagagcacagctgctcagagcctctttgtgggtgtcaggccaatgctgaggcacagatgtttggatggggtctggctgtggctgcagttttcagggagggactgacatgagctgaagctcaggaagggccatgagtaggagcttgggagccgtctgtcctgcttgtgctggccatcttaccagatcatgccatagcagcacagtgtccaagttggtccatctcacccccttactagccttctggtccatctactcctctccatcccttctgccaccacctggcccgggccaccatcatctcttgccctgacctctgtcgtggcctcactagcctcccagtccccactctggcccctcattagtcaactctccatgaggtattcacagtgatccattttacattcacattttgagtgtccctcccctgcataaagccttccccatttctcgttggccacaaggttgcatctagttcctagcccctgcttgtctcttcagcctgttctctcttactacttcccataacctttaatccacacctactgcaacacccattttcattcccaggcctctggattgctgctctttccctgttcctgtaatgttcctctacttggataactcatgttaacccttcaggcctcagctaggtggtctcctcccctaggaagctattcttgacactataccctragcttccamaggatggtaagttcacccatgctgtgctgcagttacctgactggttttctgctttccccacttgactgagttgtaagagtgcaggggccatgtctcagttacctagcatagtgccaggcacaaagtaggcactcatcaatatttattgaaatcaaggggaagtgtgttggggtgggagtacctgggcctatggccccacccatgtgaggtcatgaggacagtccacagctgaagcacatggacctttgccatgttggctggctctgggcggcgagtcccccttggggtttcactaagcctaactgtggaggctgggggagatgaagtagatgcagggagtgcatgtgtagtgtgtacctgtatgagtgggtggcttccaggcagtggttcacttattttaacttacagaatcttttcctggktttatcatctgacttgtaaggatcccaagggagcgaaaactgtgccatctgtctttgcttcttgaggctgtgggaacccagtgtgaggtggtgcagcaggagagtgtttggatgggtttcttggcagaggagcccactgaggttcggaaggatggtggaacttgactcaattgagagaagtacataaggcggaggctcaggcatggtggcacagtctgaaaatggtgggagtagctaagctcaggcaggctgtgctcaggcaggggtggtatgtgggcctggcaaggaaaggggctagtcaggcagatgcatgggtagacaaggcaggcataattctgcaggcaaagcggacctggggaggagaagggatgagcagtgaccgagcmrggcaatagccagraactgattgcggattgggaatgtggaggcctcagactcttgccctcaactggcctgcaggatcttggggccttggctagagccattggctgcaaagcttcctccactagcatggcagtaaatctggtcccagtgctctctgggaaaatattcaaggcaaaacaaacaaacaaacaaatcaagtcttccytctcctccttccttctagcttgcacgagccaccgttcgtgatcccaagacaggagtcctcactgtcgccagctaccgggtttccaaaaggtaagcaaagagcaggggttcgtagctgctcaagccccaacttcaggacttctcagtgcctaccctagggatgggtggcttgccttttcctgcctgctggcacctcctcacccccttgcagcaggcatcctgtactrcctgttcatgctggccctgactctggggacagagttcaggacctcatggaagcctgcccttccrtcttcttttctctgcccttttctttytgcccagctcctggctagaggaagatgatgaccctgttgtggcccgagtaaatcgtcggatgcagcatatcacagggttaacagtaaagactgcagaattgttacaggtacagatagtacctgggactgtaggagttgggaagtgggtatttgtggctagatggtctcacagggtgtccagaactgggccaagaggcccaactgtatgactactgcctgatgctatgaatatggagtgatctcattttaggaaaccagaattaatcatgcctgctggctttcaacaattagtgttcaacaaatatctattgagcatctkctgtgtgcccaagtgtgctgcaagctagggatcaggggtagttatggtaggttcgttcatgtcttcttgacaacagaagctcaaatcctgaatggtctcagggacatctctaagagagctaaaaatgacttcagaggccatggttctgtgtcataatcaaatacatttgaaggtcaaagtattctgtgtgttttctcctgctgraccacaactgaagttgctccaaaagcagcagcaggggacttcccatgagggactgccaagatggggtcagttgagaattcaaagaaagcggcactaaacccctgggtcttcagtccacagcatttattagggaacttgcagagtgggctgcagcaatcctcaaaatggacagcaagagacaagaattgttttacctaagtatttccacagtgagggagtcagagtgtggagtttatttgagggtttagggaatttggttcagggctggggctagtttctttcagtgttatgggcaacaacctaaacaccttcatcagtgcctgggaatgttgaagactccagcttgtgttccagcctgaagggaaaaacctgcagctggctgggtcacagagctgtcaagggagtctgattttcagtcagaacaaagaaagaaaggcggggtgggtctgggggaccttacactgtgatatgtaggtggaagtgagaggcctggactggttaagctggtgcaggtggaatgttcttgtccaagtactcccactgggaccctggcttcctgcctttattcagaggtgattttgaagaaatgtggcagcaccctgctgaaaggttttgggtaaagctccttattaaagtatcctcttgggtaaagcttagtaaagtgtcctcttgggtattgagtccaaatcagcactggctatgttcccttataaatattggaacttctgtgttctgttgtaaaattgatgacctgagacaccrtcrgagaagtttcactggcatctttctagaggcctctgggtctctctgtttggccaaagtttctgtatacttaaagatagcagcctttacctttaggattggcatttgggtctgatctaccatagatctcattagaatattgattaaagatcatttggaaaagattttttgaacttttgcttggacacgcctaagcaaatcagccttctttttgttgttttttctgtgtagctgcatcagcaattggaaaatcaattttgaaggtcatctttatggattggtgtgaagtctaccagagttttaaaaagcatactgattaccttgcaaatagtactgtgaaattttaatttttttttcagttcagctcaacttagtgttttgtaatttttaaataaattctgcmgataagcacatccatggaggacttctgcctcatctcccacttgctgcgtatgtgtaagagcaccaccatttcaagagtgataggcactcttgatgtgctagatgagtccctgttggcattgtcttgattcatatcttcttggagcaggtttttgtttttgtttttaaagacatctgccactgcttcctctgtgttagagccagtcttcaggactttcatggtcctgatcaaagaccacagtctgcttggctgatttcataccctggaccaagaggctgagtagacaggacctgtggctctgttgctttcctggctagctgtgcggctgtactcactgtatccctgtcttacactcacccgtggaagatagcagcttcttgcctatggactgacttctctgctacaattcagcctttatcttgtctggcctctcattgtgttgtagctcaattgtctggggcccgaatgccagacctcttggtagaggggctcttatagttaaggatcttctggaaattcagaccacagctgccaagtggttgagatgccatttttgtttgtattcttctcctaggaactgtctcgacatttcctttgccagtcagtggtattgaaggctttgatccttcatggtctggggaacaggaacctgggtttcagcatgtatccctaagtgcttactccatatgaaatgcttgtggtatgatacatgcctaggcaccagcaacagccctcacaccaggtcctttaggaaatgctgcaggcctctggaaaggagctggttcttctatctgttgacattctttcagctgtagctcacatgtttgctgtagatcatttgaaggaaaaaggtaattgaggctttctggtgaattggatgagggcttatctgatagagaggaagagatgctacacctctaggattctaaagattgaagactttggctgcatgatgtctcagcctcaccagaaaagtgatttctgacctttttaattttgcctttactctgtccttagcattgtaaatacccacdtctttcaaataactgaccccactcttacaatagtaagtctaaagatttaagtgaatacctcctcacatgaatyggtcttgacgtacagtttcttgttattaaaggcgtgagcctggggacttgagtatgcctggatagggaatcttactgctgcaaatctagatggtcctatgcattttgtacttatttgggaactgtattaaagaaagtaggtacggtggcttcagaaccataatcaaatataattctccaaacctaaaagatgagccagctctcgcaatgcagcttctttcactgcctgggatttgtaaatttaagcaatccatttaacaagtggaagtattggaaaatgcagtcatactttgcagctccagcaacaagcactaattgaattttcctgagtgtacctgcacagcagtcacagttgtgtttaaaattttcttccatgccaggtgtcgtggcttacatctgtaactcagtacttggggagaccaaggcaggaggattgctcgaagccaggagtttgagaccagtctgggcaacatagtgagactctgtctctacccccactccccccaaaaaaaaggagagagaaaaaaattttcttcaagctcttgactacaaaaagagatatgctttctcagctgctctggcacttctctccttagatgcatctccagccttagggccacctgctgaaccaggcttccttgtgctgttgacaggatttccaggtatttttggtacaggaatcttaaaggctgaagcaatggatgacaacatgttttcatccatgctttgtattaaaatttttatttttgtagacatggaaaatgatactgccaacattttgtgctctaataagaggatttcatctcttataaagtccactgtccctttctttcttgcatttctttttttgtgtgtatgtgaaacagggtctcactctgttgcccaggctrgagtgcagtggcacagtcatagctcagtgcaaccttgaactcctgtgctcaagcaatcctcctgcctcagcttcctgagtagctgggactacaggtgcacgccactgtgcccagctaattttttcattagtagagacagatggggtcttgctatgttgcccaggctggtctcaaacttctgagctcaagcagtcctctcacttcagcctcccaaagtgctgggattacaggcgtgagccaacacgcctggcttctgtcccacgtttttataggtctctgttattgctagttttgtagcatctctcacctgactgttgggattgcagaaaaggatatacaaaaaataccaactttctgagaacttatggcctagccccagaggtttttatgttttcagtgagacacaatagccaactgttcccagatggacattggtggtgctacttgatccatcagcttccatgtcagattctgtgcttcatctttaaccttgtctctcattctgtctactgacgctgagacaataattgtgatttaggacttcccattgtgctgataagctgtccacaaaggcatttacaatttctaatccaatttatgacacctggtagttgctcagatgttacttcaggtccagggtcacactggggttgctgatgtagcacggtaattcttgactgcctggcagctggccacccatgttgtgctgtttcactccatgcagtagaccactgtgggmgtctgccccactcagtctcaccaggaatagcagaggtggtaggaacagtgccaggtgctgagtacctccaaaactagtttaaaaaagaaaatcctcgtcttaaatttgttactcactttcctctggattactttcttaatatgtcccaaacaaactgggtccaggccagggcccgcctcaagcagtgttccctttgctgctgtctgagtgtccatgaagggctggtgcttttcctcagtgatcatatgcagttcacccatcttgttttgtttgggaaaccacatttgtgccgcagccttactcttggacagaactgtagacttgtttgtgatgtttgctctgcctgtgctgccagggcatggttgtcttccaccttagagaggctgctcttgggagttctggttgttttcaggcctgggaagatggtatccctagagtgattggctgctacagagctgttcatgctgcttacaaggtctaatgctgttatttccyacaggttgcaaattatggagtgggaggacagtatgaaccgcacttcgacttctctagggtaaggcctaaatcacaggtgctttcaaagggccctgctctagctgatttgagaagggtggagcttctaggarcatttcagcctccacatcagtacccccaycccttgtcctccctccacctctgcatcaccaggggaaactcttcgttactggtgaatcccaaatctggaaccaagggtcctgcagaatrcagtggagcctggctgtctcccctgtagatgtggggcgttcgtcccctgccctaattctgtcaccctttgccctgattctaaagcaaagagcctcactaggtctttgtgaaaactgttcttgtcccttttcctcttccccgtctactccatgccctagccagaatttactttgcagctttggcacatattccaggctgatttatggaacacacacttattacttttccctgacccttttggtcctagtcttgtgggtggtggatgaagcctgttgtaaacttgggtgaaagttgttgtctgttgcagcgaccttttgacagcggcctcaaaacagaggggaataggttagcgacgtttcttaactacgtaagtactgggtccaggcccacctgttcattctcacttaattttgtagaatgatgagcgagatactttcaagcatttagggacggggaatcgtgtggctactttcttaaactacgtgagtatgatgtgtgctgatgagccctaaggggaccctgggtccagagggctgccttatatcccayccccatcagggctgatctcatctgctgttaagtaatggtcaggtccttctggctctcagcacccttcttggctgcagtagggagagttggcctctgtttctattcattttccccactgccaccagcaggactttaacattcctggctcctatttttttccccagtgtttaaaattgtgataaaacagacataacataaaacttaccatcttaaccattttttaaatgtacggttcagtggtattaaatacattcatagtgcgcaagcatcaccaccattcatttccatctattttcatcatctaaaactgaaactctacccattaagcaataattccagattcccctcctgcagctcctggcagccaccattctgctttctgtcgctrtgattttggttacttaaataaatggaatcaaagtattaacacttgtctttttgtgtggctggtgcataatgtcctcaaggtttatccatgttgtagcatattctggcttcttcttcttctttttttttttttttttttttttggagatggagtcttgctctgtcacccagactggagtgcagtggtgggatctcggctcactgcaacctcagcctcccaggttcgagtgattctcatacctcagccttccaagcagctgggattataggcgctagccacaacgcctggctaatttttgtatttttagtagagatagggtttcaccatgttggccaggctggtctcaaactcccgacctcaggtgatccgcccccctcggcctcccaaagtgctgggattacaggcgtgagccactgcgccctgccattctggttcctttttgatgggcccagtgctagtctggacttttgggatgggtgccctggagggttccctccttggcatcagagtgaggagatagccttagctctctctagatgagagctgcctttgtgttctccaaggcttaatggcctgattcccacctcttgcctctgttttatccataggttgtagggtttatctttcacatgaggagcagtttcctctcccctctgctgagagccagctctaaagaggcatagaggcagtaaagtaacttggagacagaagcctgtgtccattttttccctttatgcttttattgtgtggttattacatgctggggattgtgctgtgtacatgctggtgagcagaacatatgtggtctcycttgtgcttgaggtccaatatgagagacttattttaaacatcagagagattcttctttatcttttttttttttttttttttgagacagactctccctctgttgcccaggctggagtgcagtggcgctatctcagcttactgcaaactctgcctcccaggttcaagcgattctcctgcctcagcctcccaagtagctgggattataggcgtgcaccaccatgcccagctaatttttgtatttttagtagagatgaggtttcaccatcttggccagactggtctcaagctcctgacctcaagtgatccacccgccttggcctcccaaagtgctggcattacaggcgtgagccaccatgcccagcctaaacatcagagagattattatgtagttatggagacaggtgctgtgaaccccaggcttggggttcagtggaggcctctctttggaagtaacatatcagttgagacttaaaagttgagtggaaattagctggtagaacatggtttctggcagaagagagagtgtatgtagtcctgtaagagaaaaggaacttgggatgttggaaaggtagaaaaaggctggtgtgtctggagagaggctagtgagactgacagggccttggggttctagaaaagaatctgagtttgatccacagggctgtgagaagccatcagagcttttgtcttattcatttaccatatgtctgtcaagtacccttcagtgagtctggtatgtgtcctgtggaaatattttttacctccaatttttattaaattatggacaaaaaaagtaagagagccagatgggaaagaagtagtgctttggccatgagtcaaggcatgctctgtgggcatgagtacagccttgctagtgtggaacttgtgttcaatgtagtttaaggccttaccataggagaaagcagggcctctagagacacagtgccccacccttccactcagttggccccaggaagggtggctactctgggaaggtgaaggtctgactagagcagcaaactactagagccagagaaacagagctgcagtggggactgcacatggtgttggaaacagtacagagctcctggtcagggcactttgcagagtacagtggcttaggcaaggccaaggctagatggggattcaaagggtggggtcagaacaggcattttctgagtacagactcagattattttcatccagggacagcccggatgtgggtctcctgtgggcctcaactcttgaacactcatgacatggagactgttctaatgaatcacactggttaagtaggcatgggaagagcctttcttggctaaagggctggccatggagcagacaccaagtagtgtcactcatgctgagaggagggcaatctatataccttgtcatgtcctttgtggctcaattgctctgagagccttgggtaggagggtcaagctctatgtcttatatttccagatgagtgatgtagaagctggtggtgccaccgtcttccctgatctgggggctgcaatttggcctaagaaggtaagttctgattcttgtgggtcagaggttgaagcaaggctcagactttactttgtccatgtcccccagtaccattacctggcctgcctgattgtcactgtgatgtgccttagcccacctggggtctgacctggtagcccagcttctccctgtgaagaaaggacagggagggaagtcccttcaggggygggtgagttcccagacttctacctcagaaaggtaggtgctttctgggaaatgtctctgttgctggagtcccagagccctatcccctgtccatgggaaaatgagggtgtttctgctcagggcagagcttctgtgatgcttgcagtcaggtccctgagcacagtytcttaagaatgtgttctgaaaggccatctctttcccagggtacagctgtgttctggtacaacctcttgcggagcggggaaggtgactaccgaacaagacatgctgcctgccctgtgcttgtgggctgcaagtggggtgagtgtcttaaggggtagtgttggtgttggtggcctcagcttgggctttgcttattggccttagattctgagctgggaggcaactgctgccaaatttgctgagactgtctcccttcttaggtttttttctgctgttattaccatccagccatgtaatgtccatgcagctggtaaaygccaaggcagctggttggaaacactcagaratacacaggaagctgaagaaggcctgaggacgaatagctgcataagcaccataggtccaggaccctctggcaaggcttctgagggagcagagtggagagctggaagcagtgaggggaaagagtgtctcaggcaaacaaggcccatatggatggaggcacaggctaaaaccagcatacgggtgtgggggctggctcccttgtcacttgaagaaagggaggcctgtggcacaggggccagaagatgaggctggaggctgggaccaaactgcagaggctcaagcttgagccttatcctgggagcagttgtggtgagcctcggagaggctcaaaccaggatatgacaggaagtgtttgtaaggagatgagtgtgtagcccccttggagagttttgaagataaatagtgataggtttgcagataattaagcaaatggaaaagaaaacaaggcagttgctgaattcaggggaaaaaaagttgtacaagaaaggaaatgtaagtataatctactagatggctcaggtgtaacacatgatataattatgtacacactgagtattactttaactaaaacttatgatttacctgtactggaaaggtgggaggggatgagtttgtgttttaggggtagaataaaagaattccaaagttgaaagtcaaggaatagaactataagcatcttatctagaaaaatgaggttaaatatcagaagaaacagctagaggagtttaatgttccctgggagtggagattagggatgggaaggagaggcttaggaggagtgctatttatcattataagccttgcgacaattttatttttttcaatgaagtacatgttattactttatattttaaaagctctgtgacttcagtagtgcattgaaataaaatttttattcattatgagagagtctgtgaggaacagaatcatggttcctgtgtgtttgaagatatggcgtggggtgatagtgctggcagcagctctgttgctcttgtgcccatggcatacagactggatctgctggtccacggctcctgaggttaatgtccaagccctctgcaatgctgacagtcttcctcatcctcacaccctacctctcagtttctacctgccacctcccagtaatattaggcctcttgagtccccaacacacgtcagggtggcttctgccttgattactttctcatcctgttgtcactcctgggaccctcttggtgagagaaccatctgggtatgcccatcttcttcccaggataacttctatgtagctttatattctagccctaggatttcctcttccctctaagagcaagaaacatgtgtgcaggttgccatgggaatagagccaaagggcatcaaaggtcatgggcatgaaagggcatgattagatgcccttgggtgctattcccatggcaacctgcacacatgtatcttgtcccactggcagaatttcatacaattatctgtttacatgtgtcttccttaccaattcttcagcaaattgaggcctgagatcatgtcttgtcttatttgtgtctgattccagggcacagtgcagggggtcwtcatgaaggagtcattcattcaggctactaaactgaccaataggattgtaacatgcttgctttcttttcacagtctccaataagtggttccatgaacgaggacaggagttcttgagaccttgtggatcaacagaagttgactgacatccttttctgtccttccccttcctggtccttcagcccatgtcaacgtgacagacacctttgtatgttcctttgtatgttcctatcaggctgatttttggagaaatgaawgtttgtctggagcagagggagaccatactagggcgactcctgtgtgactgaagtcccagcccttccattcagcctgtgccatccctggccccaaggctaggatcaaagtggctgcagcagagttagctgtctagcgcctagcaaggtgcctttgtacctcaggtgttttaggtgtgagatgtttcagtgaaccaaagttctgataccttgtttacatgtttgtttttatggcatttctatctattgtggctttaccaaaaaataaaatgtccctaccagaagccttaaagagccttacttggagtatttttaagactggaagcttttaccaggttcatcatttcctatgcatcacmttcatgcaggcagagtctggataatgaatgctttagcagcaaaaaagcatcttgggtcttggatttcagacctggtttcaacmcttgtgttccctctaagtgtcagtgtccttttctggaaagtagggtaaatagtttctctttgtctcccagagaacatagcacatgtgttcatgattgtaatgctgttataatgtgtacttcatttttaaattttgagataagaattgttcatgatacacagatgtatacttaaaaaaatatgaaggtgagcaggagcacctgtgtcaacaccaagttagaaaagagaacgttttcaagtcagtacctcaggagccccttgggaacccctcctagatcacatctccttcactgcccccagcactttggagataaatcattgtctcatgatgtgtggtactcattcctttgcttgtctttatagttttaccatctatgattagatccctaaataagtagttattctgttttccctgattttgaacttttactaatagaatragagtaaatatttttgggtatgtggcttcttttgttcaacattgttttaagattcatccgtgttgcttgtgtagctgtaatttgttttaatctttatagtacattcagttttgttaatgcttattgtaggactgtaccataatacaggcagcatgctgctgataaacactggaattgatttcagtctttgtatattgtgaataatgctgtgataaacatttttatacatgattcctggtgcacatataaacacatatttctgtaggatatatatctaggagtggaaatgtggagtcttaatggtgttccaactttactaaataatgtattccaaggtggttatacacattctcaccaggagtaaatgagagttattaccccaatcttttccagtatttagtattttcatacttttgaattttagctagcttggtacatgttacggactaaatgtttgtgtccccccaccagattcatatgttgaaatctttttttttttttttttttttgagacggagtctcgctctgtcgcccaggctggagtgcagtggcgggatctcggctcactgcaagctccgcctcccgggttcacgccattctcctgcctcagcctcccaagtagctgggactacaggcgcccgccactacgcccggctaattttttgtatttttagtagagacggggtttcaccgttttagccgggatggtctcgatctcctgacctcgtgatccgcccgcctcggcctcccaaagtgctgggattacaggcgtgagccaccgcgcccggcccatatgttgaaatcttaacccccaatgtgatgatattaggatgcggagcccttgggaggtcgtaagcatggagcccacgtgagtgggattagtgcccttatgaagagatcccagccctctttctgccatgcgaacacacagcaagaagatgcctgtctatgaaccagggggcccttaccagaaacaaacctactagcatcttgatctcggactttccagttcccataaccatgagaaataaatgtttttaattcaatgtatggtattttattatagcagctctacctaagacagtacatgtatagtgtctatttgaacattactgataatgttgaacaacttttcatgtttattagttattaggtttcttcaagtgttcttattcatacaaattttaaaatatgtacacaagttctttgttatatattttgcaaatatcttctgtggcttgtcttttcactattttagttctgtcttttgataaacaggagcttttaatttttatgtcaaatctatcaagctttttctttttgatttatgttttttatgtcttatttgagaaatccttctataccccaagatcatgaggatgtttcctgtgttctcttctgaaagctatatagtctttgtcatttaggtttatctttatacgtggtatgaagtgtaaagttctacttttaattttttgcatattttattaggataggatgggctttttctgtagtaataatccctaaatctcaggggcttaatatataaaattgtctcatgcaaaaaaccactgggtctagggcaattgctatctactgccgtctaatctccctctagtggcttccattggtagaccctaacaggaagccagctgataagggaatctgggaaatgtagtttacagagtggcagctacagtagaacagtagagactacaaggatgagcttgcagctgagaatagaaacgtgactggcacactaggtggtttgtttgtaggttttttcttttcctgtttgagacttttttggattcttgaatttgtacaatggtatccttaatcaattgtggaaaattaaatgattttttctttcagcattgtctgtttcttctgtaactgattaaatgtaagttggatcatatcatgatattatctcttaatctgtctttcatatttttatatatatgctatatttggggagaactttatagctgttttgtacaaagttcactaattctgtcttctatcaagtgcatacaggagtctgtttaaggactttaaagatgtaattctttgttttctggcttataccatttctgttgaaaagtcgctatctggtcctttgttgttcctttgaaggtgattttgccttcacctggctgctttaaagatttttttctttttggttttcagtagttttactatggtgtacttagtatgggtttctttttcttttcttgcttggcatttagcttcttgaatttctgggttgatgtctgatcaattttggaaatttctcagacattatatcttcaactattgtttctgtcccattttttctctatctgctctgagacttcagtaatctgaatgttagaacttttcatagtgctctatatatctccagttcttgtgtctctcatgcttttttctttgtgtttcagactagatattttatactgatctgtcttgcaattcatttattacttttgctgctaaacccatctactgagttcttaatttcatttttcttatatttctcagttctaaaatatccattcatgtcttttttttttttttttttccttgagacggagtctttctctgtcacccaggctcgagtgcagtggcgggatctcagctcactgcaccctctgtctcccagattaaagcaattttcccacctcagcctcccaagtagttgggattagaggcacgcaccaccacacccagctaatttttgtatttttagtagagatggggttttgtcatgttggccaggctggtcgcaaactcctgacctcaagtgatccacctgcctcagcctcccaaaatgttgggattacaggcgtgagccaccacggttggcccattcatgtccttttaatggattttaactctctggagaatctgtcttctgttttctctgtgtttttctcggactgataaatcagttatgtgaatttttttgtccgataacgccatgatttcgattttctatggctctctttctattgtctttttccctccttagtttctggtcatttggtccactctgttgatatgcctggcaatttttgattgaatgtgtatgacaaattgtagagcctctggatggataacctcctgcacaaagggctcaccctttcctctactatgcagagtggggatcaatcaccttaatccagtaaggatctgagctgacttaaaattaagactgggtggtagttttcttaagactctatctctggtttacccttatttccccccttataggatgtagtcctccaggattttctaattgagagcctagtgtgttcactggatctgtttccactggcagttcctcaactctaattcttgtcttctcagtaccagactcagcccaaaaaatttatcctccttttcaaagaatttgaatttttgaatctaagcagatattttttgcttaccttcttagccttgcattctgcacagcgtcagaattcagaaaatgcctcagtgggtaaacaggctgagtggccaagttctccactcctccctcttattcaatattctgagaaactactggctaattttggtttttcaatgccccttgacactgtcaaaaattattttggtttctctgcctcttagtagttgcccattgctctggatcctcattcttaccccatggctacaatcagtaaataataataataataataataattattattattattattattattattattattttgaggtggagtctggctctgtcacccaggttggagtacagtggtgcaatctcggctcactgcaagctccgcctcccgggttcacgccattctcctgcctcagcctcccgagtagccgggactacaggtgcccaccaccacgcccggctaattttttgtattttttagtagagatgggggttcactgtgttagtcaggatggtctcaatctcctgacctcgtgatctgtccgcctcggcctcccaaagtgctgggattataggcatgagccaccacgcccggccagtaaattgtttaaggataaaagagactacagacttttggctcacccacaagatttatccttcttcaggatcttgatgctcaaactctttttgcttcagcaattgactgatgtcttccaacaattttaagagattttattcagctttattctaggaatgaaaattggtctaccataagctactctatcttggaagtagaagtggcctattcattttttaaaaaatcatttttcctatactgatacagaaaaccttatctttcatatcttcttttgttacctagtataacaagacgcttcacactcatcttgagcatttctgacattaagcatggaatcagccgttaaagaatcttattatatgttgatgtctgcctatcaatcccagcatggtcctgggaacaagcatgagataacttctgtcttagagccagggcactgctttcagcaatccttattaattgagcttggcattaatatgttcactagggcagtaaagagttattgagcgtttcattatgcatttggtactgtgctagggatgttacagtctattactgcattcagcaactcttcagaacgaatacataagaagcagaacgtcagaaaggttaggtaatatacctgaggtcacatgaagtctcattgctggtaagtggaggacctgggaatgaaactgtggcagcttccaaaagcctttgctctaaaacaaaatttatattttcatgcatttaacagttattaaagatttgatggggaaacataaagactgtctttatctttaaagaattctgagcaatggaagggactcataaataggtgtgtgaaatgtgagaagtctggtaacagagaatgtgcttgaggagcacagtagagtgaaggtctactttaaccaagaagttggcactacagtaggcaccgttggagctgggtcttgaagtatgagcaggaatttgtttactgtgctatcctagtttaaaatacatgcacgtggcttaaaaaataagggacaaaggaaattaccctaaatagttgctgtcccaccttactgccaactcctagtcccccttcctagaggaaccttttcaaattattttaaatttttctgcctattaaatgcttataaaatgctgttccttgatttttccacttcagaaatttgagagatgatcatttagtttatattcactatctcccatggtacctccccctgcctttgccattttttgatagttatattttgtatagtcctctcttgtttgcctggcaacataaatttttttgtttggttaaaactaagatggtgagatgaagatctaaactagaattttaccaaacaaatgatcactattgtctagccaagttgacacatagaattaagtatcatatacccttttgtctcccaactgccggtcagttatgctttggacattattttagtagccatagtaagttgcttctaaaagtgaaaaacacaaatgttatgtttcttaatttcgttgaattagtcactataatgttgatgtagctaatcataaaaaggaatttgtgtcttatttgtctaatagaattcaaaatgaatttataatgtatataatttgatagggctacaataacaaaataccacacactgggtggatcaaacaaaaggaatttgttttcttactgttccagaggctagaagtctaggatcaaggtgtcaacaggttgtgtttcttctgaggcctcactgcctggcttggtctgtgtgttgtctatgtcacctcttggtctatgtgttgtctatgtcatatcggattaaagcctgcacatatgaactcattttactttaattatgtctttaatgccctgttgccaaatacagtcacatattgggttaggactttagcatatgaattttgggagaacacataaaactactaggaaatcatgttagatctgatatactattgagactaaagcaaaatacttttccttactctttgtacatcagatatagcccatcatgaacaaatgtatctgattattaagtatgtttgc

SEQ ID NO: 95186 - DNA, 105087 bp, Homo sapiens
ctgaaggtccattagcaccaggctttaaaggttttgctaatggagagcgaatgaacccagaaggaagaagtgacgcagaagcagtgggaatcaaagagtttgataaatatgctggtaaacctaaatgaataatgctggtttaaaaataactgatttcatttgttttgtttcttatttgaagacaatgaggaacaaaaatgctaaatagtgataatgtggaaggtggggggtgatcttctggcacattttacagtccttgtattgttcagaaggatcctaatgatattaactctggacttcaaaatagtaatgtgaaaaatttaagagtgcccagtaaaagaatagaaatagaatgtgtattttccaaatcagtagagtaaaacaaggaataaagaaagcttggatattctacaaagcaggaaaggagacaaagaaacaaagaaaaagcacaggaataagacatatgcctaaatttaccagcaatcacagtaattgaaaacagatgaaagtcatttattaaaaggcaaatactataaaattgcattagaaatcatctatcagctattttcaagagatacacaatgcaaaacaacataggaagtttggatgcaaagatacatagcaggtcctagaataactttgttataacattcacgagaaaacaataattaattcttggccaggctgtgtggagtttgcacatttcctaatgtctgtgtggggtttctctgggtactccagtttcctctcacatcccaaatatgtgcatgtgaggtgaattggcatgtctacatagtcccagtctgcgtgtgtgtgtgtgtgcgtgcatgcatgtgtgtgtgttctgtgatggaatggcatcctgttcagggttggtgcccacctcgcaccctgagctgatgggaaaagctccagccacctgcaaacttgaactggaatagttgggcaaatacttattttacttgcttttatgaatctttcttaaatgtatctattgctcacatttgtttcaatgtttaatattgaatagaagtgttttcatctttatttataagtttgatgatatttttatgaccaaaaatatgttctacgaacttgtctcttgtttatatcaactagcctatgataaaattggtttcacttcccttaaattgcaatttctaagaacgaatccatactagtcaaaagaaagctcatgtaccaatattaatatcagaaaaaagggagaattatgttagaaagtattgtaagaataaagaggttctcaggctgggcgcagcggctcaagcctgtaatcccagcactttgggagggtggttcatgaggtcaagagatcgagaccatcctggccaacatagtgaaaccccgtctctactaaaaatacaaaaattagctgggcttggtggtgcacgcctgtagtcccagctactcgggaggctgaggcaggagaatcgcttgaacccgggaggcagaggttgcagtgagccgagattgcgccactgcactccagcctggcaacagagcgagactctgtctcaaaaacaaaaacaacaacaacaacaacaaaaaacaaagaataaagaagttctctattaggtataaaacagtatctcatagtagttttattttttatttcattaattttagcaccagtgaaactaaatattttttggaagtagtagtttactaagaagtggagacttcactgatttgcctttttattttagggattaatcattttgattacaaatcttttccaccccaatcctagagcttttatcttagttttatagtttccattgttacaaagttgaaatttttttgtaatggaacctggttaccttggcatgtccatttttttccttcaactcactattttttttctgaagtattttaaattacagacaacatgacacactatcactaatacttccatatgcatctcaaaaaagatcattttcttacatagcaaaatattatcacaccaaatacaatgaaattaacaagaattattattatttttgagatagagtcctgctctgtcacccaggctggagtgcagtggcgtgatcttggctcactgcaacctctacctcccgggttcagcgattttcctgcctcagcctcctgagtagctaggactacaggtgcatgccaccaggcccggctaattttttgcatttttagtagagacggggtttcaccgtgttagccaggatggtctcaatctcctggcctcatgatccgcctgcctcagagaatttttttattatctaatttccagtctacattgaaatttccctacttatctcccaaatttccttcacacatctatggcaaaaccagtttccaaactaggaccatgcattccattggggtggtatgtatctcaaatctcttaatttgcaacaaaatgttttttaataagtcttttaaaatctacaatagtctttgctttaatgataatgatctcctgagagcctgtgccagtgtcttgtaacagtttctagcttctggatttgccttttccaaccctgtgttgctgttagcttaatccttgtaattcctgtgaactgaaagttacatctaaaggtatgattagattcaagttcaacttttttccgtttttaagaaagcaaaactgcataagagataatgttgggtacttcatgctaagaccagagacgagcaatatcttatctcagtgattgctaatttcttatgctactttgggtcataaaattcccctttaaaagtagaggtaattacatttcttgcttcttcttttattgcttcccgaaatatctttctgaaattttatccaccagaacttacagtggtaagtaaagtaaagtgtagatttgcttttttcttcctactgatatccaagtctccacagtattcatttaaatggtcttggtggtggccgggcacgctggctcacgcctgtaatcccagcactttgggagcccgaggcgggcggatcgcgaggtcaggggatagagaccatcctggctaacacggtgaaaccccgtctctactaaaaatacaaaaattagccgggcgcggtggcgggcgcctgtagtcccagctacagtcctcagaggctgaggcagtagaatggcgtgaacccgggaggcggagcttccagtgagctgagatcgcgccactgcactccaacctgggcaacagagagagactccgtcttaaaaaaaaaaaaaaaaaaaaaggtcttggtggtttacacaaatgtttatatttgccaaaacacatggaattgtaccctggaaaagggtgaattttactgtatgttaattatgcttcaataaatctgacttaaaaaatggtcttggccaggcgcagtggctcacacctgtaatcccagcactttgggaggccgaggcgggtggatcacaaggttaggagttcgagaccagcttgaccaacatggtgaaaccccgtctctactaaaaatacaaaaaattagccaggtgtggtgccacgtgcctgtaatcccagctactcaggaggctgaggcagaagaatcacttgaacgcgggagatggaggttgcagtgagccaagatcgcaccattgcactccagtctgggtgacagagtgagactccatctcaaaaaaaaaaaaaaaaaaagtctccacttgaatagtcaattattcaaagatacacaaatggccaataaacacatgaaatgatgctactaataattattgaaatgcaaatcaaaattacaatgaggtatcacttcacactcatcaggatggctaccataaaaaaacataaaataacaagtgttggcaagcatatgtagaaattgaaacccttatgcactattggtgggaatgtcaaatggtacaaccactgtggaaaacagtatggcagttcctcaaataattaaaaattgaattactgtatgatctaataattccacttctgggtatatacccaaaagaattgaaagcagggtccagaagtgacatttgtacaccaatatatatagccacactattcacaatagctaaaatgtgaaagtaacccaaatgtccatcaatagatggataagcaaaatgtgatgtgtattgtaatgaatcttattcaaccttaaaaacgacctgaattctgatatatgctacagtggtccccaacctttttggcaccagggaccagtctcacggaagacagtttttccacagacaggagtggggtgatggttttgggatgaaactgttcgacctcacatcatcaggcattagattctcataaggaatgggcaagctagatcccttgcatggggcaacctacatctttctcatgggcagttcaaaatacggtttgtgctcctatgagaatctaatgcccccactgatctgaggcccagctcgggtggtaatgttcactcacctgctgctcacctcctactgtgccaccaggttcctaacaggccaggtatgcatactggtcagtgacccaggggttggggactgagctgcaacatggatgaaccttgaggacattataagtgaaatgagccagtcacaaaaagataaatactgtatgattccacttatatgaggtacttagtaaaaaattatagagacagtaagtagaatgttggttgtcagggtttggaggatgtggggaggaaagggttattgtttaatgggtagtttgttttgcaaagtgaaaagatttgtagaggttgaaaggtggtgacggttgtacgtgagtatacttaacaccactgaaatgtacacttggttaagatagtaaattctttttgagacggagtctcgctctgttgcccaggctggagtgcagtggtgcggtctcggctcactgcaagctccgcctcccgggttcatgccatactcctgcctcagcctcctgagtagctgggaccatcggcgcctgccaccatgcccggctaattttttgtgttttcagtagagacggggtttcaccgtgttagccaggatggtcttgatttcctgacctcgtgatccacccgtctcggcctcccaaagtgctgggattacaggcgtgagccaccgcgcctggccaagacagtaaattttatgtgtattttacaatttttaaaataaaaaaaggtctttcgtcttttcccattgttttattacatttgctttgccaagtaagacattcctatataattttaatgttttgttccattagttattttaactattttgtaataactgacactttccggtttttttaacctggtacagcaagagactatttctcactggtcttccccacttgcatcctttggcacatacatttatgtattaggttctgtaaattatttgcttgggattgtatgactggagaaacatttcctacatttttccaaggcaggcagaggcaaattataccactacagtaattccaaatttgtgtttcatttaaatgtcctccactattgtttcagtaatttttatgtatgtttctctaggcccttaaatgtgatatccctccattaagtttgtttccaagaaagcaatattctcagttacttctgagacaggtaacttctctttcccttatttttaaagatatctattgctgggagcactgatcggaatggattacctctacattcttcatatttgcagactgcttttagttttagttcccagacttttggtcttaaagacgcctttacactaaaaaattacgggggacctcaaagagcgtgtacgtgagttataattatcaacatttactcaattagaaattaaaattggtatttctaagcgcaagaatacacatgcgcacattccattaaccgccactgcaatggcgtcatcacatgttatgtgatcactggaaattactacacgaacgttagagagagaatgagaatgaaaaggaaaatagttttgacaygaactgaccccgcttcctgggtctccaatccaccccaccactacccccattccaggagtcccaggatcaagctttgggaagcgccatccgtcacaggtcttggtctccccttccaaaagtcagtgcctctccaggctgcccatccccagcaaagatccggaagtccgctgcccctggcaacagcacccagcacctagccctctgcttcgccgtaccgcacccggaagtcggagctgcgcacgcaccgcgggactctgatttcccggcgtgccccaggagagcggcgtggacgcgtgcgggcctagaggcccacgtgatccgcagggcggccgaggcaggaagctgtgagtgcgcggttgcggggtcgcattgtggctacggctttgcgtccccggcgggcagccccaggctggtccccgcctccgctctccccaccggcggggaaagcagctggtgtgggaggaaaggctccatcccccgccccctctctcccgctgttggctggcaggatcttttggcagtcctgtggcctcgctccccgcccggatcctcctgaccctgagattcgcgggtctcacgtcccgtgcacgccttgcttcggcctcagttaagcctttgtggrctccaggtccctggtgagattagaaacgtttgcaaacatgtcccggatcgaaaagatgagcattctgggcgtgcggagttttggaatagaggacaaagataagcaaattatcactttcttcagcccccttacaattttggttggacccaatggggcgggaaagacggtaagtcttcagtagccgccttcagtttacaggtcgctacatctttcggagaataaaatgggaagttgagaactctccttaggagcagaagcgtccctagggctccacaggtgtaggcccttaaagtgccttagggtgtggcctgcaggctacagcgaccttaggagtttgcctgaagcagtcycggaaggatgtccggacctggcctggggacaaggtttacttaagaatcccacgataccgggagctgtcgccgctcactcagagttcagttcccactggatgccctttggtctgtattgatgtttttaacgctgtctccttgctttcaaagcatagcattcacttcccagtagttgtcccatacaagaattcctttaaaagttataaaatgatacatacatgactaaagagtttccaagtatgccaactgtccagacataatacatggaaaataaataaattcaaaatgtaactgatgtagtggggcttaacttggaaaacttctcttcttaaaactcagtcaaaaatttaacgttggtgcacgactgacttttttttttttttaaagccgtgggaatatttataaatttgaatggaaagaataaccaagaggcattctggtcaggaatagtggcttaagaaaaagcaagacgatgtcagtatagcagggagaagagtctaaaggaaggatttgtgaagagtgtagaaagagagaaggttgagaattgaatgccaaacttgtttacttttgtttttgtaaaaatgttatttgttgaatgcttgttatgtacttaggattgtactaaatactagcagaagggagagtagtactgtatagtgtttatgaggactggctgcctcaatacagctttttcgcttcatttattagttgtctgaktgtttgcgagtgacctcactgctctgtgccttagttttctcatttataaaatggagattaaaaatagtttctacagctgggcacggtggctcacgcctgtaatcccagcactttgggaggccgaggcgggtggatcacctgaggtcaggagttcgagaccagcctggccaacgtggcgaaaccccatctctaataaaaatacaaaaattagccaggcgtggtggcgcatgcctgtaatcctagctactggggaggccgaggcgggagaatcgcttgaaccggggaggtggaggttgcagtgagccgagatcacgccattgcactacaccagcctgggtgacagagggagactctctccccccmcaaaaaaaaaaaaaaaaaaaaaaaagtttctacaggctgggcatggtggctgacgactgtaatccgagccgtttgggaggctgaggctgggggattgcttgagcccaggaggtcgagaggtcgaggctgcagtaagccatgatcatgcagctgcactgcagcctgggcagcagaatgagaccctgtctcttaaacaaaaagttcctacagcctggagttaatgtgagaattaaataaatgtatgtaagagtgcttagtacaatacagtacttaactgttagccattcttattattaacttaaattagtttaaagggtttcagttgaaaataattatttttttcccaagtaacaattcttcatattaggataacttcttagttatatagcatttctgtgaacttacagcattaacacttaatcatatttttattacaggttttataatgtcagattttatcttttatagtttccatgataaataatatttttgtaatgaattcatattttatggtaaacttctgtggttctcttataacgaaataatgtaattttctatttctttagaccatcattgaatgtctaaaatatatttgtactggagatttccctcctggaaccaaaggaaatacatttgtacacgatcccaaggtaatggtgctagtacaattttgtatttttataattataaaaatgataatagcttattatagaaaacttggcactggaaaactataaagagaaatgaaagtcagccccacacagttttagcacccagtagtaaccgttgttgacattttcatgtgttttcctcctcctttaaatactgttttatatagctgatgtcatactcttaattttgtattctgggtttttttccccacttaacattatcatgaagtcctatgtcattaaaaaactatcatctgggtgtttggtatgtaagtgtttcttttaatctttatactgctttgtatgtctgagatattttctacttaaagtgcatgaacactttagtagttatgtaattttcttacattagattgctttcagtttttcattaaaatgtaccatgataagccaggcttgggggtgtgtgccaatactcccagatagctctagaggctgagatgggaggattgcttcagcccaggagttcaaggctagcctggacaatatagtgagacccactgtctagaaaaaaaagtatcatgataaaaatctttgtgtatgaatcattgtttgaattatggtgtttatactattcgtatgtgtaaaggacatagaatttggtctataggtttgtttttgcacatatagaagtgaaacaacaatacacacacacacacacacacacacayatatatatatagtttattcgtttttagtggggtcatgtgcctctctmgccgctccctgaccccagttccactatgttttygttacgtattcttccaagcttttttctgcttataaaaccatgtctacgtgagcacataaatgcattcacacatacatattttagcacattaatataattttatacttctattttattgtttttaattagtaaattgtattccattgagtttatatcctgtagtttattaaatgaccccctgttgattattatttgtttctaccttagtgtgattaaagataactctgtaattatgaaaatatttatgaattttcctcttagaaatgtaatagtatttagtacatttactgagtcctctccataatgactgtttcccaccttctctctccttaaatctacaatctactttccttaattgatgatcttgctttgtactttattgagaaataggaagaatcaaatgagaattcccttattttccaatcatcacatctacgaaactactgtacatacgtgcccatactgttttttcttggataaattatttgttgttttatctaaacatgaaccagctccttggaggctagatctcattgatccctcttatccacccaaggattttgcccttcagtttttccatctctctcctggatcagcagtttctcttgatggatcattcacatcagcatataaacatgctctggtatctctagtcttcaaacaaaaaactctccctttactccaatttaccctctagccattaccttttctctgttccaatatatttcaaaattcataagatttgtatgtcctcattgtctttacttcattgactcccatttttccctcaatctactccattcaggttttctttttttcctccactaaaagtgcctttgtaaggtcaccaataatctcaatgtgccagatagagtggtcagtttctaattctcattaacatcttgtcagatttgacacagttggctatttcttttttaaaatatatttccttcttggcttttgtgacactataatctcatagtttccttctttctcactggctatactttagtctttgttgggtctacctttgcttgatttctttttttttatgagacggagtcttgcactgttgcccaggctggagtgcagtgtggcatgatcttggcttactgcaacctctgtctctcaggttcaagctattcttgtgccttagcctcttgagtagctgggattacgggtgtgccaccacacccagctaatttttgtatttttagcagagacggggtttcatcatgttggccaggctggtctcaacctcctcacctcaggtgatccacctgcctcagtctcccaaagtgctgggattacagatgtgagccactgcacccaacctgcttgatttctaaaagccagtgtgacacaagagttggccatctttgcattaaccctcttccctatctctcttggatgagcttattcagtctaacggctttaagtactggttatgtgctggtaactaccacatttatatatttgaccctgacttctttccttaaytctagacatatatgtctagctgtttgtttggatatttaatgggcatctcaaatttaacatgttcaaaacagaactcttgattccttgtacccacttcctgcctacattctcagctctgttactacctcagtaccccacccccgccagttttgtaaatgatgtcatcatccctacataagcaattcttacctacccttctaaaatatgtcagaatttgtctacttcattccatcggccactgtgttcctgttccaagccaccatcatattccctttcaactattagaatcgtctcctaacttattttcctgccctcattcttgaagctctctctttctcacagagtaatcagagttgtcttttaaatattcattcaagagggaatgagttgttcaaaatctgggaagaaaacatttcattcagtctagttgcagagtccctgagcatggttggtgtgttcaaggaatgacaaggaagaacaagggaaaatggtagaaaataaagttagaaagataggagagactagatcctgtaggtccttggattctagtcttatttaaataggaatctgtctattgggagattttgagcagggaaaggacatggtctgatttatcttttaaagtgctcagtctggttgctgagagaagactgtcygtaggtagcaaagatagggcagagacaaattaagaagattttgtgatgatccaggtgagaaatataggtggcttcattaaggtagtggtagaatggtgagaaatgtttggatttaggatgtattttgaagatagaaccaacaaattagctaatggtttggataatggtgtatgaaagaagtaaaagcatcaagcataactccaaagtttttggcttgaacaactggataaaatagttttgtcatttattataataggggcactatggaaaaaatatttgggtggatctggtttaaacatgcaaattagggatatgtgttaaatatccaaaggagatgtccagttggcaagcagaagtctgttcaggaaagagattaggactggagaaagaaaattaggaatcattagtgtatacaggtagttccacatagttaatttttaaagcctgatgagatcaaatagagagtgaatatggaaaagatattcaagaccttaacctagagcactagagccgatgatgcctttagaaattgggaagaggaggagaagctagtaaaagagcaattcgttaagtaaggaaaactgagagagtggtgtcttggaagacaagagaataaagtgttataaggaggaaatcatcaactgtgtcaaatatgttgatagctcaagaaagaagaggagtgtttggatatgtggagtccgttgttgctcttgacaaaaccagttccagtaatcagagaaaagataaagaagtgaaacagaattattttatgaattttgttgtaagtggacacagacataggacagtagctgaagaggttaacaggataaaggaaagttttgttgttgttgttttattgtgtttttaaaagtgggatatactagagcatttgtagactgttgggaatgactctggacagaaacattgatgcaggagaggggataattacagagcacaattcttgagtaggcaaaaagagataagatccattgcccaactggaggggataccaggaacatccactgttatccattgtaacagggatttaggcagattatatgattggaaactttagtggtgaaagaatgagtaagttctcttttgattgcttttatattctcaaatgaaaaaagaaatgaagttactggttgagagtggcagaaggggttgattgagcctagaaaacatagaatagtttttaacctcagtaagtaaattgattaagggaggtgttctgggattacatgacagtgtcaggggttttgtgaaaatttaaagagagaccagccatcatggttatgtatgttttttcagtcttgttcagcccaagcactgaataaattggaaagttgcatttatccatggttggggatttggtaaatactatgaaggtaatgagaagcaaggaattgagtaccgatatggtttgaatttgtatctgcccaaatctcatgtcaaattgtaacccccattgttggaggaggggcctggtgggaggtgattgaatcatggaggtggatttcccccttgcagttcttgtgatagtaagttctcatgagatctgattgtttaaaagtgtgtagcacctcccccttcactctcttcctcctgttctggccgtgtaagatgtgccagcctcctcttcaccttctgccatgattgtaagtttcctgaggcctcygcagtcatgcttcctgtacagcctgcagaaccgtgagccaattaaacctcttttctttaaccagtttcaggtatytctttgtagcagtgagaaaacagactaatgcagaaagttggtaccgagagtagggtattgctataaagatagctgaaaatgtggaagtgactttggaactgggtaatgggtagaggttggaacagtttggagggctcaaaagaagacaggaagatgaggaaaagtttggaacttcctagagacttgttaaattattttgaccaaaatgctgacagtgatatgaataatgaagtctaggctgaggaggtctcagatggagataaggagcttactgagaactggagtaaaggtcactcttgcgatgctttagcaaagagactggcagcattktgcccctgctctaggaatctgtggaactttgaacttgaaagagatgatttagagtatttggtggaagaaatttccaggcagcaaaactttcaacatgtggcctggctgcttctagcagtatatgctcatatgtgcaagcaaagagatctgaaactggaacttatatttaaaagggaagcagagcataaaagtttggaaaatttgcaccctgatcatgtggtagaaaagaaaaacccattttctggggaggaattcaagccggctgcagaaatttgcataagtaaagaggagcagaatgtttaatagccaagacactggggaaaatggctagaaggcatttcagagatcttcacagcagcccctcccattacaggacactactccctgtgtttcagccactccagctccagccatggctaaaagggccccagatatatcttaagctgctgctccagaggctgcaagctgtaagccttggcagcttccacatggtgttaagcctggggttgcgcagagaacaagagttgaggcttgggagcctccacctagatttcaggggatgtatggaaacgtctggatgtccaggcagaagtctgcaggacttgttgcaggagggacctggttggggtgattggatcatgggggtagatttcccccttgctgttctcatgatagtgagtaaattctcatgagatctggttgtttaaaaatctgtcacaattccccctttactctttttcttctgctccagccatgtaagatgtgccagcatcccctttgccttctgccatgattgtaagtttcctgaggtctccccagtcttgcttcctgtatagcatgtggaactgtgagccaattaaacctcctttcattataagttacccagtttcaggttttttttttatagcagtgcaagaatgtacttatacaaccataatcttaatatattgacttaatcaatcctcctgtatgtaatcaatgtctcatcgttgcatcagggccctagcacctcatatgggctgactccatccctgtatgccagtcttccttatcctgcgtaggctcttgactcttcattctgactccctcatgggatgctttyccattctgtatacactttgacttctggtgctrgatcatgtcctcattccccgcccttctctgataccaggtggcctcttgcagggatgcccactgtactctgacctgaatctccccagatctgtgtcactgagagggtcactcttctcagtctgatactttataccaggtggcttcttgcaagaatgccgtctctactctatgatctgacttccccctagccgacttaaccctcaggtgggcccccttctcatcattatcaggctctgaatccccacactattccctggcgtggacactctgcktctgagctggatcccccctatttgtggattcctctttcatcctgctggaactctgataccattggactcttgaaactctgtctatgccaagctgtttccccatgagggtacccttctcagcctactcaagctcatttattccactctaggctgagttataggtgccttaaccttcagctggcatgaacacgcaccttcttctgccccacctaatggttttacractagattgtttggagaaagaagggtttttcttattttttattttattctttttgatagaaattgttctgaagtataatacacatttctttgttttaataattcaatctaaattacacttcacttttgaagtgactcttcttcaataagagtgtcaacaacaatgtagtgatagaaatgctacaagatagcccttgcttgaattctatttactaatttgatgtttgccgggtagctaggtcctcgaaaagtagatgccatggagaaagagtatgtgtatttggcttgctactcaggaacactgtaaacaaattaattttttgctgcataaatacatagctccttagttcaactactgtggattaaaccttcagcagaatgctctccttatgatgaaatgacagagtcaagtctgggctttcaaagctttatactgacctctggccacctcctcattgaaatgtctgtatcctaagaggctgtttctgagtagccagttcagcgacttcttcctctttacctccatcctcaacccttgtccaggctgccttcctatctctcctcgattattccctgcttcatgtcttgtctcagttcactctgttcaccctaaagacaaaataattcttctaaaatgcatatctacttcatgcaattcccctggttcaaaccatttagtgccatcaccttaaatccaaaagccttaccaagtttagaaggctgttaatttctgaaacattttaggttgatactcttcttttccctactttctatgccaaacattctgaaatttctgtagtcacgtagtgactcagatcttctcatctggttaacttctacccagattggtagaagtttcatttaaacattcacttcctttagactaccttccctgagctgtcctagataggttagatgctcctgctttgtactcccagattatcctgtgcttatgatggtgtttagcacaccttgtstacatttaacctrtcttgcatgcttcaaaggaaaaaaagtctgtcagtttgaaccaaaacaacacatgaaacctacaaagtgcctgtaaatatttgttgaatgattaattgaattagtatcaaagttaaattcatgccaagaagtcattaaaaagtcagcaaaggatctttaatgattttttttttttaaagcagaatccagtacttgtgatttgggttgcaacaaaataatgagtatcacacttatactcgcaagatgaataactgtaacactggaaaagtatgtgaaacaactattttcaggcattggaccacagataatgcagggctatattctttgagaaaggagaaacataaaaggtgattctgcattcattccagctttctacctgggaacactttgtaaactttggcacatggaattggaatccagtagagagctgggcagaattgggcatcactaggcagatgaaacaaagataggattttggatttgctaaagtgactggaaattgtagagcagagtactgaagtagggttgttgtgcagagatggtgtaccagaaatctgcataaggatcttttgagtctttggccaaatactaagctatccatgtataggatgagatttaatgagggctagtagagaacaactaccaaggtggcaagtggggctgtgagtgttgtattctaaaggtcacacmatgctgtgagacatttgagtcctgatgtgccagaatggagtgaccttgtggaactctccagtgttcacttgagacctcagaaaggcccacctaacaaatactgaaaccaggttttgatagaatcaagctgagttgccagtaaattaactggctgctagaacaaaactcaagactttttaaaggaagcctactcagtcgaagctctcaatgtggcatctacaatgtgcagaatataattttaaaaattaatgggaatatgcaaaagaaaatgtggtctatacctgagaagggaaaagtgagtagaagcagatccagagatgacagattttggaattagcagacaaggatttttttttaaattttttttaaatttttttttttgagatggagtctcactctgtttcccaggctggagtgcagtggcacaatctcggctcactgcaacctgtgcctcccaggttcaggcaattttcctgcctcagcctcccgagtagctggaactacaggtgcccacgaccatgcccggctrattttttatttttttattttttatttttagtagagacggggtttcaccatattagccaacctggtctcgaactcatgaccttgtgatccgcctgcctcggcctcccaaagtgctgggattgcaggcatgagccacgacgcccgaccggatttttttaaagctatgatagataagctcaaggacttaaaggaaaagatggacataatgtgtgggaagacatctaaacagagtaataaaaactataaaaaaagacccaagaagctgaatgcatcacaagcagcataaacataactatgttgtacattacattcaaattgytcaaaactaaatataaaatcttaaaaacaggtggaggaaaaagtaacacatcatgcagagggaaagaataatgagtatgattacttcttaggaaaagcaatctaaacctgaaaacagtgggacagcacctttaaggtgctagggaataaaagttaaactcctatatccagcaaaaatattctttgaaaattggaggtgaaatggaggacattttcagatttaaaacaaaatggtagaggtaatttgttacagacaggcttgcactatagtaattgttaaagaaagtttttgaggctgaaggaaaatgtcgaaaatgattgtaaattagtcctagagtaaaagctgctctaggtccccctttacagaccttaacaacaaaggttcaaaagaatccaactgtttgttgctcaaaaaacttaactgcatgccagaacaaagttcagtactcattaaaggaataaaacaaaatctttcacccaacaatacaaaattcacaatcaaaagttaacargcatccaaagaagcagggaaataggacccataatcagagaaaaatcaatcatatgaacagatccaaaatgaaagaaataatagaattagtagataagaaccctaaaaccttattataactcttataaatatgctcatagatataaaggaaaacataagcataatgagaaaaatggaaaataattttaaaaacccaaataaacggaataatggtgttttgtatataatggtacaaataggttaaaagcaaaaggattgaaaaaatatactgtgccagctaatgaaaagaaagctgaagtgaccatattaataccagacagaagacatcagaactagggaaaatgaaacattttatgatgakaagaggtcaatttaatgcaaggacacaaaaattctaaatgtaaaacttccaaatatatgaggcagaaacctatggaacagaatggagaaatacacaaatctgcaaggtcaattggagatctcaatacccctctcagtagagaaaagaagcagatgaaatatcagtaagtatatggaaaattttaacaacactgttaaccaaatcaacctgattgacatttataggacattccattgaacgatagcagaatacactttattttcaagtgcatgtggaacattctgtaagatagaccaacattctggactgtaaaacaagtgtcaataaatttataaggagtaaagtcatagataatgtattctgtgactacaccagaatcagtagcagaaaagtatccggaaaatccccaaataattgaaaaattaagcagcatacttctaaatattacatggatcaaaaaaggaatcacaagggaaattagaaaaaatactttaaatgaatcaaaaatatagcatgtaaaaatatgtggggtgcagctagataatgcttagagagatacggtagaaaagaaaccaatcagtataatttgccacattaacagaataaaaaagaaatatcatatgaacaccaatagatacagaaaacgcatttcaatttaatagtctttcgtggtaaaaaccctcagcataactratggaggaatattaattcctgaataattcagtccaaaatccgttaggtgtggctgagtgaggaaggcatccacaaaaacaagctgtgacagcctggtgggggattggagcccaagtaaggaatctatgagtttatactgatacaagaaaatggggggggaaatggagaaagagcaaagccccttatactagaaccttaactaatataaaaggaataatggaactagaaaattactataggcataccttagatattgcaggttaagttctaatggatggcggtcttgtctacattgaaaatctgttgtttagtgtagctaccttcatcaattacctgagctagatcttctggataacttgctgcagctcctgcatcagcacttgctgcttcacctcgcacttttatgttgtggagacagcttctttctttaagcctcatgaaccaaccattgctagcttccaacttttctttgcagcttctttacttctctcagccttcatagaattgcagagagttggggctttgctctggattaggttttggcctgagggaatgttgtggctggtttaatctatcccaactactaaaactttctccatatcagcagtaaggctgtttcactttcttatcatttgtgtgttcactaaagtagcacttttaattttattcaagaacttttcctttgccctcacaactcagctaactgatgaaagaggcctaactttcaacctgttttggattttgacatgcttttctcaactaagcttaatcatttctagyttttgatttaaaacgagatgtttgactcttctttcgcttaaacacttaggggctgttgtagggttactaattggcctaatttccatattattgtgtctcaggcaatcaggttccaaggagagggagagagacgggaatggcaggtcagtaaagcagtcaggacacacacrttaatggattaagttcacctcttatatgtggatggtttgtggcacacaaacaattacagtagtaacatcaaagatcacttatcacagatcactataacagatacaataataatgaaaaagtttgaaatattgtgagaattaccaaaatgtgacacagagacacaaagtgagcacatgctgttggaaaaatggcaccgatagacttgttagatgcagggttgccacaaacctctgaagagcacaataagatggggtatgcctgtatttgatagctgtcataataataattcattcaggtaagaaacagtagatgctaaaactaatggaagaaagtttgatgaagtatgagatagttgtatggtctctgcatctctccctcaaattattaattaattgtaaagaaaaattttttggtgaagctaggagatacacctttatcaagagattgaagttagtctaggcaacatggtgaaaccacatctctacaaaaactacaaaaattggcggggtgtggtggcatgcacctatagtcccagctacttggggggctgaggtaggaggattgcttatgactcagaggtcrtggatgcagtgagctgtgttcatgccactgcactccagcctggatgacaaagtgagaccctgtctcaaaaaaataaataaagggattgaagttaataccctccgtaatgagataaatggaaatgatgtcctgtctgatgagatgcagtaaaaggaactcatcatcgcttgtataatattcttgccaaagatacataacctgattctagtcgtgaggaaatattacccaaattttgggaggtattctgcaaaataatggtctgtacttttcaaaattatcagtcatkaaagtcaaggaaaatctgagcaactatttcaggctgaaagaaagtaaagagacataaccaccaaatacaaagtgtaattctgaactgaatccttttgctctaaaggacgtactgggacaagtgaattaggctgtagaaaaagaaaaaaacaatcagtataatttgccacagtaatagaataaagaagaaaaatcatatgagcatcaatagatacagaaaaagcttttcaatttaatactcattcatgataaaaactctcagcataactaatggatgaatagttattcattcctgattaattcagtccaaaagccattaggtaggactgagtgaggaaggcatccacagaagtaccctagggatgaatagatgatagaattagtagataagaaccttaaaatcttattataaatcttataactatgttcatagatataaataaaaacataaaaataaaaacatgagaaaaatggaggacaataaccaaaaaaccctaaataaagtaaaaggaataacagtgtttttatatataatagtacagatgggtttaaaacaaaaggatggaaaaaatataccgtgccagctaatgaaaagaatgctgaagtgaccatattaatataagacagaagacatcagaaaaaataggtgattatatgatatttgaatgtctgttcattgttggtcttttaggtcttataagatgatggtcattttctactactttaagggagcatattaaatttttttcaacagactttaaactttattttgtagatcagcttcgggtttatagcaaaattgagcagaaagtacagtttctgtatattccctgcctgtacacacacaacctcctctactatcagcatctaactttttgtagatactttgcctcattcaaataatccagggtaatctttctattttaaagtcaagtgattgacaccccagttccatctgtaatgttaattctcttttgctgtgtaatgtaacattcacaaattcaagggattagaatgtggacatctttggagaaccattattttatatgccacagctgagttaatggtaacttatcacattttggaacaactggcaaaacttgaatgggatttgtggaccatgtggtaataatatatcagtatcagtttcctgatttttgttgttgaaaatgtccttgttttgtaggaaatactggtgttgggacatcagatcagcaacttactctcatgtggtttggggggcaggaaagctatgtatactgtagttctgtgtattactccattttcacactgctgttaaagacatacccaagactgggcaatttacaaaagaaagaggtttaatggacttacagttccacgtggctggggaggcctcacaatcatggtggaaggtgaaagtcatgtctcacatggtggcaaatgagagcttgtgcaggaaaattcccccttataatgaccatcagatctcgtgagacttactatcatgagaacagcacaggaaagacctgcccccgtgattcaattatctcccacctggtttctcccacaacacatggggattcaagatgagatttgagtggagacacagccaaaccatatgattccacccctggcccctcccaaatctcatgtcctcacatttcaaaaccaatcatgccttcccaacagtcccccaaagtcttattttagcattaattcagaagtccacagtccagagtcttacccaagataaggcaagtcccttctgcctatgcgcctgtaaactcaaaagcaagttagttacttcttagatacaatggggatacaggcattgggcaaatacagccattccaaatgggagaaattggccaaaacaaaggggctacaggccccgtgcaagtccgaaattcagtggggcaggtgtatcttaaagctccagaatgatctcctttgactccatgtctcacatccaggtcactctgatgcaagaggtgggcttccatggccttgggcagctccacttctggctttgcagggtatagcctccttcctggctgttttcacaggctggtgttgagtgcctgcagtttttccaggtgcacagtgcaagctgtcagtggatctattattctgggggatctaccagtctggaggacagtggctgtcttctcacagctccactaggcagtcccctccataggaactctgtggggtttcaaccccacatttcccttccatattgccctagcagaggttttccataagggccccacccctgcagcaaacatctgcctgggcatccaggtgtttccatacaccctctgaaatctaggcagaggttcccaaacctcatttcttgacttctgtgcacctgcaggctcaacaccacgtggaagctgccaaggcttcgggcttccaccctttgaagcaacaggccaagctgtaccttggcttcttttagttgtggctgggacacagggcaccaagtccctagaccgcacacagcagagggaccctgggcctggcccacgaaactattttttcttcctaaacctctgggcttgtgatgggaggggctgtcacaaaggtctctgacatgcccctggagacattttccttattgtcttggtaattaacatttggttccttgttacttatgcaaatttctgcagctggcttgaattcctcctcagaaaatgggattttattttctatcacattgtcaagctgcaaattttccaaacttttatgctgtttcccttttaatactgcatccytttaacagcacccaagtcaccgcttgaatgctttactgcttagaaatttctttcaccagataccctaaatcatctctctcaagttcaaaggtccacacattcctagggcaggggcaaaatgctgccagtttctttgctaaaatataacaaaagtcacctttgccccagttcccaacaagttccttatctccatctgagaccacctcaacctggatttcattgtccatatcctcatcagcattttggtcaaygccattcaacaaatctctagggagttccaaactttcccatattttcctctcttctgagccttctaaactgttccatcctctgcctgttacccagttccaaagtcgctttcacattttcggataacttttcagcagcactccactcctggtaccaatttactgtatgagtccgttttcacactgctaataaagatatacctgagactggacaatttacaaaagaaagggtttaatggactacagttccacctggcttgggaggcctcacaatcatggtggaaggtaaggaggcgcaagtcacatcttacatggacagcaacaggcaaagagagcttgtgcggggaaactccttcttataaaamcatcaggtctcgtgagacttactcactgtcacaagaacagcatgggaaagacctgtccccatgattcaattaccttcaactgggtacctcctgcaacatgtggaaattcaagatgagatttgggtggagacaaagacaaaccaaatcattctacctttctataaacttgcaatttttaaggataaaaaacatttttgatgcttacagagataaaattcatttatttgaaaaatctgcatacctgatctcctaatgatgctgaataaaggaggtagatagtatatcatttttgtaaattaattaaacagtattcttctatattttggatagcatgtaaaaatatcactcattttggatgtttttctttttgttccctcattttgggtaagattgcttatgcctttttctcagaaccaacactggtgcttattaaagtaacataagttttttctgtgttttccttcaaaggttgctcaagaaacagatgtgagagcccagattcgtctgcaatttcgtgatgtcaatggagaacttatagctgtgcaaagatctatggtgtgtactcagaaaagcaaaaagacagaatttaaaactctggaaggagtcattactagaacaaagtaggtgtttatatgatatttgaatttctgttcattttcagtcttttaggtctgtaagttgatggttgttttctactataagtttaggggagcatattaaatttttttcaatagactttagactttatttttttagagcagttttgggtttatagcaaaattgggcagaaagtactgagcttccattttctccctacccccacgcacacacagcctcctccactatsaacatttgattttttgtggatactatttgtcagttaaatagaatgatcccatgaaagacttagggttatgttccattctcttgagtaatttctgaacagttgctgaattgaaagcacataatcactcaaatacaggttgaatgagtaaaaaattctagtgtcatgtttaagaatgggtgagatgagaagcagacaagtaggaaagaatgataaattgttcctttcaaccattatcattctgttagaggcaggtatcattttctaatggatatggatttggggattagactaccttagattcaagtctctgtctttgttgagcaaattacttgactattcagcttcttctcctcccttttatttaactagctaagtaattcctttatttaaccaataatgcacatctactatgtgctggaggcactatactggcttctcaagcaggttttcatcattgccattttaacacactcaagtatctctcataccctgggatttcattccactccagttactacctgtctccttcttctcctttatagccagtctctcaaaagagttgttgatactgtctccatttcttcacctcctcttcactccaattgcagtcccattcgtcctttgaaacacctctgactaaagttactaataactctgtttttaattagggtaatgctgctgctatacaaagtagacctaagagtgagcctctgtttatttcatttgtaaagtaggcattcattttcactgtgtgtatcttagatgttgtcaaggttgagctaatgcatataaaatgcttaacatgtagtaagagttcatgtattagtcttctatgactgctataagaaaccacaaacttagtgctataaacaatacaaatttattatcttacacttatgtagtttagaagtctgaattgggtctcactgggctaaaatcaagatgttagtagggttacgttcctttctggaggctctaagggagaatatgtttccttgttctttccgtcttttagaggccacccatattttttagatcatgccctcttactctgtcttcaaagcaagcaatagtgggcagagttcttctcatatcaaatcactgtgacctcttcttctctcttcttctgccttcytctctcacattaaaggacccatgtgattacatttgccccatccaaataatccaggatagtctattttaaggtcaaatgattaacaccctaattccatctgtaatcttaattctcttttgctgtgcaatgtaacattcacaaattcaagggattaaaatgtggacatcttggaggaccattgttccatgtaccatagctaagtaaatgctagtttattactttttatttgaaaatttctttttctagacctccatgatacaatactgttctctctttctatcacagctacatactacttcattcaccccatcaataaaggttggaagtctcattaggctcagtcctrtatcttctccttttttttgctctgtattttcttcctaggtaatcacattcttatccattgctcaaactactctgtgttcatagatgactcacagatttatgtcatatctccaaaccagacctctgtttccagacccatttacccagacctatttacccatttctgattttttttttttttttttttttttttgagatggagtcttgctctgtctgtcacccaggctggagtgcagtggtgaaatctcagctcactrcaacctccgcctcccgggtttaagcgattctcctgcctcagcctcctgagtagctgggactacaggcgtgcaccaccatgcctggctaatttttgtacttttagtagagatggggtttcaccatgttagccagaatggtcttgatctcttgacctcgtgatccgcccacctcagcctcccaaagtgctgggattacaggcgtgagccaccgcgcccagccccatctctgattttttttaccagttgtttcaaagacaacttaggttcaacgtttccaaaaccaaactcagtcctttctctttgacctccccccttaaaaaacctccaacaacttggtcttatggtatacctcaccttggtgaatgataccactatccgtccagtgacaaaagccaagaacctaagtcttgatatgtctttgccttccatatccagtctattactgagacctatgaatttaatctaaatgtctctggaatctgtttccatctctacaaccaccattctagtcctagtccaagctaccattgtctttccatgacctcatgtgataacctattgatttatctgtgtctattctagccctctgcaaagcattcttaatatattcagtataatattttttttctttctttttttttttttttttttttttgagacagagtttcgctcttgtttcccaggctggagtgcaatgatgcaatctcagctcactgcaacctcaccgagttcaagtgattctcttgcctcagcctcccaaggagctgggattacaggtgcccaccaccacacctggctaatttttttgtatttttaatagagacagggtttcaccatgttagtctggctggtctcgaactcctgacctcaggtgatccattcacctcggcctcccaaattgctgggattacagacatgagccaccgtgcctggcccagtgtaatattttcaaaatacaaattgaaatgtataaaaaacagtaaagacagatattgcctctgctcaccagagcagtctgttactgaagaaagaaccccattctaagatgtttttaacttacctttgcctgtctgctattgatcatcatgttttgttttattctttgtctcttatttttaagacagttaatgctctatatagtatctctaagtattctaaattattatatttaaaagtccaaatatgtaaaaaataaattctggcttcctttcctgaactactttgttttacatatcttttcatctgtgaaccgttaaatagtttaagagttacactttttagcatgatgaagccatttctaacgggataggtgaagggcctttttttttattcttttaaagaagtacagtatgaattgattaagcaatmgaatagatacactgaaggttattttacatatattcttgattttcattttctgtaggcatggtgaaaaggtcagtctgagctctaagtgtgcagaaattgaccgagaaatgatcagttctcttggggtttccaaggctgtgctaaataatgtcattttctgtcatcaagaagattctaattggcctttaagtgaaggaaaggctttgaagcaaaagtttgatgagattttttcagcaacaaggtttgtaacccttaaatagactttgtagtccattaagttattgaactgtgtttgcaatttggatgcttctttttaacagaaaaaatttaaaaagcagaaaggtcatcagttactacctctcayccagcagcaaccattgggcatattttctttcacttgtctttctgtgcgtatatttatttacctgattgacagtataaatgtaatttttttcacttaccattatgtcataggcattttacaagttattaaaaactcattgtaactgtaatcttagtgacagcataatatcccactgtatgaatatataccataatttactttgccagaaatttgatttttgtttcatatcttcaaagatacattaaagccttagaaacacttcggcaggtacgtcagacacaaggtcagaaagtaaaagaatatcaaatggaactaaaatatctgaagcaatataaggaaaaagcttgtgagattcgtgatcagattacaagtaaggaagcccagttaacatcttcaaaggaaattgtcaaatcctatgagaatgaacttgatccattgaaggtaacttgattttatttttaattgacaaaaattgtatatctttatggtatacagcatgatgttttgatataagtatacatcgtggactggctaaatcaagctatttaacgttcattacttcaatttttttatggtgagaacacttaaaatctactctcttagcaattatatattgttattaactaaagtcacagtgatgtacagtagttaatttcttgtatactaaataggtagtcctttttttgctatagtagcattctccccttatttgtatatgaaactgaatggcttgtatatttcttgaattatcagggagctaatgttttaggtctatgttagtctttaaattgctsaaagagcttggatttgaaagaaaacaaatttgtagcatcacactaaattagtagtatagatcactaggtgttaaatagcaatatcattacccaaccttacagttctgtattaatatttttaaaaattgacatctttctagagaatttttaaaatttgcagaaagtttttgaagcattcaaaaattgcacagaatttggaattgatccataacatgttcatatatttgcaaatgagtataccttcctcaacccggtgatttataagaaaggcctacaggaaattccattcattcatttaataagcatttattgggtgtcttctttgtaccagggtatactgtgcttgggtacaaagaggactacaactgcacccctgtccttaaggtattcctagtctaaataagagcattcttaaaaatggctatttgctatgttttagatagtagattttttaaagtcattaaaaaatttattgatttggtttttaaaaaactcacctgtaaataccagtatagatctttgaatcatgaagtagaaaatatatatatatttttaatgatggccatgcatagaaatatattgcaagggcttctgggaggaggtagggctgaggtgggccttgaagaatgggaagaaatcaagtcagcaaactagaagacattttatacatgtttgtatttatttatttatttatttttgagatggagtttcacttttgttgcccaggctggagtgcagtggcacgatctcggctcactgcaacctctgcctcccgggttcaagcaattctcccacttagcctccagggtagctgggattacaggcatgmgccaccacgcccrgctaaataaaaaaaaaaaatagaattttttgtatttttagtagagacggggtttctccatgttggtcaggctggtcgcgaactcccgacctcaagtgatctgcccgcctcggcctcccaaagtgcagggattacaggcgtgagccaccgcacctggaaatgtttgtatttattttgacttttcttttaaaagtaatatgtgcccctagtaaaaaagttataaaaggatattaggtgaaaagtaaaagatagtcttccatttctcatctctaaccttccagagtatattttacctgcaactttttttaactgcatatatacaatacatatgtatatacaaacattcacttgtatgtatgtgcatatttacctttacaagcttaatcagaacaggattrtgagaggaagagtctgggttaagtaaatcaatataaaaggagtaaatgaccaatatgaatcggggtcagattatagaaagctaatggatttcagacttagttcaatagacagaagagtggaagactatgttatattttaggatgagttgtcctgataactctgtgtgggtcccgtggtaattaccaagatattagaacagatttmctttttttttcttctttcccccttgccccactccacgttttattttcttgaggagcatcttggttggagagatgacaagcacatgtaatggtaaggcagagaaaaaaacaagacctgtaggagctctgaggataaagaaagagaatttctatctgaggtagccagagaggatttcataggactgaatttggccatgacttttttgatcataaatgagtaagtcattggagacatagagacagtaaaatccaagctgtctttgaacactgtcaaggaaatccatattgttgaaatgaagcatttatattggaaatgatgtcaaggtagggctaaatgataatacctaggatttagtgagtggtgccaagattctaaccaaggctgtagcagaggttgaggtatttatttacttgtttgtgtttaattgtgagtaattctccaagggtttaatattcttctctgtatcctcagagcctagcctagtgcctggcacatagcaggtggttcaataaatgtttattaagtagatgacttccaaagtccttttttttagctctgacatgtgaagattcttcccttcatagaacccaattaaagtttgggtcaaatcaccttcccagaaaagactacgtcctttcaaccatgcactagaatgcatcctttcccatttttactgattccctttatcttcgggaactctcactctctcataaactactttattaccatcccaccatatcctgtcctctttttttggcctacttagatctgttttcctttcttgccttaaatgggaattgctagaggaatatgtttctaactttttttttctgcacacaagttcatggtccttctatacttgatagcccagctgctctattttttttakctcatttcacactggcacctaagctttaaacccttggctgtttttgttattgttgtctgcctgcttgtcctagctccttttactaggtgtgtactctggggatagaacctatgttttgtgctctgagattagaaccaaaacacagatgtcaaagaaggaattcaggggatctggtgactggctggatttaaggaatgaagcaggtagagatgtcatgaaagatccaagcccagatgattatcataatgtttgtgctaccaagaggcagtgaaaacactgatggaaagaaactgagcactttgtagagtatcatagtagagctgttagtattcattgctcttaagtatccatccagttatatttgttagactctactcaaaaggtattttctgagtacagaatttttttcacaagtggtgcaaatggtctcattaattgaatgtttactgcctaacactaacccgagtgctttaaaatgtataatgtaaactccatagtaactgtgaggttgtataggcaggaaaactgaggtacaggtattcacagtggaaataagggttaaaggtaggatttgagtcctctgattcctaagtttatacctttttttctttttaagtcaagtttattaaggtataatatatatatggtaaaatccaccctttttagagtataaattctatgagttaggacatatgcatacagtagcataaccatcactaaaatgaagatgtagaatatttcagtcactccaaaaagttctctcaaagtccttgcagtcagtcctctcccctgctcccatccatagtaaccactaatttgttttctgtcattatagttttgccttttccagagagtggcacatatatagaatcatacagtatgcagacttttgtgtctgggatttatctatgttgctgcatgtgtgagtaattcattccttttttttttttttttttttgagacggagtttcactcttattgcccaggctggagtgcaatggcatgatctcggctcactgcaacctccgtctcccaggttcaagcaattctcctacctcagcctcccaagtagctgggattacaggcatgtgccaccatacccagctaattttttttgtatttttagtagagacggggtttctccatgttggtcaggctggtctcgaactcccaacctcagatgatctgcccacctcggcctcccaaagtgctgggattacaggtgtgagccactgtgcccggcaattcattcctttttattgtggaggagcattccttccattgtatgcatgtattataatttttttcctcatccattctgtggctgatggacattaagttgtttttggttgaactagtttacagtccctccaacagtgtaaaagtgttcctctttctccacatcctctccagcacctgttgtttcctgatttttattgatcgccattctaactggtgtgagatgatatctcattgtggttttgatttgcatttctctgatggccagtgatgatgagcattttttcatgtgtctgttgtctgcataaatctcttcttttgagaagtgtctgttcatatccttcacccactttttgatggggttgtttgtttttttcttgtaaatttgtttgagttctttgtagattctggatattagccctttgtcagatgagttgattgcaaaaatgttctcccattctgtaggttgcttgttcactctgatggtagtttcttttgctgtgcagaagctctttagtttaattagaacccatttgtcagtgtggcgattcctcaaggatctagaaatagaaataccatttgacccagccatcccattactgggtatatacccaaaggattataaatcatgctgctataaagacacatgcacatgtatgtttattgcagcactactcacaatagcaaagacttagaaccaacccaaatgtccaatgatgatagactggattaagaaaatatggcacatatacaccatggaatactatgcagccataaaaaatgatgagttcatgtcctttgtagggacatggatgaagctggaaaccatcattctcagcaaactaccgcaagaacaaaaaaccaaacaccgcatgttctcactcataggtgggaattgaacaatgagaacacttggacagacacaggaaggggaacatcacacactgggtcctgttgtggggtggggggagggaggagggatagcattaggagatacacctaatgtaaatgacgagttaatgggtgcagcacaccaacatggcacatgtatacatatgtaacaaacctgcatgttgtgcacatgtaccctcgaacttaaagtataataaaaagaaataagttgttttcggctttgggttgttacagataaaactgctataaacttctgtatacaggtctttggataactttaggactcgggttgctaggtcgtgtggtaaatatatgtttaaccttataagttaccagatggctgtaccatctggtaccacttcatagtcctaccaacaatataccaacaatttatgggaatgtaattgctctgcattctcatccccacttagtactgtcagtctttttcattttagccataacagtaggggtgtggtagtgtctcattgtgacattgtgaggttgtatttctttatatttttaatttgtgttttcctagttgatcagtcaattgattattgattttgagcatcttttcatgtatttatttgccacctgaatatcttcgttagtaaaatataaaagtcttttgcctatttttcaatgttatttatttattggtcattttattattgagctgtgagagttcttttttttttttttttttttcttgttttttgagacagggtctcgctgtcttacccaggccagagtgcagtggtgtgatcttggctcactgcaacctctgactcccaggctcaagtgatccttccacctcagtctcccacgtagctgggactacaggcacacactcaccacaccggtgagacttgtagaggcaaggtctcaccaggttacccaggctggtctcaaacttctgggctcaagcaatcagcctgcctcagtctcccaaagtgctgggattacaggtgtgagctacagtgccaggcagagagttctaaatatgttctggatacaagccctttatcagatattggttttgcagatatttcttaactgcttttcagaggacaggagttttaaattttgatcaggtacagtttataaacttttttctcttatggtttatactttttgtttattatttaggaagtctttgacccagtgtcacaaaaatattcttcagtgttttcctctaaaagttttatagtttgagttcttacaattaagtatatgcttcatttcagaatcttaatatgatatgaggtaaaagttgaggtttactttcttacatacaaatgtccacttcttctagcacccagagcctagtcattatgataccctgccttctaatcttattgtyatcttgtctcccaatcttaactatacaattttgtacaagtcagttaagtcctttgaatttcctgcttagtatatacttttgtgaggattagagagaatttatagcagcacctagtacagtgtctggaacatagcagacattcaatcagtgatacctgtgactgttgytcttggtaaaattatttttttcaaatctctctttcgtttagctaacattgaacacctattgcatgttctggggatacattagggaacaaagtaaacaaagtttctgtttttaggttcatttgtatatgaacgtttacgttcatatacaaatcacaagctatactattagtataattttaataaattatgttaaagtcgaggatgcattttggtgcaattatgaaagcttgcaattgctgtctaagcattccaataacttcatatgttagtttaaaattaggttctgctgggcatggtggtacatacttatagtctcagctacttggaggctgaggtgggaggaacacttgagcccaggagttcaagttgtattgcactgttattgcacctgtgaatagccactccagccagggcaacatagcaagaccttgtctctgcatttgaaataataataataaaagtaggttgtaaaaatgtcttagaagaagagttggtcagttttggaatcatagaggcaaacactagaagaatatccccagcatcatccaataagagaatgccccgaaccagatcccagtattcctgggagatgaggcaaccagctgtctctggaagcgagcctcagagcaggccactgagctcccttgttgtactttacttgctcagagtcctctgtggttgagcaagctttggattaaagtatactcttcatgtaaatttgcctataggctcagaatgcattggtaactcacmatgaatttctagccttctcagtagtcctgacttaaaaaaatacattaaatagttacctttttaaggattaagtaactctaaatgcccaatgaatgaataatgacttttgtggcaggtgttgaggacaggacatggtgtttggagttagaagtggaatttaattcctgcttctctctactagctgtgaggacttgggccaagttacttaatgtctctgaacttcagtttctctaggcctgctctacagtgttattgttagccttaaatgagatcacttttactaaatgcctggacctggagtatcttacttgtcttcatctatcagccatgtaagctatagtgagttttatttatgtaatgtttctttattttcagaatcgtctaaaagaaattgaacataatctctctaaaataatgaaacttgacaatgaaattaaagccttggatagccgaaagaagcaaatggagaaagataatagtgaactggaagagaaaatggaaaaggtttgtggtggtagaattttgttctgcttcaaaattttgggattattgtaatgaactttatttgaatccattttgccatccacattggaaaaaaacaaatacagatcttgttacttctatgtatatgttaaaatgaaggatattgaataaggtttggtttatatttgatacctcaaagtgatcatattttcttatgtttgtacattaaagctttttattttggtgttacacaggtttttcaagggactgatgagcaactaaatgacttatatcacaatcaccagagaacagtaagggagaaagaaaggaaattggtagactgtcatcgtgaactggaaaaactaaataaagaatctaggcttctcaatcaggaaaaatcagaactgcttgttgaacagggtaggacaaaatgtttatttggtcgtttttcctactatgatgttatacattttctgtatgaatgaagaatctccaaggacttatgctgagtgaaaagccaatcttaaaaggctatacacagtatgtttccatttatataacatttttataatgtcaaaattttagaaatagtggagaaattagtggttgccagggatactgggtaagagaaaggacaggagggagctaggtatggttatgattagaacaaaaagagagtccttgtagtattggaactgttcagtatcttgactgccatagtggatatatgaaccgacacaggtgataaaattatatagaacttaatatacacacatccacatgctcaggggtacaaataaaattggggaaatttgaataagattgatgaattatatcaatatcagtattctgrttgtgatattttactgcagttttgcaaaatgttatcattgggagaaactgggcaaaatgtacaagagacacactgcattattttttataactcgtgaatctgcagctatctcaactttttaagcaccagttgaaaaaaaaattatgagattttttttttaaaaggtcgtctacagctgcaagcagatcgccatcaagaacatatccgagctagagattcattaattcagtctttggcaacacagctagaattggatggctttgagcgtggaccattcagtgaaagacagattaaaaattttcacaaacttgtgagagagagacaagaaggggaagcaaaaactgccaaccaactgatggcaagtattttgaaatacagtatttgttattttgtttgcatcatattctctacttgaattgttttaatttttggttggactccattttggcatatttttctattagtgttaggataaaatctgctacaaggcagaaaaacctttattgaagcaaatgttcttaagtgtataaagataaaaatatgaagaaaatgtaaacctacattttttatttggttttaagtaaaaatttttaaaaactaattgcagagaaaacatttgctcacagttaatgattatctctgggtaatggttttgattgtttttaaaatacagtcttgaaccacatgttttggtcagtgatagaccacatatttgacattggtcccataaaattataatactgtattttactgtatgttttctgtgtttagatatgtttagatacataaatacttatcatcatgttacagttgccaaagtattcagtacagtaatatgctgtataggtttgtagcccataaacaataggctataccatatagtctatgtgtgtattaarctataccatgtaggcytatgtaaatacattctgatgttcacacaatgataaaattgcctaatgatgcatttctyggaatatatccctgctgagcaacacacgactgtacttttttgtattttcttcagtgtacatatattccttttgcaattaaaaaacttaaattgtttagtaaattattaatgctcattctttacatatgcatttagaatgactttgcagaaaaagagactctgaaacaaaaacagatagatgagataagagataagaaaactggactgggaagaataattgagttaaaatcagaaatcctaagtaagaagcagaatgagctgaaaaatgtgaagtatgaattacagcagttggaaggatcttcagacaggattcttgaactggaccaggagctcataaaagctgtaagatattgtttgaataatctaataattttaagatataatacttttagaagtattttgtctatttttgatcctaagattatagcattttaataaaaacatcaactttgtcttattctcatgtaaaatgaattcatctgaatatcttgatcttctgactctttggttctacaacccgatagcctgaaaattagaatcacatagggagctttttaaagatactgtactcagaccttaaagcttcagaccttccaaatcaaaatctctgagaatggggcatagaaatgtacattcaaaacacaacaaaactggctaattcttatgagcaccttgattaagaacacttaccaggccgggtgcggtgtctcacacctgtaatcccagcactttgggaagccaaggcaggcagataacgtgaggtcaggagttcaagacctgtccagccaacatggtgaaaccccgtctctactaaaaatacaaaaattagctgggcgtggtggcgtgtgcctgtaatcccagctacttgggaggccagggcaggagaatcgcttgaacctgggaggcagaggttgcagtgagccaagattgcgccactgctctccagcctgggtgacagagtgggactccatctcaaaaaaaagaaaaagaacacttgccraagttttaaaaaagcaagtatttttcctctaggtcacacacgttgtaattctagatgatttttgctgtattattactttttctgtgttaaaaactttcttagccaatcttttcaggtatttccatattttctttcttgcttctagtctgtcctccttcttcacatctccattaccaaagtaagcattctaaagcatggcaaacttcttaaagcccatcttgataatttatgtaaacatttatttttgctccataactcaccattgtagcatacatttttgtcagtttarcacttcatcagtgttgtcttgttggggtggggagatacttggtcagggaccacatcacactatttttatagtttctacataccaggcaatatagtgaattacatggggacataataaatatttaattgttgactgaggactcactaatctgtgtacttagamacatgtctcctaattttacagtaattctcacatttctttcctgtttgacccttctaggtttatttactaattctctaccattataacatagtaaggtcactttaataagatataccttagagcatatatagtgccttatgtttttttctcttgttggatrcaaacagtaatatttggaacattctgaggagtagttaatttctaatacactttgtcattattttaattcttgcacaaaatatataacacctttgcatttgtatgaattattgactaggaacgtgagttaagcaaggctgagaaaaacagcaatgtagaaaccttaaaaatggaagtaataagtctccaaaatgaaaaagcagacttagacaggaccctgcgtaaacttgaccaggagatggagcagttaaaccatcatacaacaacacgtacccaaatggagatgctgaccaaagacaaagtatgatttttctttttgttctaattatactgtctggtacttaaaatagcctaccttgcactcataagtcatagactataaggtattaagttggtattgactatattttagaggctaagtgagcttagtactctatataatagactttcaagcttaaaagttattgtttaattacaaaaagttaatacagaaatgtatatatatgtatatacacacatgcacattactgttaacttttaacatacacaaattttaaaattttatattgttcgacttggtactccactcttaaggcttagaaagaccatccccacttgaagactttaagaactttaagaaattttatattttattttcatatttttatagttttaagcttagaactttagtcagtctagaatttatttttgttcttgatataatgtggagatatagactttatttttaaaagattttttttttacctataggctgacaaagatgaacaaatcagaaaaataaaatctaggcacagtgatgaattaacctcactgttgggatattttcccaacaaaaaacagcttgaagactggctacatagtaaatcaaaagaaattaatcagaccagggacagacttgccaaattgaagtaagttgcaacatttggagatgtaatagaaatctcttatttcatgcttacctgtttaattgttttaaaataatttattgtcatgaaatggtatgttatattgataaactttagttcttacatacaaggagacttcagaaagttcatggaaaaatggaattaaaagataaaaattttaaataaactgtatttctcaacataagctccatcaagttcaagactcttctgagcagtgataccagcaatttagttcagtcctaaagaactgagggtcctgggaatttaaccatgtcagtgtagtcttttttacatygctagcataaaaatgggtgccctttaaagatttttttaagattaagaaactagaagacaggaggagccaaatcaggactgtaaggtggatgcctaatgatttcccatcgaaactcttgcaaatggcccttgtttgatgagaggaatgagcaggaacattgttgtggtggaaaaggactctctggtgaagctttcctgggcatttttctgctaatgctttggctagctttctcagaacactctcataataagcagttgttacctttcttcggccctccagaaagtcagcaagcaaaatgccttgagcatcccmaacaactgttgccatgacctttgctcttatctggtctgcttttgctttgactggaccacttccaccacttgttagccattgctttcattgtgctttgtcttcaggattgtactggtaaagccacattccatcacctcctgttacaattctttgaagaaatgctttaggaacttgatcccacttattgaggaagttctgctgttgtctgcagctgatctggaagcagtgattttgggcatccatcaagtagaacgtttactcaactttaatttttcagtcagaattgtgtaacctgaatcarttgaggtgtctatggtgttggctattgtttctgctgttaatcattgatcttcttcagttagggcatgaagaagatgattttttttcctcacaaattgatgtgaacagtstgtcactgtgggcttcatctttaatatcgtctcatcccttcttaaactgagttatccatttgtaaactgctgatttgtttggggcattgatctcataaacttgttgtaaagtatcaatgatttcaccattcttccacccacacttcaccataaatttgatacttgttcttgcttcagtttaattggggctcttttcaaactgatgtcttaaccttgttagtgccttaaactagatcctattcagacatgttataacaagttagtatgagtttgtttcagtgcaaaacattttgaacttcatgcatagttttttttataatacacattttccatgaacattttgaagacccctcatattttgcaaattaagtaaaatggtaacggatagtaatttaggcctcttgtcccttgaaaatttgtagacctatgaagattaaaatttaaaaattctattttcatttctgtgagtaatccattataaaaagtgatcatgtttctcagatgttaccttggatagtggttggataagcgggtcaaaaattccacacagatttttgaggaaagtagaaggacttggctttggtggtgtttaatctgtgtttcttgtggaagtatctgtgagggaatacaatattggagtttgaaattcaggagattggaagttgttgctatgtaagggatactcaaagtcattagtatgtcaccttgagagagttatgcaaagggaaggagttacaattagattcctgggaagcacaaacatttaaaatgttagcaggcaaaggaaaaggagcaagtgaaggaaactgggatgtgcccagggaaccagggtkagagccagatagctgtggtgtctaggtgccttgggaaaatagtcttcaaggagaaggtcaacagtgtttggtgctacgtagaggtagagtaagatgaagactgtacttggcacttaggtcactggtgatcttgatgagaagtgctcaagggagtctaggataatgaaaatatcatcatattagttacttttttccaaatgtttactgtgactcaggatgggtagtcatgatgaagaagcatgtgtgcagtcacacacatttatctgaaacaaatttctcaaagtagtacatatacatacagcctactccaatatattaccgtctattctgtttcatttttaaaaaatatgctgaatacattaaattgattacatggtagctaatgcatctaaacctgcaaattgaaaaaccatgttatgtgtgagtattgaggttggctaggatgatgtttaagaattaaagtggggataaattgtactagtaagcaaaatctttgatgaatgagagggaatgactgatctggacgcaagtggatgacagcaacaaggagggggaggatacaaaagaaacagtatttacaggagagtaaggaagtagtatttgtgaaaggactaaagggaattacggggatgttctcttgtcttctttctgtccaatagtcctagcaagcatcttgctgaggcttaacctgggatcaaagaccatgaacccccagaaaccaggcagaattctgtgtacatttttctgggagcaggcccatgagtaggactggcaggtgagtcagtgtcctagggggagagttaaggcagaagtggactagtccctcaacttctgaaaaaaattatttggtcataccaaactcttgtcatgatttgttggcagaatttgtcttgtttttgcctactcaaattttcaaactaatttctcctattttaaaatgaaaatccatatttgctcttattttagcaaggaactagcttcatctgagcagaataaaaatcatataaataatgaactaraaagaaaggaagagcagttgtccagttacgaagacaagctgtttgatgtttgtggtagccaggattttgaaagtgatttagacaggcttaaagaggaaattgaaaaatcatcaaaacagcgaggtaagttgtctactttatattatcaggatmctttgacacctttgaattttcattcacaggtaactgttaaggatggggaatttaaaaacctggttatggagcctaatggcttggatttcagtcctggctctacaacttactcactgtgtgactttaggcaagttactgaaaccttcctgtgtttcattgtctataaaatgaggacacaactaccacctgtggtactgaggtgtgaatgagattgtaattataaagcccttagaacagtgcctggcacatagaaagctctcagtaggcattttgttatacttataatgtgttaccaaaaaatatttatacaaatctgaatgtatcatgctctttggaagcgaatatcggaattttaaatatcagaatttttatttcttttataatatatttataaagcaagaataatcatatatttatagaaaaagatacaaccgtattcagaatactgtattttatgtttttttctcattggtgatataatttattttcttaaaatagccatgctggctggagccacagcagtttactcccagttcattactcagctaacagaygaaaaccagtcatgttgccccgtttgtcagagagtttttcagacagaggctgagttacaagaagyyatcagtgatttgcagtctaaactgcgacttgctccagataaactcaagtcaacagaatcagagctaaaaaaaaaggaaaagcggcgtgatgaaatgctgggacttgtgcccatgaggtaagaatgggatttaccttcactgtacatgtagcagcacattgtaaaaggtacccatctcatgcctgggcagatggtagttactcagtaaggactctgagctggtatgccctgtcttatatcacttctatgataagaagattcaattattttgtttaaagataagcttgtttcctgtctttttttctttttcttttttttttctgagacagagtctctctctgtcacctaagctggagtgcagtggcatgatcttggctcattgcaacctccacctcccagaagcgattcccatgcctcagcctcttcagtagctgggattacaggcatgtaccaccacgcccagctaatttttgtaatttttagtagagatggagtttcaccatgttggccaggctaatctcgagctcctggcctcaaagtgattggcccacctyggcctcccaaagtgctgggatcacaggtgtgagcaccgtgcatagccagtaagcttatttcttaaactatgaggtagacacagtctttacgttcttttgtatgtgtgtttaattcccaagacttagcttgtgggcatagattttcacagatttaggactgtctgttgacatgccactttctgaacccagcaaaagaatttaagtattgaaaagttctcccagaagacagattttaaactatgtttttaatgtcttttccacttkctaaaagaatgaatcatagatgattttcggttgtttatattttccatcacttatacaagaaattcgtgttatgttctgtttacaaacaaaaatcaagtcaggaaatatgtgatgattgccttagtgtctcccagaacatagagaacaaggctagtgccagagacctaagacatgaccctccaggagctaatggtctgattaagaagacaagctctcagaattcaacatttagaaagctaggcttaataaagtgcttaaaaaatgattcaaacagatgtgttaggtaagaagggaggagccaatggatacagaatgagaagaatattttgagaatgaggcaggaagaggaatataagacctggagaagttcattcagctcaactgagaggagacggaagtcagaacacggtgcaaagggaagaggagtatgacctatgctgcagtagaaatgttatctggagtttggggaattatttatagggattgagtcctgtatgttggggagatagggctacattatattcaggtctagttgtaactctgataggtgatgaggagccaacctaagggagttagtgaaagatgtattttaggaaaattaatctaatattaatatattgactgaaacaggctgagaaaagctcaggaagcagaaaaaccaggagagtgaaagtgattgtcctggaaaaccaaggaggagtttcaggaaaaggagaaagaaaggcctaagaagatgtggtttgtggcagccaacttctaagatggtccctagtaatctcggcctcttggtatttatactcttgtatagtcccmtctcatgctgttgcatgattggtctatataactgataaaacaggcagaagtgatagcatggcctttccaacattaggttatttaaggtactatggcttcttctgttctcgcaatgtgcttgtacccttgtgtgaactcgctcactctcccccactcctcccctctctcactcactctgtctccctctgtctcttgtctgagggaagctagctgccatgttgcaagcagccctctggagaggcccatatgccaaggacctgaggcctttgagcaagtgagtttggaagcagactttgtagcagtcaagccttaagatgactgcagtcctggctgacagcttgattgcgacttcatgcgagaccctgagtcagaagcgtatctcttgatcctcatatctctgagaaataataagtgctgttattttaagctgctaagttttgggatactttgttatgcaacaatagataaccaacacaagcatcaagggtgaaaaccagattattggggccacagagatgaggagacagaggcagtagtttgagaataaaaaggaaggagaggaataaggtagtatcttgaaaagaaaaagatcaaatggataaaatttgaaattggtagaaagtacaygtagtagaaatatgagcttagttctgtgttagactgttatacaataaatggcagaaattaacatcgtattatattttaggaccctagctatcacggctccttttttttttttttgagacagagttttgctttgtcgcccaggctggagtacagtggcgcagtcttggctcactgcaatctccacctccccggttcaagcaattcccctgcctcagcctcccaagtagctgggattacaggcgcacgtcaccaggctcggctaattttttttgtatttttagtagagagagggtttcaccatgttggccagactggtttcaaactcctcacctcaggcaatcgcctgcctcagcctcccaaagtgctgggattacaggcgtgagccaccgtgctgggccacagtttcccctctaagagtaaggtgcatgtcttactcgttgtatctccacagttccttgtatattgcaactttgataactatttgctaaatgaatgagaactgtaatgtctgttccaattatttattgctatgtaacaaacctcaaatctgtctcacaataatttttcatggttctgtggtatgactgggctcagctaggtggctttcacttggggtcttacggttgcagtcagatgttggctgcagtcgtctcaaagcataaccgagctggatgttcttgatggctcacatgactgacagtgatgctcactattgtctgggagctcagctggggctgtcaaaataggacatcttcacatggcctctgcatgcgtcttgggcttttggcagcacagtgactgggttactaaacagagtatcctaagggtaagtattccatgaacaggaagtagaagctgcaagtcctttaaggcctagaccaagaaactggcatggtgacacttctttttctgttggttagagtggtcacagaaactcccaagattcagtgagggaggatactgtatctcttgatgggaagagtgtcgaagtacttgtggctgacttgaatctgcctaaccctatatctgcagtagcatctgtgtgccattctggttacctagagactaggcaaccacacatttgtatattctatattgtaactttgataactatttgctgaatgaatgagaactgtagtgtctattcccgttattgattgcttgtaacaaaccccctcaaaactgtctcgcagtgattagtttttcatggtttcatgggatgactgggctcagctaggttagccaggtaaatggctggttaccacacattttaagagaacctgaagctagaaaaggcctacaggaagcactgaaaatggaccaagatgctggcagggctgctaagtgaggacacatgtgtgaggaaaccatttttataaagaaaccaaaacttgaagacccgaagagcagggaaatgatgaacccctgtttgtttagcaagctctaacagaatgtcagtgggccattctggaaaactggagaaggatgagtttgggacaaatgagagaggaagtcttcttcccaatagtaggaaataacattataaaacactttttttaagtttaaataaatccacaaatgaaaggtcaataatgaattaagaggacttgattgattgatagatagggtcttgctcctgtcacccaggctggagtgtagtggtgtgattgattatagctcatcgaagcctcgaactcctaagctcaagcaatcctcctacctcagcctcccaaagtgctaggattacaggcataagccaccatgcccaaccaagaggactttttttttttttaaatatgggaaagcaattgcctaagagtgcagtcaggttgayttcaaattccaactctgctgggtgaccttagggatgttacttaacccatttgggccttcgtatcccccacgtaaagtgaggggattgatttacatgatcattaagcttccttccacctctggttaggatactactttcaaatatcccgtggggtcactttcagagacattgtggaggtctatttatgatagtcacttaggtggaaggttattggtgaagaggggtaaagtaacaagattaaatttatctgtgcaccatttgctttttcacctttagaatatgcccttgatgccaccactatcatgagaactgtctattcatgcaaccaatataggcagtctactggagtgcaggtaatacagcagtaaacaaaatggacaaagtccctgccctcatggagtttatatcccagtggggaggagatggatgacaaataagtaaatatataatatgccaggggatgatcaggggcattgagaaaactacagcaagataagggaatagggactagctgaagggtggtaggaggggacttgatgaaggtggcagtggagtggaaacttgagagaagtgagggagtcagccatgcagttgtccataagaagaatattctaggcagtgcaaaatctctgagacatatttgacctgaaggccaaagggaaaagttgtggaagatgagctcagagaggtagtggggagccatatcttgcttatcttctttgcgggaaatattttcatttaaagcctcaaattcgccagtatctaatataaacctaacatcatgactgagatctcagctgaaaatgtacctgtttatcattttgtctagtactgactcagattcatttattatagcacctcatttaaatgcaaactcaattggtatttctcccacaggtttttttcagtaccatatctgtgtgagcctttttacacacaatccccttagaaaaggaatgttgtctaaaaataggtgaattgagtttctgaaaaaacagaaatccaaagagtaaatttcaaatgtctgtctataaaaaatgataggcaggcaaggtaatggatatgttaaattacctttatttaatcattgtgcattgtgtacatatatcagaacatcacattgtaccccataaatgtttgcaattatgatttatctattgaaaataattttaaaaaaccttgtgaatcgtgagaaaaattaactcttgaaaataaaaaataaaatgtcataaatttaaaaaaaagaaaaacaaacccagagagtgcagtggcacaatctcagctcactgcaacctccacctcccgggtttaagcagttctcttgcctcagcttcccaagtagctgggattacaggcgcccttcaccacgcccaactgattttttgtatttttagtagagatggggtttcaccatgttggccaggctggtcttgaactcctgacctcaggtgattcaccagcctcagcctcccaaagtgctcatattacaggcgtgagccgtcacacccggccagaaaacttcttttaacatcttatgtaatcatcaaaaaagaaggcaccaaaacctagaccatattgatgaaagattttgtgtgtgtgtaggaaaatgtaaaaatagggttaaaattgtatgtatacctacagttcttcacagagatgtccccagtttaataaatgcttggccatcattattaggctgtcatagctgtgtcactttttagatattgggcacataatttaaggccaactactaatctgtgacaacagtgttcaagaggaaacattggcatggaattactcataacctgcataccttcatatttattatgtggaatacaaatacctcctatttctgtggtataaaaaaaaactgtaggtctgacatgcacacatatgtttattgcggcactgttcacgatagcaaagacttggaaccaacccaaatgaccatcaatgatagactagataaagaaaatgtggcacatatacaccatggagtaactatgcagccatataaaaggatgagttcatgtcccttgcagggacatggatgaagctggaaaccatcattctcagcaaactaacacaggagcagaaaaccaaacattgcatgttctcactcataaatgggagttgaacaatgagagcacatggacacagggaggggaacatcacacacactggggcctgtctgctggtggggggctaggggagggatagcattaggagaaatacctaatgtagatgatgggttcatgggtgcagcaaaccaccatggcacgtgtatacctatgtaacaaacccacacgttctgcacgtgtatcccagaacttaaagcataaaaataaataaataattaaaaaatttwaaaaaactataggtctgttgccacaggtcaggttggcatttcttggtcatagtttgcatttttaaaaaatcattaagtaatagccacttgagtttctggttattctttaagtttataataagactcctattagagaccagtttaatttattctactgctttgtcatactaattcaatataattttaaataagaatttggaatatttctgaagtaaattttttttaaaagattaaatacatattattgtttcagaggcatcagcaaaaatagttgtcagtacctgccatggaggtggtaattcattagctacagtagtgagtaccagtaaaatgggttgacattttgtaccttaaacccatgtagcatttcacttagtggctggcttccttcctttttttcctgtaatttaaaaaatttttattttgaaataatgttaggattacagaaaaattataaaaataatacaaattattcatatatatccctcatccagctcctcctgatgttaacaatttatgtactctgttataatacagttatcaaaaccaggattaacattgatayaatgctactaactaaattacagaccatatcgaatttagcagtttttccatcaatgccttttctgtttcagggttccatgcaggatcccacgtagcatctagttgttatttctccttaggctcctgcagtctgtaacaatctgtctttatctttcatgaccttaacacttttggtcaatatgaccagttcattagtagaatatttctcagtttgacaaacaccacagtaataattattgcaagcaagatctgtcagtggatactamaatcagtaggcagaaagttgagaagcaagatatttacatagtctcaacatttctctcctaagatacttgttaattacaaagactaaaacagtaactttacagtggagaaacctggccaacaccatctaagccaagtgaataaggattaacatcatcagtaataagacatattgatatcatgattccatatccactgatatgataccctgaaaagaacacaatgtcacttctgtggtattcttcctaaaaatacataacctcagtctaactgtgagaaacatcagatactttatttttaattgtgttttctatttaggcaaagcataattgatttgaaggagaaggaaataccagaattaagaaacaaactgcagaatgtcaatagagacatacagcgcctaaagaacgacatagaagaacaagaaacactcttgggtacaataatgcctgaagaagaaagtgccaaagtatgcctgacagatgttacaattatggagaggttccaggtaagtttattgtagtttaaggcagaataaaacttgttccatggtggcttgaatttgaagtgtgagagttaaaaatagtagctagtattcaggtacaggttgtgtttagaattccccatcctgaatttcagataccctcagggagaaactgcttagtttacatccctgggtttaaactttttaattcataaatttaaaaattaagacagttctgtttgtttttcatctttagtcagcttccttttgtttacatcatttgaattgctgataattaatttcacttttatcctattaaactttgctaaaattgtatctrgaaatggtttataagtttagatttaaaaaataaatgataagagcaattaatttttaaagattttgaataatgcagtaagtttattaaaggaaatcattttgttatattcttaagatggaacttaaagatgttgaaagaaaaattgcacaacaagcagctaagctacaaggaatagacttagatcgaactgtccaacaagtcaaccaggagaaacaagagaaacagcacaagttagacacaggtaatacagtctgtgtccttctgtactcatagagactttgacattgcgagcacatgccttttacagtcaattttatatctgttacatggacaacgaagttccttcctgtccacatatatttgctctttttttctgaaaagcatcacttctctttgttctcttactttgcacaacagattttgaacagtaggagagtatgaaataagctgtattctcttttccttttttttttttttaagatagagtttcacttttgtcgcccaggctggagtgcaatggtgcaatcttggctcactgcaacctccgcctcccgggttcaagtgattctcctgcctcaccctcctgagtagctggggttacaggcacacatcactatgcccagctaatttttgtattttttcgtagagatggggtttcactgtgtttgtcaggctgatctcgaactcctgacctcaggtgatccacctgcctcagtctcccaaagtgctgggattacaagtgtgagccagtgcgcctggccatgagctgtattctttctcattcatacctgccctgtaagctttccctgtgagtggccagcagggaacatcaagctgatttgaraactagcagggttctcattgtatttttgttgcagtgggtggggcccacagaaatagcatttgtggattccatagaccgataaaaatgggaagaatgatacaaatagtattttctatgcccttacattaattactgtgataatatgtttttgtgtagtttctagtaagattgaattgaatcgtaagcttatacaggaccagcaggaacagattcaacatctaaaaagtacaacaaatgagctaaaatctgagaaacttcagatatccactaatttgcaacgtcgtcagcaactggaggagcagactgtggaattatccactgaagttcagtctttgtacagagagataaaggtaagaatatccatacatgttttttgtaaaattattttaattatttatttttatttttattttttgagacagtctcgttctgtcacccaggctggagtgcagtagcacgatctcggctcactgcaacctccatctcctgggttcaagtgattctcttgcctcagcctctggagtagctgggattacaggcgtgcaccaccatgcctggctaatttttgttcttttagtagagacgggttttcgccattggacaagctggtttcaaactcctgaactaaggtgatccgcctaccttggcctcccaaagtgctgggattacaggcgtgagccagcatgccccgccccattcttctcttttagagacagagtcttcatcagtcttccaagctggaatgcagtggtacagtcacagctcactcactgcagcctcgacctcctgagctcaagcaatcctcctgcctcagcctctcaagtagatgggactacaggcacacaccaccacgcctggctaatttttaaaatttttctagagacagggtctcactatgttgttcaggctggtctcaaactcatggcctcaagcaatgcagccttggcctcccaaaattacaggcttacatcacctcacccagcccatgtttctttaatatgaaatgctctttattagtgtaatggccagaactctcagcacctcatcgcacttattctaaaattgaccacataattggaagtaaaacactctcagcaaatgcaaaagaacagaaatcataacaaacagtctctcagaccacagtgcaatcaaattagaactcaggattaagaaactcactcaaaaccgcacaactacaaggaaactgaacaacctgctcccgaatgactaccggttaaataacgaaatgaaggcagaaataaagatgttctttgaaaccagtgagaacaaagatacaatgtaccagaatctctgagacacatttaaagcactgtgtagagggaaatttatagcactaaatgcccacaagagaaagcaggaaataactgaattcaacaccttaacatcaaaattaaaagaactagagaaacaagagcaaacaaattcaaaagcyagcagaagacaagaaataactaagattagagcagaactgaaggagatacacgaaaaacccttcaaaaaaatcaatgaatccaggaactggttttttaaaaagatcaacaaaatagaccactagcaagactaatacagaagaaaagagagaagaatcaaatagatgcaataaaaaatgataaaggggatatcaccacccatcccacagaaatacaaactaccatcagagaatactataaacacctctacgcaaataaactagaaaataataaatggataaattcgtggatacatacaccctcccaagtctaatccaggaagaagtcaaatccccaaatggaccaacaacaagttctgaaattgaggcagtaattaatagcctgccaaccaaaagaagtccaggaccagacagattcacagccgaattctaccagaggtacaaagaggagctggtaccattccttctgaaactattcctaacaatagaaaaagagggaatcctccctaactcattttataaggccagcatcatcctgataccaaaacctagcagagacacaacaaaaaaagaaaatttcaggccaatatccctgatgaacatcgatgcaaaaatcctcaataaaatactggcaaaccgaatccagcagcacgtcaaaaagcttatccaccacgatcaagtcggctttattcctgggatgcaaggctggttcaacatatgcaaatcaataaatgtaatccatcacatgaacagaaccaaagacaaaaaccacatgattatcccaatagatggagaaaaggccttcgataaaattcaacaccgcttcatgctaaaagctctcaataaactaggtatcgatggaatgtatttcaaaataatacgagctatttatgacagacccacagccaatatcatactgaatgggcaaaaactggaagcattccctttgaaaaccagctattatgaggatcaaatgaaaatggtataataattatttgtgtggttcctaagtgatagaacttgtactagtaagtaaagatttctggaagaaggagtttgccataataaggaagaactggctgcctggttaagtagtaaatgttattggaggtggtcaggtggtggttggttaattctgtataaggattcctgcttgtacaggaggtttgtcttatctgcagatcctttatctatggcggtcactctcagtcatagcactctttccatttgattccggatgtggtttcagaacccttaccaatacagtgagcaggcactcagttgccactggaatgcatttgacatcccttatatagattaatcacatctaagactcaaccagttataaacagttataaacaatcttacctaggtttatataattatgcgtactcattcaataagcactaagtatattactgaataattactataaatttttattaaattttagattacaaaatatcagaggttcagaatataatataaaatagtacttgcatctgtataattttttactatttataaagcactttgacattgaaccattcagtgcctcagcaaccctatttagatgatgaaatctctttatagaaaaattgagatttacaaatgtctcatgagtgcctaagtttatgcagctaataggaagcagagttgattttctgatagatcttttgacactgagggcatttgacttcctaacacaccataccacttcccagtatgataaaatagacctatattgaagtaattactaaataattgtatctacctctatagattcactcagtacttcagaatcttaaagtgcttgaggacctytgttttgaactgtggttatcatataactacgttgtagatttagtgttacaaggctaaataatggggacttctrtttagtaaaatagtttattacttgaaagccccgttccttccaaaatagttgtggagacaccaacattagtttaacagtatgcttttattaccatgaaatatctgcgtagccttagcaggctaagcttaaggacagaagtgtttttaccatcatgttttcatctgaaaaagaaaagtctggactgaatgagctttcctattctttgatcatgcagcagtgacgggcacctataaaatcatgaaaactcatgcttgaagccacacgctaatataattgggagcacatggcctagattaagaatcaaattagtggttgatgcagtatagcatgcgtagtggttaagagcgtgaactctggagctggactgggttaaaatcttggctgcttcatttactggctgttgtgaccctggacaaatcattctctgtgtctgtttgctcrtttgaaatataggactgaaaatgatggtactgtcctcatagggtcattgaaaggagcaaatgagttgacttttagagcctggcacatagaaagtgcttttattaagactgtgaagtctgacccctaaagtaagataatggaatattrtataatactttatcttttttatatttttaggatgctaaagagcaggtaagccctttggaaacaacattggaaaagttccagcaagaaaaagaagaattaatcaacaaaaaaaatacaagcaacaaaatagcacaggataaagtaagatttcatttatatatttacttatcaaatatctgtattaaacttaygttcatagcaccacgtcggacacttatttcacatgaaattaaatagcataagataaatagtattttcagattcatggtataattttgacattagaaattcttgttagaacaaggatttgatgtaaattattttgctgcttgatctacaatagaagttaagaaatgagactaattaatcaattcctataggtgagaaagggacttgtctgcgatcataaaattcagtagtggtggaaactggaacccaatgttcataacttcccagccagtgttttactgtgctctcctgttatgtgcccttaagtacaaccagtgtaaatttaatgaatatttttctacagctgaatgatattaaagagaaggttaaaaatattcatggctatatgaaagacattgagaattatattcaagatgggaaagacgactataagaaggtaatttaaaacttaaaattatttatttgattgtatttttattcatgtgcttaaagaattttcttttttgtagcaaaaagaaactgaacttaataaagtaatagctcaactaagtgaatgcgagaaacacaaagaaaagataaatgaagatatgagactcatgagacaagatattgatacacagaaggtaggtctgttttgcttatgatatcacttacacctatgacattcttttctatagttttattttcaatagaagatccattgaatagaaatgcaaaaaggaaagaggccaagcgtggtggctcacacctgtaatccctgcactttggaaggccgaggcgggtggatcacttgaggccaggagatcaagaccagcctggccaacacagtgaaaccctgtctgtactgaaaatacaaaaattagcyggccgtggcggcgcgcacctgtagtcccagctactcgggaagctgaggcatgagaatcacctgaacctgggaggcagaggttgcagtgagctgtgattgtaccactgcactctagcctgggcgacacagcgagactctgtctctaaaaagaaatgcaaaaagtaaagaaaaataattccaataacattcttacttcatttattttttatttttattttcagtaaaagactcatggtaaaagttcgaacataaaggcataaaagtgttcctccccttctcctaattctcaatcttacttctacatgtcattaactgttacacttatttgttcttaaagaagttttttattcatataccagcagataggtagataaatttaggtgtgtgtgtatatatatatatatatatttaaatttacttttatggatggggtcgtatcatgttattctgtaccttttttcacttaacataatttgattttacctatcaactcacagatgtatcacattctttttaatgattataaaatagtccattttgtgtatataccagcacttactcagattgatttcatttccttatsacaaactgtgtgacaatgaacatctttaacatgtatctgtatcttttcttattctaacatatctttatgtagcataaattcacaaaagacggattaaggtttaataatcttgaaagtaatctgtaaggaaaatatttatatattaagtcattttccagttgattcctatatcatttattttctctattaaagaaattaatttctatagtataatcaaaatcatattaagaagccatcatcacatgctttatgcaagcatggtagttaatgcctttaaaaactataccatttctctgttcttactgttttaaacaaaatttactatttgaatgccttaaccacttggttataagtggttgcttaaaatcatttggaagattagttacattagttttctgctgggtctctttctgtaccaccaagaatttcaaatatatgaaatatcagtcaaagggagatcaaatctctgcctggcctaatacatattgaataactgtataaatttatgatgcatatataacaaaataattatcactagcttttatgtagttgcctatataaaaatcacaatctgtaaattcgcagcagctctctgtatatatatacgaaattgttaagattaatgatctatgaccccttttaaagtgatggtctaaacttagtggatctgatggtattagtttactttgtaaccttccttgttccagaaattatttacttagttatatacaatagagcaaagataaatgtatttcaaattaatgggaaaacaaggcagtgtagaaataagggcaagaaagtaatgaaaccaggagagaagtgtataaaaagtatgcatgaagtctgatatgcttgctgaagattctagtagtcaaataaagagaggaggccaggcgcagtgactcatgcctgtaatcccagcactttgggaggccaaggcagacggatcacctgaggtcaggagttcaagactagcctggccaatatggtaaaaccccatctctactgaaaatagaaaaattagccaggtgtggtgacacgcgcctgtaatcccaggtactcaggaggctgaggcaggagaatcgcttgaacctgggaggcagagattgcagtgagccgagatcacaccattgcacttcagcctgggtgacaagagtgaaactccgtctcaaacaaacaaacaaacaaacagaaacaaaaacagccaggcgtggtggctcacgcctgtaatcccagcactttgggaggccaaggcgggcagatcacgaggtcaggagatcgagaccatcctggctaacacgccgaaaccccgtctctactaaaaaatacaaaaaattagccaggcctggtggtgggcgcctgtagtcccagctactcaggaagctgaggcaggagaatggcgtgaacctgggaggcagagcttgcagtgagccgagatcgcaccactgcactccagcctgggtgacagagccagactccgtcttaaaaaaaaaaaaaaaaaaaaaaaagtcacaattagtcaagattcacattgtgtcaatgctaaaagaaaaccagtttcctatactgactacaggataatgtctctattcatagaaaggaagacatgtatagtcttcaacagacttcgcagggctttaaaaaaaatacagtgtatctcagcatcattattccttgatacgaggttctgtagagggtggtatgattgaagcctgaagtaaatgttaatgtttagaaagcaaaggttcttagctaggggcacctgtaaatcgtctgagtttttccacttctaggtatagaactaagaaaattgaaaacatatgttcccacaacaacttgtacaagaatgctcatagcagcattatttgtaatagtcaaaatatggacacacccaaatggccatcaactgatgatcagataaacaaaatgtggtatacccatacaatggaatattattcagccataaaaaggatacatgctaccacatgaatgaacccttaaaacatgctaagcaaaagaagccagtcacaaaaggtcacataatgtacgattccacttataataaatgtacagattaggtaaatccagtgacagcagattaatgtttccagggggctagaggtgaggaaggaatagagtgactgctattgaatatgagatttccttttgggatgatcaaatgctctggaattggatagtggtgatggttgtataaccttgtaaataaagtaaaactgctaaattgtacacgtttaaacagtgaattttgtggaatattaattacatctcagtttttaaaaaatgacttaggttattaaaaatacatgtgttggccgggcacagtggctcatgcctgtaatcctagcactttgggaggccgaggcgggcagattgcttgagcctgggagttccagactatcctgggcaatatggcgaaaccccatctctacaaaaaaattagccaggtgtgatggtgcatacctgtagtcccagctactcaggaggctgaggtgggaggattgcttgagctggggagttcaaggctgcagtgagcccttactacgccactgcactccagcctgggcaacagagcaagaccctgtctcaaaaaawatatatatatatatgtctatgtctccaatccacaccagtaaatcagaatcttgggggtttgggcagagatatgtgtgttttgttgaaattccttagaggttctaatatatccctttagctgtcaataactgagccagcactggatggactgcatagctttcaggcagtcttgtagaagtggtgttattcccagctagacttttggtggacattggactgtaatctgttcagcatgccactctctcacaggtatctagaatgcagctaatttttatgtttccataggtgaccagctgcatgcattaactgtcatctgagttggatgattggggttaatatttaagagctgaggagcctaacagtcacttatttacgtactgatttaagccctgctaaatttagtccacagaataaaataatttggaaacttaactgcctttctcagttttcagctgaaggaatatatgaagagaactgtaggtgacctgacttgtccaaggtcacaaaaagtagtaacaggtagaactggaccctacactatcaaatttctagtagaatggaaaaacatttgtggtatactataactgcatctgattttttttcccttcctttctctgatacattttgtagactataattggaattctcactgcttacagtacaaaggacaaatttgacccaaaaggcattttattagcaattattgagtcaggcactatactgattacatacactcattcctttaatcttcacaatagtctttttttttttttttttttttttaaattagatggagtcttgctctctcacccaggctggagtgcagtggcacaatctcggctcactgcaacattcgcctcccgggttcaagtgattctcctgcctcaacctgcctggggctacaggcgagtgccaccaggcctggctaatttttgtatttttagtagaggtggggtttcactatgttggccaggatgatctcgaactcctgacctcaagtaatccatctgccttggcctcccaaagtgctgggattacaggtatgagccaccacgcccggccacacaatagttctttatgatagatagtatcattattgaccatgttataagcaaactgaggttcagagaatttaaactaatttgcccaaagttatccagtttaaaagtaataacactgtgatttgagcctagatgtatctgacttcaaagcattacactcttgatgtggtatatactgtctttcaaaactagaagaataatggaagctgacctaaaacaaagaaatgcctagctgtctggtaacaatgcaggtagacagaccagcaacaatattttgtgccaaaaatcagtctcatctaaaaatgtgatagcactttaaagagtcctttcatgcaattgtgaaaacaaattcaaatgttctggggtattagatgaaagtaagcagtagcacattcccttgttcctaataaggaacaacaagcatagtaccccatagtagaaccttggtaagtcacaccagctacagtggtacattagattgctttagcaacaaaggacatttataaccatgtcattttagtcacctttaactgcctataataatgcctttagtagatacatattcagttgtctcggtatctctgggagggattggttccaggatcccccgataaaacagataccgaaatctaggatgctcaagtcccttatataaaatggcatatctagtgtttacatatagcctatccatatcctctgatatactttaatctctagattgcttttgatattaatatgtaaatgatacgtagtttttatattgtattattttaaatttgtatttttttattgtactattactttttattttttttccccaatatttttgatccatggttagttgaatccgtagatgtggaccctgtggataaattgtatgtttatattatttccaggaaaaatgaaagtagccttactttgtgactgttaaaaaagaaaaaaaaaactctaaaaatagtcacgcatagaggggcaggattggatatgaacattaagcatgtgagagaaatccttgatttccctctctcatctaccagtccctggcctttactgttggtgcaagatattgccacaggtctgtccatctctctcacttcccatgtcactgagtttagcttagctgcaagggctattgcaggagggtcccagctccctctttgagaaatccttactccaaattcagaataagttttctatacacatgatttgtgggccaaatcacccttctttctgcaggaaattttttttcctctaaattccaaagaatcaacttaaaaactgttttctaatgattgtctcttgacaacatagttcattttaatcaccaggaaaaccactgaaataattttgttgttgttgctgctgctgctaagtgttattgagtctcttttgaaggacaaaactactcaacaagaacagccaattttttgaaatttcatttcggtggctaaggaggtaccaagttcatagatatatgctactattgtggcacttcttactgccttgagtgattacaatttgtcaacctaaaggtagaagttgcaggtaacatatacctaacaggttctaatggtcttggtacatgttgggagacagaactaggacgaaaaagttggggaagacttcagtagtagtattgatctcttataatctttcaggtcagtaggctttatcatggggttcctatgcaaaatgatccactggggatgtaggtattaaaatatctagttatatttttaatttcaccatttaaaatgtctgttttgtatgtttttaatactttataagtaaataagtacacagatatatgctcaaatctttatgagactccccatcaaacagtagacctggtttttagattatggttgtgaaagagcagtaaaagctgcgctacaggaggtattacacttgtcactgtggatggggatgggccatccagattgccccagacctgtagattccttcacactggcttattctccctctgttgaatttcacatgattctaagtaagacagaaatggcacttgctgtcaccagttgcctgttacagatttcatgttagtaacttggttatttttgttaactaatttaatgtttacctttagatacaagaaaggtggctacaagataaccttactttaagaaaaagaaatgaggaactaaaagaagttgaagaagaargaaaacaacatttgaaggaaatgggtcaaatgcaggttttrcaaatgaaaaggtatgcttttaaaataatcttcagtttaaataaacgtctttattactggaatgtgaagaatattaaatacctgttttaaaagaattttagcctcagcctggtatcctttgagagttactagaaggtgaacagtgttttgrtacaattatatttcatggccttaagaactttatyactgaagaagtgatatagaattggtaatcacactgtagtgatgggccttagttattcagtattgaacatgcttagyccccatacatctgctagcctgctgcacagaatagtggtactaagcataaagaatatggagctgtggaccttgtctgggtcagagcttgtacagtctataatattgtcaatggagttgttgccagagtgatttatccacagagattcattttagattttctcatttgtaattatgtgtccaccagagcatttcttttgaaagatgagcctcattcttcctttatctggtcttattgttacttattgtagttgctaccttcctggtacagcagaaaagattttattcctgccttgactgccttagagttagttgccttaggaattctgtaagaaccttgttgatgctaaggcactagactggtataaaaggttgtactaggcaaatacttagattgtcaaccacctcagctggttaaatccaggcctctcatttattaaacccttccttgtagagttttcatgtcttcttgaatttatacagaaatctgaatgaaaaaatgcccaggcttttctaaaggatatagtaaagtgaattttaatttataaagcctaacaaatggttaatcctgtgttttggttaagtactcttagctatttaaaatctctttcctatatcagggaaatcagatttttaactagaagagctcatcatcttcagagtcttcatttttgtatgcattatgcacacttagacccagaaaaatcacagaggaaattatgatgaaagccaagaatgtgaccctaatatcctagttcccaagcctcagttcttttacacgatactctccatggcaagttggaaaagtaatgcttctagaagaaattttgatataaaataatatattcgtggctactaaagaccaaaaccagatatttaaaaaatttcttctgtaattggtacataacagtactttttacattcattcacattactaagtacaactatttttcaaacgtttcttcaaccaggacataacagaaatgccaacaagacwtgtaatccagtcgactctgtaaggatgcccataagcttgagagtagtgcctgacacataagaggatgcttaataagtgataataaataaatgaagatttttaaagcatacattgaaatttgtataatctgccaaaatatcagaaaagtttgaatattttacttttttggtcattattatggtttttacacttgtgcaagagaaattttgttttcatggaggaatctaaatttttaatawgtattactgcagaaaattaatatatgatttaattcgtattgtgcctttgacatgagcaaaatgatgatgaagcctgttatccataacttcttagtgttgataattgtgcattctcagttcacaatcagaagattgtgaatttgtaatattaatcaccagagtgctttacttagcgtctaaaggccaggaactttatcagtgatcrcatgctatgagggttctgtaatacacaaaattagctatttagcaacctatgtgcrgcagagatatggaaggaagagaggggttttctttagtaccaaagccctaaataataagcaaggagagactctgttataatatactgattgctaaggagaatgatacttaacctatctaaagaaatctatgacttttccacttcaggttgttaaaagctaaaaaatggtcctcatttgtcatttttcttktttacagtgaacatcagaagttggaagagaacatagacaatataaaaagaaatcataatttggcattagggcgacagaaaggttatgaagaagaaattattcattttaagaaagaacttcgagaaccacaatttcgggatgctgaggaaaagtatagagaaatgatgattgttatgaggacaacagaacttgtgaacaaggatctggatatttattataagactcttgaccagtaagtattagactggggattttcttattgcagttaatattaactaacatactttagtcatcttttctctcatttttttctttttttcttttttattttttgagacagagtttcactcttgtttcccaggctggagtgcaatggcacgatctcagctcactgcaacctctgcctcccgggttcaaatgattctcctgcctcatcctcccaagtagctggtattacaggtgcatgccaccacgctgggctaatcttgtatttttagtagagacggggtttctccatgtaggtcaggctggtctcgaactcctgacctgaggtgatccacccgcctcggcctcccaaagtgctgggattacaggcatgagccactgcgcccagcccctcattttttctctttaaatatggtattttatgtataccatggattggaaaatatatgtatgtatgtatgtaaacacacactagcttaagttatgaagttaagatataaagcatattaatatctacgagtattcatgatactacctccctctaaccaatctaccattatcactgattggcatccacttagatgctcccttcttatctcaaccttctgtcatccccattccctataaccagtgacaaagatttttactttctctgcttttttaaaaaacagttttatcatatatatgtcatattttgagctttttaaaaatgatatgatattctaggacttgcttttttatttggatttgcttttgtttatccatgttgtttatggccgtagttgattcattttcactgatgtacataatctactatgggaatagaccacaatgcattcattctcctacagatggacatttggggtttttttccaggtcttgtcatgtcttctggaggaaaggtataaggttatatttgtgggagtgcattgtggagtatgctcaattttacaaaataatattgttttccagaaatgactactgatttataccactagcagtatataagggtttatttgatggatcctctgacattggttttataaatttcttaatgtttgccaacctcataggtttaaaatgatgaatcgttgtttatacattattagtcttgtctttttgtgtgttttgggacagagtctctctttgtcacctaggctagagtgcaatggtgcaatcatagttcagtgtaacctcaaactcctgggctcaggcattcctcccacttcggcctcccaaagtgctggggtcacaggtgtgaggcattgttcctggccctattggtcttttcttattgatttaaatgtgttctttatctcttctgcatttcaattccttttcagttatatgtattacaaatgtcttttcaaacattatgcttatcttttttacttagcatcttttgatgacactggatttgattttgagttagttgaatttagcagccttttctggttagctctttgtgtgtcttgttaagaaatccttccctactcctctctctctctctctctctctctctctactcctctctctctctctctctctmtatatatatatatataaagatatatatatataaagatatatatatataaagatatatatatatagagagagagagagagagagatatatcttttttttttttgagacggagtctcactcagtcgcccaggctggagtgcagtggcgccatctcggctcactgcaagctctgcctcccaggttcacgccattctcctgcctcagcctcctgagtagctgggactacaggcgcccgccactacgcccggctaattttattgcatttttagtagagatggggtttcaccgtgttagccaggatggtctcgatttcctgacctcgtgatccacctgtattggcctcccaaagtgctgggattacaggcgtgagctgccacgccctacttctatatttttgtctaaaagttttaaattttgcctttcacatgtaagtacatttaagtatttaattctaagttgaattttttccgttatgaataactggttgtcttggctctatttattgtagactatccttctctcagtgacctacagtgtcatttctgtcatatatcagaattccctatgtgcctgggttggcctgggttctctgttctacttaattcatcactttgtctatctctgtgccatttctctcaccatcttaattacatatagcagaattttctttatccagtgtatgtctgtcttttaaccagtgaatttaggcctttcatattcattctgattactcaattgagttggatttatttctgccatctttttttcctttcctgcctttttgagatggatttatttttcttgactcctcctttttcccttctttgggttatccagttgaccatataacatggggattagggacactaagccccccacgcagtcagaaatccacatataacttttgattccctcagaacttaactactaatagcctactgttgactggaagccttactgataacagaaacagttgattaacatatattttgtatgttatgtgtattatatgcagtattctttcacaataaagtaaactggagacaagaaaaaattataagggaaaatatattttctgttaagtggaaatgaatcatcataaaggtcttcatccttgtcctcttcacattgaagaggaggaggaagaagaggaggggtcagtcttgctgtctcggatggcagaggtggaagaaaatctacataaacatagacccacatggttcaaacctgtgttcaaggatcggttgtattctactttagttatttgagtgtttactttttaatttttaaatacttatttgacttaaaatcatatgcattagttctcaaagtggtcgtggagcaccattatcagtatcaccttggaacatgttagaaatgcctctcagcttctacyccagacctcgatcaaaaatttgagaggtagggcccagcagtctatttttgacagacattttgggtgattctgatgcacatcaaagtttaaaaaccatagctttaatgtgaattgttttatctttttcctgaatactaattatcttctctcatctgcattatttcttttgtctaatattttagttttaccttgtttttaaatcatcacaaatgagtaataattattgtggtggtttcataagcccgcatgtttcccaatttctttgttcattcttgctttttaaatcccactcctcccttctttaggttcagttttctttttttggagtatattcttcaatagttttttcagtgaatgactgttagtggtaaacaatcagtctttgagaagtttttccccttaatttgatagtttagctgagcatagagttctagattgacagttttgttctcttggcactttgaaaatatttcattttttgttggcctctatggttacagttgagaaatcattttaattattcctttaaaagtaatctgcctttttcccctggttctcttaggatttttccctttgtcttcagtgttctgtatttttataatagtgtgtctagactcagctttagttcttctgctcataaattatgctttttgatctgaggattgatatcttccatcaattttggggatttttcatacattatctcttcaaatattattctttctccatttctcactattttccccttcttcactttttattagacataacctcctctttcctctacattgcttaacccctcttgcatatactgggctctgggtaaatatcttgttaaataaattatttagctgctacttatactgcctattgagttgtcattttttcctccatttttttctataagttctattttgttctttttcagaaactcacatggtttttttataattttttttttttaaaacagagtctggctctgtcgcccaggctagagtgcagtggcatgatctcggctcactgcagcctccacctcctgagttcaagcagttctcattcctcagcctcccagatagctggaattacagatgcatgccaccactcggctaatttttgtatttttattacagatggggttttgtcatgttgccccggctggtcttgaactcctggcctcaagcgatcctcctgcctaggtctcccaaaatgctaggattacagatgcgagccactgcgccaggcctatgatgtattttcttcctttgtattttgattccttcttgaatgtgtctttactcattttatacacattttatacctaggcctcccaaagtgctaggattacagatgtgagccactgtgccaggcttatgatgtattttcttccttagtattttgattccttcttgaatgtgtctttactcattttaactatacacattttatattctctttcagattgttattttttaatttcacattttgaggagtctgcttctgctgttttgtatgttgattctatcccctagtgaagtttctgtgttttattaacatttaattgtgtgcttatctttagtagtgttgttttttctatgagactcccttgtgacctttccttgtagaggtccatctacacagaaattttggttttatattaactaagagctccagagaaaacattggcctgcatgtagggtttttgttaatttcttagttggtaggttcctagactatactcactggtagcataactttgaaccccaaaactatataaagcatttgcccaagactttgaattttcaactcattaattttccactctttcattgaggattgatgttatagctcttgaagagtcccattttttgtgtgttgggagtcacttctaatcttcttccttacttgggtcctatccttcatcttctgtcctggatgataagaaccaatccctaggttataaaaacaataacgccaagttcatggctgggcacggtggctcatgcctgtaagcccagcactttgggagaccgaggtgggcggatcacttgaggtgaggagttcaagaccagcctggccaacatggtgaaaccccgtctgtactaaaaaaaatacaaaaattagctggctgtagtggtgcacacctgtaatgccagctactcaggaggctgaggcaggagaatcgcttgaactgggaagtagaggttgcagtgagccaagattgcaccactgcactccagcctgggcaacagaacgagactctgtctcaaaactaacaataacagtaataataataaccccaagtttagtttgtctgtcaggttacatactgactggtctggttttcacttctatcttcgtttctattatgtagggatttccctttctttcttgtgagctcaactatgaatttaaaataagttttgttataagtctatctagtagttctgttcatttgtggcaggagaattattacttaccttagattttggtggtggttgttttttccagaatggcaaatatcttccttagcactaagagagttacmcagagagcttctcttctaagacttctggtcagatacagcatagtcaacagaccaacctgagcagtggcattcagaccacagggctcaggaagacaggagaactctggtttcagtatgaggacttttttagttagtgatgataacaaaggtggtcccagaattgcctaggcatatttttggcatatacaagttttaggaagtacgtaatcatgtaagacaaattagatccatttactgtgaaatattgggagtgagccaattaacatgttattttttaaaaataaattatactaagatttttgttagattaagtttaacttttaaaacaattttttgagagtattccatggatatatcttttgtcccatttcattgtgagtgggtacgttaacattacaatgttccctgggtccaaaatggctcatagaattatatgcctgcaccaaatgagaacttttgttttttaacttctttgaatattgccatctctcctagatattagatccagcagtttaaagtggttagtcttggaatttaaggtgctgaaacaagaacataagcaaaacttaaggaattcttgcccagtagactacacatacatatatttgttttttgttttttggttttttttgcctttaataattctttttagtcttctcagctacctcatttatgcctttaggggactttttagtttttcttagttctttaacaacagatgctgtgtatctaatagacttatcaaacattcattgagcattaaggaataggagatccagtaacttctagcaaggatattatagtttatttgaagagacacaaatcaaaacagatttttgttggtaaaaacctattttgccaggcttagtggcttacgcctgtaatcctagcactttgggagtccaaagtgggtggattgcttaagtccaggagtttgagaccaacctgggcaacatggcgaaaccccatcactacaaaaaaatacaaaaattatctgggcgtggtagcacacacctgtaatcccagctactcagaagcccgtggcgggttgcaatgagccaagattgtgccagtgcactccagcgtgggtgacagaaagagaccctgtctcaaaaaaaaaaaaaaaaaaaaaatcaccaaaacttctatttggaataagataagttggttgtgatggaaaaataaaaatggatattaaaagcaagacattggactttgtataaaagtccaacatgataagttttaccttttttaaaaagcctcagaagtccataatacatggttaaaagtgctgtctctgaacactacagatgtccagattttgaattctttttttttttttttgagacggagtctcgctctgtcgcccaggctggagtgcagtggcgggatctcggctcactgcaagctccgcctcccgggttcacgccattctcctgcctcagcctcccaagtagctgggactacaggcgcccgccactacgcccggctaattttttgtatttttagtagagacggggtttcaccgttttagccgggatggtctcgatctcctgacctcgtgatccgcccgcctcggcctcccaaagtgctgggattacaggcgtgagccaccgcgcccggccgaattcttttttttaaaaaaagttttattcttattttttatggctatatagccggtatatttatgtggtacgtgagatattttgatgcaggcatacaatgcataataatcacatcagggtaaatgaggtttccatcacctcaagcatttatccttccttttgttacagacattccaattatactatttagttatttttaaatgtacaatacattgttgactgtagtcactctgttgtgctataatatactagatcttattcttactatatttttgtacttgttaaccatctccactgcccttcctagtctctggtaactatcatctccactatctccatgagttcaattgttttaatttttcactcccacaaatgaatgagaacatgcaaagtttgtctttctgtgcctggcttatttcacctaacataatgtccttcagttccatccatgttattccagatgacaggatctcattttattttatggctgaatagcactccattgtatatatgaacaacttttttttttttttgagacggagtctctgtctcccaggctgaagtgcagtggtgtgatttcagctcactgcaacctccacctcagcctccgagtagctggaattacaggttcctgccaccacacctggctaatttttgtatttttagtagaaacagggttttgccatgtaggccatattgatctcgaactcctgacctcaaatgatccacccgcctcagcctcccacagtgctggaattagacgtgagccaccgcgcccgagaggaaccacattttctttatccatttatctgttgatggacacttaggttgcttccaaatcttaggtattatgaacagtgctgcaataaatatgggagtgcagatatctcctcaacctaatgatttcatttcctttgcgtaaatatccagtaagtgggattgcagaatcatatggtagttctgtctttagtttttttaggaacctccatactattctccatagtggtgattttgagtcctgactgaagatatttagcaaattatttagacactctgagtttccgtttcctcatctataaaatagaatttttaaaaatctatactattattcagtatagagtcagaaaagctcagaggcgatttagtccagcttcctttgtcatgttccattctttaatgtaagttaagttcttaaattctctattctttaatagcactaaagaactaaattcattaagaaaacgtaggtttctgttcccatttaaacattctttgaggttgagggctgtgcatagaagacaataatagcaattgaatactacatgatagcataatcgatttaattattgtatctaactctgttttaaagggcaagtatttatcagacagattaagcaggctacccaagattacccaggtaaatggtagagataaaattagatatcagaaccactgtgacatgctgctaccatagtggccccctgcttttttttttatttttctggagacggagtctcactggttctctcagctctctcaggctggagtgcagtggcgtgatctctgctcactgtaacctctgcctcttgggttcaagcgattctcatgcctcagccttctaagtagctgggattacaggcatgtgctaccacactgggctaatttttgtatttttagtagaaacgaggtttcgccatgatgaccaggctagttttgaactcctggcctcaagtgatccaccctcctcagcctcccaaagtgctgggattacgggcatgacctttttttataaccgttaaaaaactagtatttatataaaagcattttaactgttacttatacttcctggtttagaaccataacttatttctatatattttgtaactcttcagtgaggtgcttgtgtacataatacatagttgtatattaggattttgttcaataaaaatttgagtacataaatgcttgatactgttctagatactaagtatataaggatgaagaaacaaaattaagaaataaattaataacaaaatgggtagtagtggtaggtattacagtgaaaatgaacaatgtgagcataacagatgggcctttaagctgggacctgattgatgagaagggagcaagatatgcaaaaaatggggtgcaggcgttccaggtagagagaatagttactgcagcagccaagaccagtacgaacagaaagtgttcaaggaccaggaagaaggcaagcatgggtggaatatagtcagggatagaccattcccagagtatgtcatgccttgtagccttggtaaacaaacagttttatttcattctaactgcattgggcagtcactggagggtttgaagcagggaagtaatataatctgatttctagttggaagaaattgcactggctgctgggtgtggagaatggattgtaaagggcaagagtaaaagcagagactgatgaggagacttgtagtaaccaagagatggtggtgggctagatcaggtggtagcagtgaaaatggagagaagtgatagacttgggatttgttctggagagagagttgacaggccttgcttctgaattgagtgtaagggagggaaagtaaaataaccaaaggttgctcctacatatttttgcttgaacaacaggatattgggagaacaggttgccattccctaaaatgggtgggactggggagagaaaatcagtagttccgttttgtacactttaagtttgaagtgcctgtagatatctaagcagagctgtcaagcaggcagttggatatataacctcgagcctagagttcaagtgaaaggtgtacactggggagtcatcagcatatccacggcatttaacccatgagatgagatcacatgtggaatgagcatagagagagaagggaaaggtcccaccactagttatgtttgcaaatccagtaaataagcagctggtgatgtgggaaaagattttaaaagatgtggtatcttgaaaaccaagtgaagcaaatatatcaagaatctaatgctatttggagtcaaataagataaggactaagaagtggcccttaaatttgacaaaatggaagttgttaatgactgaggagcagtcagtggcacagttggaactgaagcccggtcaagttgggtggggagagaatgggtagtaagaaatggagacagcagccgggcacggtggctcacacctgtaatcccagcactttgggaggccagggcgggtggatcacctgaagtcaggagttcgagaccagcctgaccaacatggggaaaccacgtctctactaaaaatgcaaaaattagctgggcctggtggtgcctagcctgtaatcccagctactcaggaggctgaggcaggagaatcgcctgaacccgggaggcggaggttgcagtgagccaagatcgtgccattgtactccagcctgggcaacaagagaaaaaaactgtctcagaaaaaaaaaagaaaaagaaatggagacagagaatatagataattcttataacaacttctcctgtgacggggagcaagaaaaatggggcaatggttagagtggaccagggaccaagttaaataggcaggttggttttgttttcaattttacttgtaagtattttgctgcaaggtcagctcttctcttacagcccattgacctgcagacctggggtttcatatgtattcactgaatagaaaaacatacgtaggagctctccagctatccctgcataccctgagaaccagtggcagcaggaataagaattcccttcacttccaagattaggctataagagaaaaaataaaaaagaattcaacaacccttgctctgccactttcttgtcaggctctgggaaaacaggaatatctttccctgtccctcctccaaactgctgacagtctgtctgatggagaccttggtaggtgctccatagtctgtttttgacctgggcctgggataagaaggaagggcttttcagcagagaaaagtgcctcagtcacagaggcatgctgagcagaatgaggayctatgagggagcttggtggagcctggcggggtggagaggtacaggagtgctttctagcaatttaggcttrttaaggaacaaagccaggctgtttactgagttctcttacctggtactcagatggattcttctaaatgaaaagaggtgatacaaatttccccaaaattgagtctttgtggcttatgctcgcaaacagtggccttctcaagatttatacggtgagccctaaatttgccttctcacccagaagaaagtaaggtacaaaatttccctcattctttcacgtcttagaataaagcatgcagtcagtgtaattgttgcgttcagctgtctatttaaggtaacacaggaagtcagcagtgcattttcaagaaaagctgattaccatctgttattagtaatcatctaaaaacatcactaagtataagcattggcagtggtcagagacacatagatgaaaagggggaaattatccatcatttggaatgtattaccccatactaatacaatataccaatttaaatgatgttagaatatatcactcaagatatggtgttctaccccatgcccaaaatgttctactctcatttttccccagatgtggaaggttgcatattaggtaatacttttttttttttttttgagacagagtttcgctctttttgcccaggctggactccaatggtgcgatctcagctcactgccatctccacctcccgggttcaagcaattcttctgcctcggcctcccaagtagctgggattacaggcgcctgccaccacacccggctaattttttgtatttttagtagagacggggtttcaccatgttggccaggatggtcttgatctcttgaccttgtgatccacctgccttggcctcccaaagtgctgggattacaagcatgagccacgcacctggccaggtcatgcttcttttaagactcattgtaaacacgtaacctttacagttttgcatccaaggtagccagctttctgtgaggctcttcagagcctgggtccctgcattcgaggggagcttcagatgagggctttattcagggctcaccttagagtcaccatctctatcatgaccatggatgcagtaaggtttcacagtagctcctgcaacctcaagagggtagattacaaaacccaaagatagccagtggtgtttcacacctaaacaaatgtttatcttgccatagtgattgaaccataggctgaattgtaaaagctgatgtttgggagtctagctaaagaaaactaagttaataggtttaaagaagcaagagctggaagggtcttctcctggaaggtgagatattggtctgtggggtgtccaagggagagaatccagtcatgggttcttagcttctctttctggttggaccagtaaagcctcttcctcatccctcttttctgctcatcactagagacaaaactaaaaaccatggcttcagtctgctaaaagcctagaacaaaacagaacaacaaaataaggcaggctggacaagcttgttaagactttcatggattaccagaaatataaatgccattaaagccatcatttttcctcataaaatgcaatcgattgttactgaaatttttaatgaaatctttcagactcttaatgagtatttaaatatcagactaaagtaatttataaatcattattttctgagctccgagagagtctcacttttttttttttttttttttaagacagagtctggctctgtcacccaggctggagttcattcttgcaaactcggctcactgtaacctccacctcccaggttcaagcgatcctcctgcctcagcctcccaaatagctgggattacaggtgcccaccaccacaccggctaatttttgtatttttagtagagatagagttttaccatgttggccagggtggtctctaacatctgacctcaagtgatttacccaccttggcctcccaaagtgctgggattacaggcgtgagccacctcacctggcctctcactttaagagccagttttcacaaagaaatcatactacttcgcatgagttagtatatgcatttaactgagagatgtgcatactccaggcaggtggtggagctgatacactagccagatggctacttgaccataacagtttgcagcccatgaaattcaaatctttgcctcaccagacagtcatggactttcaaggtcattctgtaagttatttgatgttaaatgcctgtaaagtccaagtgataaaagcgtgttaagttaattgggccactatatgtcactcaatagctcctatagggttcttgtacaggatctcactctgtcacccaggctggagtgcagtgctatgatcacagctcactgcagccttgacttcctgggatcaagctatcctcccaccttagcttcccaaagtgctgggattgcaggtgtgagccaccgcacccagcccagagctgccttctttccatggcttcagcctaagtaactctcacctattaccgtggcacctttcccacctcttatctcttaccgtccttcctacccccacctccacccattatacttctgccagcttcattttcctaaagctggtggtccctattcccttctaattttaggaatgacttccatacctgggctttcccatttcaattcctactaccaagtgtgttctaaccaaacaattttgtcccatattttcctgtgctatctctcccatccttggaatgttatgttgattaagcccttcccaaacatatgtgatttttttcctacctttgtacttaataatattttgtaccacttatacaactaaagccattcagccttgtattacagatatttgggcttccccacgctccataactgcaaaccacagaacacacttcaaggtagacttaggctcatttccatgacagtgtctaactttgattcagcccttaagaattattaagttggtgacatattttcatttccctcacaatggctttgcacatagtacacccaaatacatcttttttgttctttgtaagcattatcacaaggtagatatttttctgagtttttttttccatttaacgtggtgataatcttttacgttcatatattcaagtaccttgtatttttaatggctgcatattctgtaaaatgcatgatatctactttatttaaccactattgaacatattagaaagcttttaaatatgtgctactacagataatgctgcagagtgtgtctttgcacactaaagcagatatgtcaaaaagacagcttcctagaaatggagttactggctcagatgttatgtatattttttagttaatgccaaattgccttctaaaaacacttagaaaatttccaccaatagtatatgaaagtgcccattccatgtctggattttgttactgacattttattggctgcacaaaaaaagcttgcactttaatttacatttccctctttactagtgaagttaaatgtctttttgtatgttgtctatttgtatttcttctccaagaattacctattcatatctctttgccagtttttctactaggttgtctgtttcttgatttgtcacattttaatagattctagatgttaattattttcacatacattgcaagtacctattcccagtttatcgtttgtccatcaattttctttcgttttttcttttttttttttttttttttgagacagagtctagctctgtcgtccaggctggagtgcagtggcacaatctcagcttacttccttccgcctccatctcccgggttgaagcgattctcctgcctcagcctcccgagtagctgggactacaggcatgtaccaccacgcctggctaatttttgtatttttagtagagacagggttacaccatgttggtcaggctggtctcaaactcctgacctcaagtgatctgcctgccttggcctcctaaagtgttgggattacaggtgtgagccaccgcacccagctgcctcagctttctttatggtatcttttgtaacttttaatttttaggtagtcaaatctttagtcttttgatttatggcttctcaattttgttccttatttagaaaggcttcccaatcctaaaattatcaaaatgttttcatctgattgttttattttaccttagcttttgttttttgttttttgttttttcagacagggtcttactctgtcaccgaggctggagtgcagtggcatgatcacagcttactgtagcttcaacttcccgggctcagttgatcctctcacctcagcctcccaagtagctgggactacaggcactcaccaccacacccagctaatttttaaatttttttgtagagatgggatctcactatgttgcccaggctggtctcaaactccaggctcaagcaatcctcccacctcagctgcccaaatactttagcttttaatcctttcattcatttggattttattttgaggttggataacgggtaataattttttttttatcttttgtaacactgttgaaaactttccagttgatttgaactgttgcagttataaactaacgttctatatgcatttgggtttgtttctggattttcctttgtataccaacttttaaaatttattttttttcttttgtattatctcttctatatgaactttagagtcagcttatggattctgttaagcattttttaattttattggggtttctgtttggattgcatttaatttatggattatttgaggagaacggacatctttgtaatatcacatctaccattctggactccttagtatgcatctcctgctcaatcatttccttttatcctattgtaaagttttacagctttttcctctagctcctatacccttttgttagacttattcctaggcattttagggtttttatcgccactgtgaataggatcctttttttttctattgcctttcctattggtgtttgcctctagataataaaacttcatttttatatatttatctctggctatctcattagtctgaataatttttcagttgattttcttggattttctaagcatacaattctgtcacctgcaaaaataatgacaggcttttctctctttttttcatttctcatttctttttaggtagggatttgaatcgtgaaatccctgaatcgttagggatttccaggaccttattttagagcagccataataggaggcatctttctcttcttagttttaggaggaacacttctatagattttaaattaaatttgatgcttgctgtggatatctgagggagtcattttgtccagttaagaaaacattctttgatttttcacttaagatattttatcaaaattcagtgttatagtgtatcaaatgtttttatgacatctattgaaaaattatttttttctttttaatctgctactatattagttgaattattttccccagttttactgtttctttcttgttgtaaacactacttggtcatgatatattctttttactacccttactactaaatttcgttttatttagaatgtttatattcataagaaaaatagccttgtacttttttccccttatgtttctccttgctgtgtcataccttatatacttgggagctaggtgtgtcttgaagatttgataacattccctcataaaactgagtctggtggctttaaaagatggaattttgactgccttttcaattttaactgtcatattcaagggctgttaatatcctagccacttttctctgatcttgaacaagtcactgattkcattgaatcttagttttgttaatggtaaatagagataacagtatctaattcccagtattgtcgtaaggattaaatgaaattgattatttagcatagttttgtctcgcatatggtaaatggtcatcaataataatcattattatcattgttattcccttatgtagattactgtagcgaccttagtcatccccatctcttacacagtacagctgtaaattccatagtagacagagaggatacgaagatgagttaatggtccgtcccacagtggtagtcatcaactccatccgacacactctttggtgggttgagacctctccctgaactagatctttttcccgcagtgctgtgtctcagcagacctggccatgggacaggatgcaccacctgtgttgtataagggagccaaggcagactgcacgtgtgcgccttggccacccctgccttgtctggagcttgttctccacattagaatgcttatgttagtttttgaagatttttaacttgaatggaaagataacttttttttaatgtcatttgaaaaatcaggatcatgatatataagctatggaaaggcagtctttacatgattggtctaacattccatcagttttgttttgtttttaggaaatacttagatgttttgtctccttttgaaaggagcataaaatgttaggctgagataaatgtataaggtagaaaatggagacttgttgcattctcatcaacaagcagaatatggttttttccagtcttctactacttcacagtccttcatctgatatttaaaatgtatttatgttgagtcatttctttctctcttgctggtgaaccagaagatcacgaaatgattctacagaggcagtagcattatattcagtttctttttttgtatgcatcagataagaggcctgcaaatggaagtaagtcgcctcacatcctcacatcctttgtatgatgatcgcagtaatgtttgcctttttaccactggtgcaacatttattagttcataaaccygcttccaaagaacctaagggctttttgatgaaaggtgactgtggtgggaacaatgttaggttttgacaggctacttttgcttttacaaacatttctcctctttgtttttagtgtttagaaactactaccttaaaagagagttgaggacagggacatgtctggactaagtggaatttagtgcttagagttaggatttggaatataaatatggaagttamtatttagaattaggatttctgaatctgtgaaggaaaggtaaaataaaattttgatgtcagttcagcttaagcttctaaatcattctcgctgaaccaaagcttccagttggtaaaaatctaagatctgaggaataaaascaacataagaagctgacttttggtaagccttaacagtgatagaagagggacaaggtggcagttcgattctcctattttccccatagactgcaggccccttggctaaccgtaaaccttctaccctttaactccctgtcgtccattcagcaggccttcctgtgacccgtgagtatcagtggaagcattccctccaataagttaccacggcctaagaaaaaagtctaaaaaattatgtttcctgaagttttcacagtatttaagtatttacgtaaaggagtatttgttgtatcctagagagtgaatatggagaagggtacccctggagcactagaaataagcctgccaattttcagtattagccaagcagcaaagttttgctgctgtttatttttgtagctcttactatattctacttttaccattgaaaatattgaggaagttatttatatttctattttttatatattatatattttatgtattttaatattactattacacataattattttttatatatatgaagtaccaatgacttccttttccagagcaataatgaaatttcacagtatgaaaatggaagaaatcaataaaattatacgtgacctgtggcgaagtacctatcgtggacaaggtgagtaccatggtgtatcacaartgctctttccaaagccctctccgcagctcttccccttatgacctctcatcatgccagcattacctccctggacccctttctaagcatgtctttgagattttctaagaattcttatcttggcaacatcttgtagcaagaaaatgtaaagttttctgttccagagcctaacaggacttacatatttgactgcagtaggcattatatttagctgatgacataataggttctgtcatagtgtagatagggataagccaaaatgcrataagaaaaaccatccagaggaaactcttttttttttctttttcttttttttttttccagatggagtctcgcacttctctgtcacccgggctggagcgcagtggtgcaatcttggctcactgcaacctccacctcctgggttcaggtgattctcccacctcagcctcccgagtagtagctggaattacaggtgcgcgctcccacacctggctaattttttgtattcttagtagagatggggtttcaccatgttggccaggctggtctcaaactcctgccctcaggtgatctgcccaccttggcctcccagtgttgggtttacaggcgtgagccaccgcgcctggcctggaggaaactcttaacagggaaactaagaaagagttgaggctgaggaactggggcatctgggttgcttctggccagaccaccaggctcttgaatcctcccagccagagaaagagtttccacaccagccattgttttccyctggtaatgtcagcctcatctgttgttcctaggcttacttgatrtgtttgtaaatgacaaaaggctacagagcataggttcctctaaaatattcttcttcctgtgtcagatattgaatacatagaaatacggtctgatgccgatgaaaatgtatcagcttctgataaaaggcggaattataactaccgagtggtgatgctgaagggagacacagccttggatatgcgaggacgatgcagtgctggacaaaaggcaggtatctcaaaagcctggggagccaactcacccaagtaactgaaagagagaaacaaacatcagtgcagtggaagcacccaaggctacacctgaatggtgggaagctctttgctgctatataaaatgaatcaggctcagctactattattacactctcctgaagctaaccaacatttcctgcaacattatgtagacttttaaaagaagggcctgaagcattctcacaggataggctaaatgtagaacaagaagctgaagacccgttagagttttcatggcactccttatcagaataaggtcactgtctcatcagttataagacataccactattttatgtgccagcaggaatgaaaaaatgcaattataaccataagatgtttcagaatcaatgacataatagtattgcaaaccagattctagcttaagctagaatgaatattccagtatagtaaggagtctcattaagaaagtagcccctcatagaactaagtccctaccacagcatacacaaagacttagctgctgggtcaggccatctggcttcaggtaaggctctgtgaggacagcctacattggaaatcaggaagaggaatgaagttttaaagaatcaggaatatggcatccttggggaacaaggctggatccttcactgtgcacaggtttgtaacaaagatgtcacagatacttgagctttctgctttcagatcaaggcagaagattacacttgataacacctctaggcccttgactttttttwaataaaattctaaaatcatagaaatagatgcttacattatctaactcattttcatagtttgcagtttttgcttaaagaacatgccatgcagctgggcatggtgtctcacacctgtaatcgcagcactttggaaggccgaggcgggcagatcacctgaggtcaggagttcgagaccagcctaacatggtgaaactccgtctctattaaaaatacaaaaattagctgggcatggtagcatgtgcctgtaatcccagctactcgggaggctgaggcaggagaattgcttgaacctgggaggcggaggttgcagtgagccgagatcgtgccattgcactccagcccaggcaacaagagcgaaactccgtctcaaaaaaaaaaaaaaaaaagaacatgccatgcatatatgtattatgttgtcagcctagacagctgatcccaatttaaagcatctgcagattactgtctaaatcatagtctacaaaaatgacaaacttgtgatctgtaatcagtatccctacgtgctttgatgatttttagtggtaattataaatgagaaaatacagagtttgaaacatggtctctttgaattaaaaatactttcaaaaatatcttgaggaaaaagattttttgtagctattctgagttatgaaaattaattagcaataattgtctccttggtgtgaggggagagaacaaataatggaggtgggcctccagcctacctaacactggcttttgctgaggctctagcagccagccaggggctctgcatgtgagtgggtggtggtagagttgacagcagtttggattcaaagacaggaaggaaatgcctgtccctcacagggccaagctgtggccctgtcttctggcttgcctaggcattaaagaaaagwcataaactattctaaaattaccaactcactgatgtgtgcgcacccacccacaaactgagggggaaaggggacttacagctcacaccagagtagtttatacttcctagaatagccctactctctcaattctgtgtgtcttgtatcctcagatggtttcagtgggtctgagggttttagtattaggtttctagtaaccacgaaaatgcctaacagttccagttacttggattttctacaggtaagcttaactgaaaccacatttctatactcctgatactttgacctaggattttcttttttattctctcagtctcaggattatacacaagaatatggaaatttaaaggtagcagagaaaaagtgagaggctctagaaaacgtgtcgaagttttctaacagatcccattatcaggcaaatagccaggtcaagaatttttaaggttgctcatcttacaggattattaaaattacagataaatggcattgtctctgtttctagcctttggtctcaagttggttgtagctgatgtaattttttatgtgagagcatcagcgttgttctgagcattttgttttgtggtgaatgataggctgagatcatgcaggttctccttctggaggacataagaatctggtcccagtgctgggctctcccagagggcagtgctttacctaacagtgaacctgtgacgtttcccacttttccctgctgaaaagatcatgtcaggactgcttgcctgccatgagatgagaaggtctgtgctgggcttctcacataggggcttttttccaggtattagcctcactcatcattcgcctggccctggctgaaacgttctgcctcaactgtggcatcattgccttggatgagccaacaacaaatcttgaccgagaaaacattgaatctcttgcacatgctctggttgagtaagtatctcttgcacatgctctggttgagtaagtatctcacatttggggacaggttgtgatagttcttcaaaaccaagagagttctgtgatgaaaacgttctctagctgtgttccccacttcttggggaagccagttggtgccaggccctgggctttaccttttgatagtaattcttcagatccctcctaaaggaactagatggtgaacagcagccccagacacatcctgcagctccccaagtgtgttcacagggagagagtcactgtgaggggttcctggcctggttttcctgtaaacctaccagaggaacccacatgtcatgcacagcaattagcatgccctgctaagacatctgcaggtagtggtagtgggtttaggactgtctccccagctttccacatgtgtcagagaactgtgaggaatgacagagctcttactcaaaaagcttatttgagattaggtaaagtccagtgagggtaaaattgcacaccttttaccacattcacctggggtcagtgtagacgccaaggttgtcaagcagctcytgcataaggactatgctggcagagaaaaaggcagtttccctgaggtcaaaggaggtgtttcaggcactcctggctccagayagtccctttctggcagagagggccagaaggagagctcagcagcgcagggccacctttctgcagccatcatcacaagtaagggcgagtgcttttgaaacctcaaatgcatccagctccaggaaggggataagtggctagctaaaagaaaaagtctttcaggtttcagtcacattgctggttacctcagcaaaatgttcccagaacacccactcaggtccctgtgtgtcatagtaatgatgcatctagtgactggtggtggcagaattctaagtagacccagctcttaagaaagcagtgttattccccttacctgtagtttgtctttattacttttaaatttttcttccagagaaaagtagtaacaggtcaggaaaatcccaggcgaaggagtaagccttctatagttgaacagtttggatatkaaggaaaactcaataaaatatttatacctgctttagtgagaacttctgatctggaagaaactagttcttgtattcctgtgagtccctaagccagacctaagtgaggagtcaggccatgtgtccctactgtctggagaggagaagagactcctgcctggctgkcctgaaggcctggggccacccctccacttcctgcagggtagctggggccctgacacacagcacaagttcatgtgtctgacaaggtttgcggtgacttttcaaatcaaagaaggggttatgctctttactaataatatgttctgaatatattgttgcaggataataaaaagtcgctcacagcagcgtaacttccagcttctggtaatcactcatgatgaagattttgtggagcttttaggacgttctgaataygtggagaaattctacaggattaaaaagaacatcgatcagtgctcagagattgtgaaatgcagtgttagctccctgggattcaatgttcattaaaaatatccaagatttaaatgccatagaaatgtaggtcctcagaaagtgtataataagaaacttatttctcatatcaacttagtcaataagaaaatatattctttcaaagkaacattgtgtctaggattttggatgttgagaggttctaaaatcatgaaacttgtttcactgaaaattggacagattgcctgtttctgatttgctgctcttcatcccattccaggcagcctctgtcaggccttcagggttcagcagtacagccgagactcgactctgtgcctccctccccagtgcaaatgcatgcttcttctcaaagcactgttgagaaggagataattactgccttgaaaatttatggttttggtatttttttaaatcatagttaaatgttacctctgaatttacttccttgcatgtggtttgaaaaactgagtattaatatctgaggatgaccagaaatggtgagatgtatgtttggctctgcttttaactttataaatccagtgacctctctctctgggacttggtttccccaactaaaatttgaagtagttgaatggggtctcaaagtttgacaggaaccttaagtaatcatctaagtcagtacccaccaccttcttctcctacatatcccttccagatggtcatccagactcagagctctctctacagagaggaaattctccactgtgcacacccacctttggaaagctctgaccacttgaggcctgatctgcccatcgtgaagaagcctgtaacactcctctgcgtctatcctgtgtagcatactggcttcaccatcaatcctgattcctctctaagtgggcattgccatgtggaaggcaagccaggctcactcacagagtcaaggcctgctccctgtagggtccaaccagacctggaagaacaggcctctccatttgctcttcagatgccacttctaagaaaagcctaatcacagtttttcctggaattgccagctgacatcttgaatccttccattccacacagaatgcaaccaagtcacacgcttttgaattatgctttgtagagttttgtcattcagagtcagccaggaccataccgggtcttgattcagtcacatggcatggttttgtgccatctgtagctataatgagcatgtttgcctagacagcttttctcaactgggtccagaagagaattaagccctaaggtcctaaggcatctatctgtgctaggttaaatggttggcccccaaagatagacaggtcctgatttctagaacccgtgactgttactttatacagcaaaggaaactttgcagatgtgattaaagctaaggaccttaagacagagtatcctgggggtggtggtggggtgggggggggtcctaaatgtaatcacgagtaagattaagagcaaatcaattctagtcatatattaaacatccacaataaccaagatatttttatcccaagaatgcaagatttcagaaaatgaaaaatctgttgataaatccatcactataataaaaccgaaggtgaaaaaaattctgaaaaaattctagcagctatatttgataaaattcaacatctcctagctttagcaaactcacagttttgcaaataatattttcttaatgttatctgttgctaaatcaaaattaaacagtcatcttaactgcaaaataaaacatttctcagtaaatattaaagccagttaccttctatcaacatgttaatgaaagtgctagttgttgcagcaaagaataacaaaggcaatacacgatcaatataggcagtgaaacaaaagtatcatttgcaagttaaaacagacttcccaattttaaatctggtttccccctgaatatgtggcatccttggcagcacttctgagagtggctgctttcattccaagaagcccatgggtttggaggtgggataggtgcctttctggcttctcattgctgcttctagatcagtctccaaatatcccccttccccacattggaatgaatagccatcacagcatggatggaggttagaatgagccagactgcctgggctcaaatcctagcacaccactcactagctggggaccttgagcaagttatttgtcctgttttctgtttccttatatgtaaaagtgggtaaaatggtacatattttgtagggttgttatgaagattgaatgacattatttacaaactgcttagaactgcttgccacctactaaatactgtgtaagtgttcaagaaaaagctgtcttcatttcactcttgttgcagttatctttcattcccagcttggtcactccctcttatttgttgaagagtttagctcccggttcagtgtcaccccattactaataatcattgctgatttcaatatccaagtgatggtctaatacaactccttggcctctcagtcttttttattttttgaggtggagtcttgctctgtcacccaggctggagtgcaatggcaccatctcagctcactgcaacctctgcctccctgatacaagcaatcctcctgcctcagcctcccaagtagctaggattacaggcatgtaccaccacaccaggctaatttttgtattttagtagagacagggtttcgccttgttggccaggctggtcttgaacgtctggcctcaagtgatctgcctaccttggcctccctcagcccctttttgtttcctccagtgagaagatactcagttctatggtcttattctagagccccgtccttttaataacaataactgcacccctccaaaatctcagttttaagcatctcactctccaataaccccatggtgtctacaattttcctgtggtcctcaaccccagcaattctttgaccccactgagatttcaatccattgattctatggctttttcacaggttgtttccctgatgcctgtacttctctccttattcaacttaaattccatggctcatcattatgtcaccctccactgcattgtactcaaactgtcccgacaatccccagccctactggaatccagctctgcctcctccctgcaacacctgcacatcccgtttcctttgctgtttcctcctcatttccctggcccctcaatgtcacaggttttagtactcagagtctgcacctcttttcttctctgtgctcacttatttggtgatctcatccagtctcatagctttaaattatcttagtttgggttctcccagaagcagagcgtaaaacaatgcttcacgtgaaagtaatcagtaggaaattggggaaattgtgtatgaaagagaaagcagccaatgaaaagtttactattaagccagctacggtaagtgggcaattagagtttggtgccccagggagactctggggagtttggcaaaatatatacctcagaattatcccacytaaggggcaagagacctggagwatttatataacaacttgccagggttactgagtgaaggctattctagcacatgttagttactggcttgccatgtgtaccgacacagctgctttccacagtttaaaaagaaagtctgagcaacatagtgacatcccatctttacmtamaatttttaaaaaattrgcaaggcatggtggtgcacacctgtrgtctcagctacttggctgagataggatccctggagtctgagggttcaaggctgcagtgagctgtgatttgtgccactgcaccccagcctgggtgggtggcagagtgagaccctgtctaaaaagacaaaaaaaaaaaaaaaaaaaaagcagcagcagctgaaagttggcaggagcacactggcagttcctaggatcataggatataggcagggcactgaccactcctacaaccaccatctatacactgataactcataaatgtttgtgtccaatccagatctctcctaaatgcttgactgatatattcagctgcctgtggataactgggcatctatctgcacttgaatatctaataaacgtctaaaacttaaaatgaccaaaaccagtctttctcccagaacttgaatctcttctgttaatggcaactccattattccaattgctcaggcaaaaattggcattatccttgattctttatcttacatcttatatctaattcgtcagtttaatactatgggttcaattttcaaaacatccggaatctgaccatgcctcaccatttaaaccagcagtccccaaccattttggcaccagagaccgatttagtggaagacaatttttccatggacgggtggggtgagggggatggtttcgggatgaaactgttccatctcagatcatcaggcattagtcagattctcataaggagcacgcaacctagatccctcacgtgcaaattcacaatagagtttgcactcccgtgagaatctaatgccaccaccaatctgataggaggtagagctcaggcggtaatgctccctcacctgtcactcacctcctgttgtgcgactctgttcctaacaggctgaggacaggtaatggtctgcagcccgggggttggggacccctgatctaaaccatcattgctctggtccaagccactgccatctctaacctgaataatctgagtaaccacgtaactgctcccactgatttggggcctgctccctgtagttctcaacacagcagccagtgatctttttaaaaagtaactcaagaaaatgtgtttctcacaggggtgtgggttagcaatttcgaaatttttatgtacatactaaagtcaaacaaatacatacctgtgttgtagayaatacgaactgagtttctcactgttggaaaaaggtgtttgcatatcaggaaaggaggccataaaaagaaccccttggtgttgattgaatccaaaggatctgtacaaatttataattttaatatctaaaggatttctacttccataagggtggagtaaaagccatccaaaatctgcttcttcataaaagcaataagactggcaaaaatgtcaaaatcaactttttcagaactttggaaattaactaatggatagcgacaaactgaggtgtgtttattaaaggaaaacagctgaatctcagagcagaaagtggcattttaagttgccctaatcccatgcccttctctcttaatccatggtaacttgaaaaccaacagccctcttagtatctgtgaaaatcagcaacctagtaaccactggaggagacagaatagatttggaggtcccccagatctccactactagagaactgcctctatttgtcttgtctggcaactcactgaaaagctccattttcaggacctatctttatttgacttaactcagagctcactctgaaaacagcccttcctgcagaataatcagtggcaactgattaaccctgtggctgcctgaggcagcgttaccaggtggagctaacaaaaggctgaccaagaaacttaaaaggaaaaatctgggaagaagatgtccacgggagctttgacaagctcaagcatattcctgggaatctagaagtccatgtgcatgtgcagggatgtatgcatgtcctgagagggtcctaagctctcatctctgactgaccttgaaactcaattcatgccagaaatgaagataaaggcagttgtaaactgtctgctgacacatcaatgacatgactccacaaatacacacacatgcacacacttgacaaaagctagaaaatttattggttcaaggcattagaaagaaatatctgtccaattattcgcttacccactaggctgagtagagacttcaggaaccaaacatgacaaagcatatagaatttgcagaattagtccaggaaagacacagaacaaaccaacagcagcaacaataagaaatagtaacaggtgcaagccctggagagtaggtaatctgacttcaataattgatagagtatttaaaacaagacacacaaagaacaggaacatctgacccatgccataaacagcaatttaaaaaacagtcaatagaaacaatctatgaggaagcccagatgttagacttactrggcaaagactttagatatcagctattataaacatgttcaaggaactaacagaaacaaagtctaaagaattaaaggaaattatgagaatgatgtttcaccaaattatcaggactatcagtaaggagacaaacattataaaaaagaatcaaatagatattctggagttgagaaatacagtaatggaaataaaaattcactagatgggggtcaacagcaaatttgaactggcagaagaaagaatcagtgagttcaaagaccggtcaattgagattatacagtctgaggaatagacagaagaatgaagaaaaatgaagagagcttcagagacctttgagacactatcaagtgtaccaaaatgccaagtataccaatcataatgagaatcccagaagagagagagagagaaaggagcagaaagactatttgaagaaatagtagcccaaaacttcccaaattttatgaaaacattaatcttcgtatccaagaaattgaacaaactccaagtagggtaaactcaaagggattcacatttagatgcatcatggtcaaattgttgaaaaagagatctcaaacgaaagaagcaagtaaagctaagaagtgacttctcttaagaaacaatgcaggcctgaaagcagtgagatgacatattcaaagtgctgaatgaaaaagactatcaaccaagaattatttttgcagtggtgcaatcatagctcactgtagcttcaaactcctgggctcaagcaattctctttcctcagcctctcaaataggactaccagcatgtgccaccacactcaaaaaaaaaaattttttaagagacagggggtcttgctgtcttgcccaggctggtcttaaactcctagtcttaagcagtcctcccaccttggcctcccaaagtgctgggattaaggtgtgggctactgtgcccagcctcaatcaagaattctgtatccagaaaaactgtccttcaaaaacaagaaatgaagacactcccatataaacaaacattgtgataatctgtcttcaccagacttgccctacaagaaatataaaaggagaatgaatcctttagggtaaaatgaaactagactcaaatgctcatgaatactcaaataaagagtactggtaaaggtaaatatataggtaatataaaagtataaatgtattttgggggctgggagcagtggctcatgcctgtaatcccaacactttgagaggccgaggtgggcggatcacctgaggtcaggagtttgagaccagcctgcccaacatggtgaaaccctgtctctactaaaaatacaaaaaatcagccaggcgttgtggtgggcgcctgtaatcccagctactcaggaggctgaggcaggagaatctcttgaacccaggaggcggaggttgcggtgagctgagatcacgccactgcactccagccttggtgacaagagcaaaactcggtctcaaaaaaaaaaaaaaagtattttgggttgtaactcttttcctacatgattgaaagggaactgcattaagaattttaacactgttgatgggcttataatgtataaaaatataatttatatgacaataatgctacaaaagagagaggcaacagagctatataggaacttttgaaatggaaattaagttgacattcatctaaattaaggtgttcatttgtaatccccagggtaaccactaagaaaataatgaaaacttatagtgaaagtaacaaagttatttaaagagggcccagtgtgatgacaccccagtaataatgaggacacctacttccaagatctcgattttaaaacacgctcttcaataaaaagaactctggctccttggtgaagtggttgacttcagggctgaggcaaggaaaatacaaaatgaccctagaattttttgtggtgccagaaattaagaaaatattttttttaaaaaaaaaggtagagtttgttcaaagaacacagaacccaacctgaagtaactcccaatgatcaaaggtagaacaatttgagaaacaaaataaagacagtattggattataaccgatagagtaaaataaatattcatgaacttatgtggctatacacaagtacttactttaaaaaaaatgagggacaaggacagcacttctttatagtagaattacaagtaataaatgtagaaggaaagggaaaaagaaaagtcatcactaggcaaataccacaataaaaatcatttcagacaagagtcactgatgaagctaatattagtaggcacaaatctgagaaaaaatttatataatctcaaactatctttcccaatatattaactaaaaagggaaagatagtaattttatcatggaagaacctgacagaaaccatcttaaccaagtggtcagggtcaacatcaccaataagaaggcatgtacctcatgaaccctgtgacctgatgcagtgagaaggccccaacttcatctctgtgaaaatgtagaacctcagtgcaattaggagaaaacaccaaggggaccaaactgaggaacatttgacagcataactcatcagtattcctggaaaatgtaagcgttatgaaagacaagactgaggaaccattcagactgcaggagaccaaagagaattaactcaatgcactgtgagatcctgggttgatcttgaaactgaaaaaggatgtgaatggaaacactggtgagattagaataggatccagtttacttaataaatccatgctcatttttctgtttttgatcattgcactatgattatgtaatgtgttaccattgggagaagctgggtaagtggaggggatatggaaactgtctgtactatttttgtatcttttccgtaaatataacgttaattcaaatttttttaaaaaaagaaaaaaggtaaattgagtcatgtcactcctctgctcaaaacctccagtggctccctatgtcactcatcatgaaatcctcagtcctctcaatggcttacaagtctccatatgctctggacatacttctctgacagtatcttctcccatgcctcccctcactccttctggctttccttgctaattctcagcacagtgggcattttcctgctttggtgctactatggtttgagtgtatgtttccctccaaaattcatacattggaacttaatccccaaggtgatgctattaagaagtggggcacttaaaaggtgattaggccatggaggaatgggattcatgacctcataaaagggcttgagggagaaagttcttccctttggctcttctaccacatgaggacacagcaagaaggcaccatcttgggagcagagagcagccctcaccagacacgaattctgctggagccttgatcttggatttcccaacctccagaactgtaagcaataaatttttattatttataaattactcagtcttaggtgttctgttacagcagcatgaacaaaataagaaaagggcctttgcacttacttgtgccttcagcttggaaatttcttcccccaaatatctgcatggccacttcctctcatccttcaggtctctgctcaaataacaccttctcagtgatgccttacgtcaccatcccatatataatagtgtactcactcattctacctgccctcttttttttccctctccactgtacttttcacggtctaacatactatatatcatgtgtttgttcattatctctacccactagaatgtatctctaagagggcagagactgtgctgttttgtttagcacctacacagtaagcactcaataaacatttacttaatgaatgtatgaacttatcattgttatgggaattatttgtaattatttgtcttccggggcttggcgcagaaatgtattagattaagtaataggccaggtgcagtggctgatgcctgtgattccagcacactgggaggccaagataagaggatcacttgagcacaggagttcaagaccaacctgggcaacaggataaggttgttgctactatggtttgagtggttatgaagtgggagtttatgttcattccattgtttttacttggaatttatatttttaatgcagagaatttataaaagagacaagcaataaaaggcaaacatttatcttgcacctctttgatctggtattagtaaaaccgtggtaagtctaaaggtttaaccctatctctacaaaaaaaaattaaaaatcagccaatgtgtgtgggcatgatggtgccctgtagtcccagctacgcaggaagctgaggtgggaggatcacttgaacccaggggtttgagactgcagtgagccgtgtttgcaccattgctcctcagcctgggtgtcagagtgagaccccatctcaaaaaaaatactaataagtaaataaaatatgtcagccaggcacagtggctcacacctgtaatcctagcacttcaggagtccaaggcaggcaaattgcttgagcccaagagtatgagaccagcctgggcaacatggtgaaacctggtctctacaaaaaatacaaaaattagccaggtgtggtggctcacctgtagtctcagctactcaggaggctgaggtgggaggattgcttgtgcctgagaggcagaggttgcagtgagccaagatggtgccactgcactccaacgtaggtgacagagcaaggctctgtctcaaaaaaaaaaaaaagaaaaagaaaaaaagttatttcccttttattttaggaataaggtacttaccctgtacatatccacatactagcatgacagataccaaaatattacaatgattattatctctggatgctgggactatggggctttttatttttttgcatatctgtactttacacaataacattttgtgtaatctttttttaaatgcagaatactgacattggagaatgctcttcatatattttaagtgaaaaaggagtaaaaactatataatgtattatctcatttttctaacaaaatgtaaatgtgcatagcaaagatacagaggtgttatagtgccagggaaaaggggtgcaagactagtgtttgcctcttatttcttgtcttgtttataaattctctacattaaaaatataaattccaaatgaaaacaatggaataaacacaaactcccactttataaccaactaaaatgacagtaactgaattttctaaagttttaaacccaccaaaatgggagaaatggatgacagcaccagcgtttgaaaggtggaaagtggagggacggtgggcagactacttggctgacccaagaaaactgaatcctaggccagctgagacctatgttgatttacagaatcccaagaatgctcaggaactgggagaagaccaaggacatcagaagagaagggggtgaaaataaggaaagttgttgaaactcagtttaagaaacagttagatatccatttttgttcatcaaagtcgagtgactctcctgcagcagggttttctccggataggatatctggaccaagaaacactagacacagtagagggcggtcgaaatatgctgaaatcaggaacagtcaacagatgctgaggcccccaccccagccctctctccacccttgctgctggaatgctggagacagggagaatcttttctgcgcgagctgacctgcctgccaaaaaaacgacaaagaaactgccacaggaggttccccaagtgaaaacagtcagccacctgccctataggaaacagccccctcccacacaattaccctcagagatccctgttttaacatgtgcaggcaatccaggattacctaacgtgcaaggaaagcctataagatggaaaaaaaattttttttgaggcagggtctggctctgtcacccaggctggagtgaagtggtgtgatcacaactcactgcagcttcgactcctgagctcaagtgatgctcccacacagcctcccaagtagctgggatcacaggtatgcacaaccatgcctggctaagttttttttatgttttgtagaagtaaagtctccctatgtttcccaggctggtgtcaaactcctgggctcaagcgatcggccccccaaagtgctggaattacaggggtgagccaccgcgcccagttcaaaacaattttttaaagaaaacttgcagaaaataaagattatgtatgaaaaaggaaacttagaagatatcaatgaaacaagaacatagtgctgttagcgtgcatgtgcacatgcgcacacacacacaaagaatcaaataccctcaggaagataaagctatgagaatatcccagagaagagaaattttttaaatggaaaatagaataaaaagaaaattaaaggacaagtccaagaggtatatagtcaaaaaaaatggcagttccaataagagagaacaaagaagaaaagtcataaaatgtcccaatctaagtgtgaatacaaaaatatattatttttatagtaagtgagaaaaacagggtgcaaaaggtgtatatgatgccacttcacatgtagggacaagggaaaataagaccatatattcacagttgcttgtatttacataaactaataggataccaaaaaaaaaaaaaaacaacacctaagaaaaatagttacttgtgagggaaggtggagattccactgaattttttacatacacagttgacccttgaacagcaggttctgaactgcacagatccacttatccacggattctctcctgcctctgccacccctgagatgacaagaccgacccctcctcttcttcctcctcggcctgctcaacgtgaagacagtgacgctgaagacctttgtgatgttccacctccacttaatgaataggaaatatattttttcctccttccttgtgattttcttaacaaccttttttttttttttttttttttttaagacggagtctcacactgtcgcccaggcttaagtgcagtggcgcgatttcggctcactgcaagctccgcctcccgggttcacgccattctcctgcctcagcctcctgggtagctgggactacaggcgcccaccaccacgcccggctaatttttttgtatttttagtagagacggggtttcaccgtgttagccaggatggtctcaatctcctgacctcgtgatccgcccatctcggcctcccaaagtgctgggattacaggcgtgagccaccgcgcccggcctataaacaacctttaaaagacagtaagggacacagcagggcagtaagtgcctcactcacaagaggagcagcaatgccagaggcccatagagcacggattcccagcgctgccgttttacataatcagccttcttgatttttaaaattatctgcattcgtaactttcctaaaaataaaaatctaaaaaattaaatcctttcacttacaaaaacaactctctcaggccttactcctcctgactgggcatcatgtctttgccaacggagacccagagtccagagaaacccgaaaaagcaac

SEQ ID NO: 95187 - DNA, 66852 bp, Homo sapiens
  misc_feature (1)...(66852): n = A,T,C or G
agggcatgaattttgaagtgtgacaggcctgagttggaattccagttttgccacttaccagctgtgtcagttaggccacgttacctaagaaatgataaagggggtatcaccactgaccccacaggagtttgagaccagcgtagacaacatggtaaaactccatctctacaaaatattaaaaaagctaggtgtgatggtgcatgcctgtagtcctagctgcttgggaggccgaggtaggaggatctcttgagcctgggagatggaggttgcagtgagctgtgattgtgccactgtactccagcctgggtaacagagtgagatactgtctcaaaaacaaacaaaacaaaacaaaacaaaacaaaacaaacaaaacaaacgccctgatggataaagagcctagatgggaaaagatcaagaatttaggattcaatgcacaggaggaaaagttagtcttagaaaggaacatatacttctttggtgactatttggaaggagaagagcataaacatatttttaaatgcagagaaaagcagcagtagctctttcgaaagaatgtgtcttctcggtgaaggaacaaagtcgtttgctatgtgaagcagtgatgaagaagtggagcttagtaaagtagagaaatttgaaagcatatcataaaaaagactacagacgttagtagaaaagaataaatagattgctcatcaggagtgaaagacaagtgactgaagtagagtcaagatagatttcatgagaatttaggaaaaggtagactggtaacccattttctaagaatagtagcaaaccctagggagctgcttcagttatccaagtaaaggggccagaatctaaggtacgtcatgatgagaagattgagaagaaggtgagataaatcagtaacatggccaaaaattggctgagtggcagtgaaccaaaatcacttttcatattgactcactaaaatttaatctactatggagagggcctttataagcttttgaacatccaaagagttgaataggagctccagttgattattcccagaaatgcatgatacatagaagggagtagttaggtgttgtataaagtgataaaagtgcaaagaaagtggaaacgatgaagcatgctttaatcacaaggcactcatgaagccagggcatgttccagagcagcagggacataccgtaacatgcaggcatgttgaaagatgtaagtctcctcatggacctctgcttgagtagaacatgatacggtcattcctttagctctctgaaccagcctccaaggatagaaaatctttgacagagaatcatgtaaaatgtaatcaatgtaaaatgaaaagaaatgtatgacttttgaagaacttgattttcttacatttgatagaggaaaaatctcctaccatttggagtcagaaaaaagcaaaggttttcatcacagcagaagaccaatggcagtttctgaatggaatgaactgccttggagtaaggggtaacaacgtcagcactgggaatctgcggtgggatgcatgcctcctaagggacagcgggtgttggtgggttacaaaaccttaaggccagttaaacctactgtgcttcctatctttgtgatccttattgatttgttcattcactcattcatttgagtacttaccatatgacagacaataacggattaggtacttgagattgacaagatcatcattctcatggagcttatatttctgttgggagtgggatttgagggaaagaatgcagtgactcctcaatctgaaatattttttatgtgtgcatgtgcgtaggcatgtgtgtatgtatgtgtcttgagtgcaggtctaagtgtgtgtgtgtgtgtgtgtgtgtgtgtgtgagagagagagaaaagagagagagcgaggtcagagaaaaagagaggaagagaggacagaaagagagagagagagagaggtacggggaacaggtagtaactgcatttccctggacctgccaatttccatataaggaaaataactaccaaattaaatatctttgtgggactactcttgacgtaatgaagtataagttcatgaaataacttttttttcctgttttgtattgtctaagatttccttgttgcttatcaaaaaaatttgatattatatggtcaagattactgtgctgagctagatactctcttaatgctactaatgggatgataaatttgtcaaaatctttatggaaagcattttggcaatatatattaactattaatatgttcatgtctttttaatatgcagttttaaggaatttatctcaaggaaaataacctatgatgtggacaaacaaatgttcatcatagcatcattaataacagagataaaatgctaaaaatttaaattatatatgaatagagaaatgatttgtcttgttatggacatctacagtatgaatattgtgtaaataattaaaattatgtgctcaaggagtttttaatgacatggggcaatgtttatgatatatgtgttataaaaaagaacaagatacaaatttttatattttgtctattcttcatatttaaagcagttctataaaattagacagaagaaaatgggccacaatgctttatgctttaagcattttccacgatttgtacatgtgacttttatattcagaattatcaacaaatattacttaaaaaaaccctatgttaaagcaggagctaaatgcctctgtaattatcccacaaaccactgggtcctaatctgcaatgatctggaaaatcaacccttacacatataaccataatatcaattcaaatttttgcttaaggcttcactggatggctgtattttagtgctatgagagcaactttcttttctgcttttctttagaaagtttgtttttaccttttttacatggcaaggcccgtccttggtctgtgcatagtaaatgcagtaaagtggtagcaatggccttcactgggctatggttttgtgggaaatgattttaattaagtaaagagaaagcacaggacatgctattttaagattagggaacatttcttaaaatgtggccctgaaatattttgcatcagtgtaacctctgatacttgctaaaatgcagatttcccagcctactaaatcagaatcctaggatgggccccagtaatgtatatttttaaagataaatcccaggttattctcctgagattctctaagaatcatcagctggggaggtttgaggtttagaaattcttgcacgggatctgaatgctccaatgttaataagtagaattagaactgtttttcaattgcataaacacaaaatacaaaacactttgcttcttagataaatcagaattggaggatggggcctacctactgctgtactgtaatcttgttaaagagttttacatttgggaatttattgaaagagcagataccagtggtcagtaacattgctaggaatagtggtagggtgagtgtataggtgatttactctggctagaaaacagctgtcacaagttccatttcttctgggatatcctttaaggtggaatgcttggcaaaatcaatgtacatcagagtccataactcataatgaaataggcttccatggggaactgttgtaccctgaagcatgagcactaagtcagatacacttgtcactatgtggtacggtctgattgtttgtgtccctcaaaatttatatgttgaaactgagtccccgaggtgatggtattaggaggtgaggactttgggaggtgattggccatgagagtggagccctcataaacgatattagtgccattaatagaagttctacagagctgctttgccccttttaccatgtaaggtcacagtcagaaagtcctatctatgaggaaacacacctttactaggcactaaatctgctagcaacttggtcttggacttcacagcctccataactgcgaccaataaattcctgttatttgtgagttactcaatatatggtattttgttatagcagcacaagtgaactgtgacactatgtgtctggaagatgtgaacaacttgagaacttaggtttttcttaggtacaacggagataatactagtaccagattagtgatgaaaaatgttatgcaaaatatttagcacaagccatgttatgtaataagtacttctaagtgtttacagtgacgacttcacaaaagcctggctgtaaaagtttgggaagtcaggcttctctggttggcttggaagaccatgttagttatcagacaagccagggattttgagtaaccccaattcttgaggggaagaaagtagagtggaagaggagccaaaattactaatagtccttcatctgagctagatttttgatatctgttggttttgtggaaaatccaaacctaatgtcttttattgaaattccccatctcgtggatggtctaggactgaattgagttatgtaaaatatcatttgtggagtgatattcatttgtataccttttcagttcgaaacagtcaaaagtctctctctctctctctctctctctctcacacacacacacacacacacacacacacacgtacacacccacacacagccttaaccctggccacctctatactatttctggaatcccagattctataaaactattttagtttctaacaaatgtcttggtctttatgatggtcaccaccatgaaacacagttactttacactttcttgccttgttcataaatattccccaagtaaaattacttgctacacttttcccatttaaatttgcattggctaagtgagagacatctctacagattgctcaattttaggaaaataaccattcccaagaaacacaaacaagtcaaatcaagatagttaccaggagcaattctttatattatccagttgcacaacacacttcttgaataaatgacatatcctaatttaggatacatcaccagattcaagtcagagagtatcctgtgccagtcaataagagtgcgggtcactggaagrtcccttcrtagaatttttctcagggcttcattggataactcctgtaattcttccaagactgcagcttgaaatttgttctcttgctcttccacaagccttgcaaaacttagagccagttgagcttggttaactatttccaagctttctttcaggtccttggatatttcaatatgaaggttgacacacctgaagaagtgagcttgcacaaataytcttcccgttacttgggttagaaatgggttaacttggaaaatccatttagatttccaaagtcckttccagcactctcctgtttcatagttgtgatcttcaatgcaagctatcaagtactccttacttttgacagtttttctcagcatgttgcaatttccttttggatagtggtcattcacatacagttttaaggcgcacagaagaacaactctcaggtattctgcctcattctgaatgataccatgactttggatgtctttcagctgattttgaagcaggtcatatttgaaagaaagtttgctttgatggtcaaaaaatcggtagtcgcccattacattgtggtgagacaagagtactggatttccatcgatgcagagtggtacagaatatttttggcagtgttggtggcctgcacactcaccttggtggtgcataagtttttcatcacggataagcagacagagatcatcaaaggcatttacaaattcccctggaggggcctgtaataacagtctgcgaattactctttccttgtccttcctgctcagcacgctaagtgtcatgtttggttgcaacagaagcaaagcttctgaaatgaggagtgttcaaaggataagaaaacattccatgagccacctttcccatcaaggtgttaacattcaagctgaaggtttttatgtctatccatgaaagcaggcagtctggcaaggtctgagcctcctgatgaggtcataagaagctttccttgtgaagtgtggaacctctgatgatatcacaatgggaattcagaccaaaaggaaaaaatgacagtcacctgacagtgtggtgcccagccaaccagctatacctcttttgaagattttaagaacttagcctcctgaacagtcttcttcgaaagtggtgtgtctctgtgtgcattatatgttgtcaaygatctagagaagcagcccaargtttcaagagtgacagcactttgcarcttcaggaatcacaatggtgttgatttatactcaggctctcagagtagctgcccaaacccactggaagcatattatgatgaaaggtttgaggggtttaaacaaagtagtaaaaaataaaaggagatacaatggcagttcatggaaaaatgccagacatcagggaaagctgtgttttcaaatattgtgggtttggaggtggtcagaacgtaagaagccaaacagtttcaagggcagggtagtgcaggtaccacatcttgcatactgtttctatggttaagtgtgagctagcttcaaagaacgaaggcaaaaaaaccactgtgtgttctctgctttctccctagaaaagtggtaacagctgatgagtatcaagaaattattttctgcaaaggggcagagttaattgtatttggaacccatgacagcacctactggggaaagacttctaagtgaggagaaacggctctacaggtcatgaaactatggaaatgagatatccattgagagcttctttctgctcctcttcttctttctcctacttatcctctttacttgatgctgttattcttttcgaggagttctgaatttaagtcctcttcatttaagttgaactgcttttccctgtttgttctgagcttttctaactttccctgcattctggtatctttttcttacaagaacatgagctttgctggattaagtcataactattaaatttaaggagatctcattaattcgttctaacaatctgaaacttagtagttttgcacaatttttacctataccttttataattttagtgataattgtcattatctcatttcgatcttagtttttcaaatggaagtgtcctagtttttgtagtttatctatgataagtaagcttttaaaawtttttttygtttttcataccaaatatacactcaccatggtatttctgatgctttttgatggtactgtcttgagtgtgtgtgtagctgggcattggactaatgtagtaataataactttatcagtcatggttactatttattgaacactaagtagcagaaactgtgttcggtggcatattaggaattcatctaatgcttccactttccttaagattcagggttaatttgctcacctttctggaagagagaactaaaacagagaggtcaggtgagaggcgatcttgaagtctagctgccttccaacttcatgccttcaggcaatagattgtwataatgttttaatgtatkttctaagtaatgacttcaattctcaaattttaactttaattcttttttttgtatttttactgtgctatgccctttcatacctttaccatagcatagtaactacttaattttgttttttaaaaaatatttatcatacaattatactataatttactttaaacatattctttaaaaataaaaataatacagtaaatcaaatgtttctttaggaattttaaatattcaatgactttctgtgagaatttccttaacttttttgtgcttctacatggtttttgtcaaagattcaggatgacttcagaggtggaaaaattaacctagaaaaaactcagaggttacttgaaaaattagatattcggtgcagttatattcatgtgaaacagatttttaaggtaagrtgacatccaccccctgcctatcctatcctaggtggaacttaatccaatgtcagtaattgtcatataaaggttagtctcttaagaagaaaagcaattaattatactaactatatttacaatcaagatggagagcatttcagtagaaggtaaaattagttgttgagaaaatctgaaataataccaggatatcagtttagaataatttcctgagcatacagaaatgctaacattaaacctaggattggatgtctaattatatcagactgataatggtaactgtattagatgttagtgatttataaaaagagtggagaataagcccaaagttagcagaagggaggaaataatacagattagcacagaaataactaaaatagaaaagaaaaaaattagaagaaattgaggaaactaagacttgtttttttgaaaagttaaataaaattgacaaatayttagagtaagaaaraagagagaggagtcaaataaaatcagaaatgaaagtggagacattacaacagatctcacaaaaatgaaaaacacatagagcaatcatacaccataaaattggacaatctagaaaaaaaagggaaatttcaagaaccatataacccatcaagactgaaccaagaagaactagaaaggttaaacagaccaataacaaaaaggagactgagaggctgtgtgcagtgattygtacctgtaatcccaatgctttgagaggccaaggtgggaggatcacttggggctaggagtttgagaccagcctgggtaacatagtgagaccctgtttggagacttaatcagtaatcaaaaactgcccaacgaagaaaagcccaggaccaaatgacttcacaggtgaattctaccaaagatttaaagaagaattaataccaatccttctgaaatgcttctaaaaaatagaagagggaacacttccagttttattttataaggtcaacatcatctggataccaaagctggacaaaggcaccacaagaaaacaaaactttaggccaatattcctgatgaacatagatgcaaaattccccaacaaaataatagcaaatcaaatttatagcactttaaaaggatcatattccatgaccaaataatatgtgtccctggcatgcaagsatggctcaacatacagaaatcaatcaatgtgatacaccacattaacagaatggagataaaaatcacatgattatctcaaaaatayagaaaaagcatgtgacaaaatttaactccctttcatgataactctcagtaaattaagtataaaaggaacttaacacattaaagtccatatatgaaaagcttacagctaatatcatataaaataaactgaaaagatttttttctaagatctgggaaaaggcaaggatgcccactctcaccacttctgttcaagatggtactggaaatcctagccaaagcaattagtcaagaaatgaaaataaaaggcaattaaattaaaaaggcagaagcaaaattatctctattcactgatggcacaatcttacatgtagaaactcctgaagattttgttaacaaactaccacaaggccgggtgtggtggctcatgcctgtaatcacagcactttgggaggctgaggcaggtgcatcacctgaggtcaggagttcgaggccagcctggccaatgtgttgaaacctcgtctctactaaaaacacaaaaattagccagacgtggtagtgcacgcctgtaattccagctactcaggaggctgaggcacgagaattgcttgaacctgggaggcagaggttgcagtgagctgagatkgcgccactgcacttcagcctgggcaacagagcgagagtcctcaaaacaacaacaacaacaacaacaacaaaaacaactactagaactattaaattcagtaaagttgcaagatacaaaattactatgtaaaaatgtgttgcatttctattcattaactatgtactatccagaaagaaatcaagaaaacattttcatttacactagcattaaaaaatatataatgcttaggaataaatttaaccaaggaagtgaaaaactggcacaccaaaactgtaaaccactgatgaaataaactttaaaagttacaaataaacagaaacacatcccatgttaatatatccatactacccaaggtgatctatagattsaatgtaatccctactaaaatcccaatggcatttttgttttgttttcacagaaacagaagaaacaatcctaaaattcatattggaatcaaaaaagaccctgaataaccaaaaccaatcttaaaaaagaaatataaaggtggaggcatcacaatttttggtttccaaatgtatttaaaatacttcagtaattgaggcagtatggtaggggcataaaaacaaatatgtagactaatggaacagaatagagagcccagaaataaaccccttcatatatagtcaactgatcttctacaaaggtactaaaatacataatggggaaaggatagtctctccaataaatggcattgggaaaactggatattcgcatgtaaaaaatgaaattggactctaaccttaccccatatgcaaaaatcaactcaaaatccattaaagatttaaacttgagacctgaaactatgaaactcatagaagaaaataggaaaaaagctttttgacattgggcttggcaagaatttcttagatatgattccaaagggattgaaacaaagacaggtaacaaaaacttgtctaaaaatagaaaagtgggattacatgaaacaaagtggctattgcacagcaaaggaaacaatcaacaaaaatgtaaagccaatttacagaataaaagaaaatatttgcaagccacatatctgataagggatagtatccaaaattgaatcccacaactccatagaatggaaaccccaagtaacttgattagaaaatgtgcaaagggattgtatagacatttccctaaagaagctatacaaatggccaacaggtatataaataagtgctcaacatcactaatcatcagggaaatgcaaatcaaatcacatgagctatcacctcatacctgtaagaatgattattataaaaaagtacaacagaaaagtgttggcaggaatgtggagaaaagggaactcttgtatactattggtgtgaatgcaaactggtacaaccttgtggaaaacaatatggaggttccacaaaaattaaaaatagaactgccatataatccagcaatcccatttctgggtatatacctaaaggaattgaaatcaagagatatttgtactcctgtatatattgcagcattattttatgatagccaagatatgcaagcaatctaactgtccattatgaatgaataaagaaaatatagtatgtacatacaatgaaatattactcatcctgaaaaaataaagaatatcttgttatttgtgacaacatgggtaaaactagaggacattatattaagggaaataagccagacacagaaggacaaatagtgcatgacaccacttatgtgaggaatctaaaacagtcaaacttatagaaggagagagttgaatgatagttaccagggctgggggaggggaaaacaaggaagtgttagtcaaagggtatagtttctgttatacggcacaaataagtcccagcgagctactgaacagcatagtacccgtgataaataacattgtgttgcatatttaaaagtgtaagagggtagatcttagattgagtattcttatcacacacaaaagttataaagagggtccaggcgtggtggctcatgcctgtaattccagcactttgtgaagctgagttgggcagatcgcctgagctcacgagttcgagaccagtctgtacaacatggtgaaactcgtgtctacaaaaagtacaaaaaattagctgggcctggtggtgtgtgcctgtgggcccagctacttgggaggctgaggtggaaggatcctttgagctcaggagatagaggctgtagtgagctgtgatggcaccgctgctctctagcctgggtgacaaagagagaccctgtggggaaaaaataattaagagggcagaaggaaacttttggaaggaatggatatgtttatggcatagattgtgttgataaattcatggctgtatacttatctccaaactcatcaagttgtatacattaaatatgtgtagctttctgtatgtcaattatacctcaataaatggatttaaaaaatcaagaaggaataagtaatctgaaaacatakgttatttcacttattccacaaaagaaaatcatccaaaaattatctttgtttgaagaataactagtaggagggaaacctggctcaatgctgtcactagatgacagaaggaaagatcattaacaaaattaggaaaagccattttagctgagttttgtactaggaagatgacaaatttcttggagaatgaggcaagaaagctacactggccaatccagatcaataggaaccttaaaatcctgcgtatgattttgttttttgaaagtgagtactcagataacacaatctgtgttgaagttgttattggttacacaaactgggaaaggtctgatattttaccctccctgcaagctaccaattggcctgatgtagctccatggaagctggtggaagcaggcttgtgcgtcaaaaaaaaaaaaaaaaaaaaaaaagacagcttattactcacagaaatgacagttgtcagagtattagcattttgaygttatttccccaagccccagtttttaaagtgtggtacgaagaggaacaagtgacacacagtgagttgcattatagagtaggtaccttaagcttaaggaaccygggccttttatggtgggcagtaagcctacctgatctttgccctgtaggctgtcatcattattataggaaacagtaaacaaaactgctttttttcctctggaaggagacagtatctttacgaaagctgttcgctatacaaatgtccttgaaaatctagtatggaagaaaagcaatcaatacctctgctcagaaaacacatagaaacaygagagacctatggagaattgtcttccaacaaccacttctctcaataacatttagccctcaagtttacaaaccacaaagaggaggttaaaaaagaaaagttgtacttctcaggagaccccagtgaaaaccaaagttgcagaactgtgtctctgaatccaagcagtgcatgtggccataaggtatcagaattttaatcgattcatggctaataccacattcaaagaacacaagtttttatgaacatctttacatgtaggatttttcctccggtagtatcttccaaagggagaaaagctattgcttctcgatttattaaaatttacattaaaggcaaaataaaaatagtaatatattgaaatctgtatcaaatgtgaaatgtaaatattattcagtgattatcaagtttctttatgttatcttcagggcagagatatctgaagtgaaatttagtaaaatacatgtcatatttaaaagcattacatagaatgctcaaccattataaaagtacggaaatggctcactaattgaaatgtatgattacggacatgagcaggcctgaagatctattgtttagcaaagtgtttctggagtggctattaatataatattaattataaaaattagagacacagagtttgctaagaatacttcaaaaacctccctaaaataactgtaagtactttagaagcataaattacatataaacaaggctgataatcatgataaactattcttatctagtaacataattctagaaccactaatttaaaactttgtcaccttaggctaaattgccatgtatgcattaaaatgttgattaagtagaatccttagggaaggtgtattggttaactgtattttatggatagctgaagattaagctgcttacacattcaactcacttgcttcaactcttgttgctaattttttctcattttatggatgcaccttttcccagagtaaataaaatgagtcctacgtgaccaaaatcttctagtctctcagagcactagagattcttggctgtaagacatcctagctgtttactacttggcaagttaaaaatctctctgagcaaatttcttaatccgtagaatgggactaacatagctatctcacatgattgttgtgggtattaaataagatattatgtatgaatatacctagtactaggcatgacacaaaataggtgctcaataaatatatgtagacgctgcatcagttaagtatacacaattgaattacatttattcattatctaagctgacgtaaattctgatgtgagtttattttcttacaaggtgacattttattataaatttgagtaaagaaaatataactttgtgatcttggcaatatattctgaacttctttctacaagattaattattgattcatggcttgagcagcaattctctaagattttttaaatccctttactaaaaaagcctattgcttttatcatgcaatagtctttatagcatttaaaatattttataggaaatatatgttatttcaatacacagtatgagtgttggattacacttttgattgttggttgagtaagaaatagtatcctttgtaatttcaggattttttaaattggatttgccctgagtcttcaaattctttaaggaattaatagccactattaaatctatagtatgtgstgacactctgtaggaaactgtgaactgtaaaaaatgaataaagtgttatctttcttttaagggcagaaaaaggaatgcagaaattactgttttataagtagcttataatatatctcgtgggtaatacagggaatctgagaagagactctatttagtttgggcttttatagaagatgccatgatggaagtggcattcttgctggaccttaaataagaaggaatatgtatggagtatgtggaaagagtgcatggagaataaaaagtaatcaaatatgactggagtacaggatgcatgaaaggaagtggtaagaaagagttgcaaatgacagttatagccagatgatggaaaccttgaatggtagaccatggaaattatatttccttttgcaggcaaggggtactcactgaaatttcttgagtaaagaaatattacatattttaggataaataacatggcactagttagartggattggaagctagtattcagagagagagagagaaattatttctctactgattctgccctacaaatccgctacctggaatcaactcagccacttatattctgtttggttccacctcaagtttatggtttcttactttagttggtcctccacaatgtaaacttttaaaaagtctcatctaaaaaataaatagcaccatatcctcttctaatgttacattccctgttttagcagataaaccaaaagaatcctttacatttctttctccactcgttcaatgatccattgcaatctgttttgctttyatacctatctygaaaatctttttaggtcataaatgctaaatccactggttagcctctctgtgcatttcacttatccctttttataaaaaatttccctgttctgacttctatgacatcattctctcccaattttctcttcaaatctgtgatcagtccttctccttctgtcctgtgaccactccttctgctctcctcttaaagttgagctctttatatcctttatttttacattacaaacttttcctgagctatcttattgactcttaacggctacttcttaaatargaacaagttccaagttttctatcctgaacgttgaagacatgtaaatggcaccatttgttcatcatctgccataatgtagacactgattaggtgttgcactcattttattaaaaacatataaggaagttattgttagcttctttttatacataaggatattgagtgtaagaatgttgatataatttcttcatatctcacataacagtagaaactcatgtctgggtctgtctgactgcaaagttatcattctactttcttctatagcatattgttttcctctattcctaacacacaaccatttgcctgctggctgtctctgtttagatgtcatctcagatgtacttcaaatttaatatgtttaaagtgaaactcgtctttccctcttaaactgtctttcctcctttatttctttgcttggtgatctcggcaccattctcagttatctaagcagaaattgaagaggttttcagactcttcttctgaccctatctttttaggtccatatacttgctacaccatgtcaattgctcttgaactacttactacttattgtggtcctcagaccagaaatgaagctgattgcatttcaacaagtcccaagttgactcatatgcatatcaaagttggaaaaaccctacagattggtttgttttaaatcccaacatctaccttctacactgctgccagagtaatctttctagaacraaaatctatgggatttctctcttaaaactgatcaatawctctttattctttccaaagaagtctaaatttctcactgtggcttccgaggaaccctgggattcagctgtgcttcctgccttatctgctcccgcagcttcactaacattctctctaattacactcttctgttttgtactttgtactttcatttgctctgatcttaacaaatagaattagcccctttcctccctaatttcaggcaaatatcttccttctcacctctgaagactcagttccaggatcactttttctataaagattctcctttgaccctccaggaagaattgtccaactttccttattgtgtctattatctatagaatttattttatttttaaaatgttaaaaaaattagagaaaaggtcttgctctgtcacccaggccagagtacagtggtatgattatagctcactctagccctggactcctgggctcaagggatcctcctgcctcagcctccagagtagctgggactacaggcaggcaccaatgcacttggcaaattgtttttttttttacatttagagacagggtctcactatgttgcccagggtgatctcgaactcagcctcaagtgctcctcccaccttgacttcccaaagcttggggattgcaggcatgagccattgtgctcagctacaaagattatatttcggcacctgtatacttccatgcctactttctttttctagactatctgcttccagagggcactgacaatatgttacttttgcatccttgttacccagtatagtatctgactcatatatttggtaaggaggaaagggaagaagaaaaggaaacaggaaaactgccaaacaatttaaactagcgcgagagtttgggaaaaaagaaagtggcaagtcatatcatttcctgtaatgtaatttgaatttacttaggctttatttttagtgtaattttagatacaaccaactctaaaatgctgtattttacattaaaagtaaattctgttttgataaatcagctttctcatcacattattttaaataacatttcatatttttactagcaaactgagcattggaaatggaaaatggtgacaatatggaaagccttcattstgtttctgaaagtgtacactcagaatgacaatcaatagaattattttgaattttattttcccttgtttattcaatcactcatttaaacgtatagtaattaagctcctcctctaggtaggtccagtagtaggcattgggaataaaaagaataaaatgtctaccttcatgatgttcacggtcttgaagcatatggtgtatttctaaatatacaagacattgaatgaattgtttgggaaagtgctttttgtaatgctttgcaaagaataaccacttaaggaacgttttttaaacaggagacaaatgattttattactcttattttatgttgtatgtttaatgattaatacgaaacattttaaaggtggtagtgaaccctgagstggggcctgagattttgcatatcttctgggatatgcatttttaaatctcttttcctatcctccttaagtctagggagatacttaattcctttatgtaattattgtctaaatgcacttatttcatcagtttcataaaactgggtggtaggccacactctgaatatcttcagtcaggcacttttttgagtcctgaggatacaagaaacaaatgacaaacttgctgtctgaggcaattctagaatgaatatagaaaaaggctgtcattccaatctaataaggcctgtaagagaagaaagtggagtcttctaagaacccagagaagggatattttaatgcaacctggggaggagatacagaggaagatttctagagtgggtgacactttttcaaggattagtagaaattggtaatttaaacagaaagaaggatattcyggaaagaaaaacaaacaaacaaaaaacaacaacgagaaacataggtaccatagcaagagatggtttggtacctgtactgcaactaattcagagcacctgaagtgtgaggtggaaggaggaaaaagataagagcagaaatcatccatgacattttagatggccttggatgctacacaatacagttggggttttgtcttgaagacaaaggaggtacagtgagaactttaagagggagttgagatggtcagatttgcaatttacagaattgatttctgcatatatactgttaatctgtgtaatggtatactgactttttttcttccagctgctcctctgggtggtcttagagttagttaaaaatcctggtctacctgtgtggctggggacaatttacctaagatttttgtgcttcagttttctcttacagaggagtctagcacgttggcagtctgagctgctgtcacgtgcctcagcactcaaattgcaccttctttcttattgcttttcttctccccgcttcccttgatcatgatgctaccatgtcctgcttttcttccccattgtyacttgctccttgttgctttccttttccattctctttctactaaaattagatcttcccctcttcagtgatacaactctcactattctgtgtggttttcatttttctgtaatttgattaacatttgactttgaattcttctttgattttgatcaactrtagtgattctttggatttgtggaattttgtttggacttatatctccaattctttttagtacaagatggcaactttgaccttttagaagaacacgagacaaaacaaattatcagagaacatttcggatgaccaagcttatactctgtttgaaagtaataaaactgtcattattcagtgaataatgtatattttattttatgctgctattcagtagaaccataattttttatttacataattttctataaccaaaattttcagggattacgggcacattttaaatttttattgacttgcttaagattttatgacaaataagaagtgagataaggctaaaatgaaattaattctataacatccgcttccacagacctcaaaatccagaatttaaaaacagtaagttgaagcatgttatttaagtaaggtaatgaacaatacgcatgaattactttaagattatataattttaaggtgctatcattgtttaatcagctctggagaccccgcatctgatttgacaaccacagatcccaccatgacacaatgccccttcaacacatgmttcttgcattcaagctgtttacaatgtaacaagagagttaagatgttataaaaaagcattttttaaaaaattaaatctccctcttagctgaaattcctatttcccagtttttttatttgttagtgatactatagttctaccagtttttctaactctccctgaccccagtcattcttgagttatctctctcatttgtctaaaatttcattgtgtcgaattcttctgaattcttccttcgtcatttcaccgaggtctgttctttagtgtctattcaccacctcccacttgaatttcatcttatctgctcttacctgcagttctctaactcttccaattggaaatgcacaactaatcaaaccaatcttctatttttggtattgattttcctattcagaaactcccaatcatcctggtacttttaacaacttgccttttctcgtaaagttcaaatatgacctttcgaatccactctttcttattggaactcatcttgtttgtacctgccccaaatccttcaatgattactcagactccacttcctcaaggtattgcataactactacagcttctgcagtttacattgatcttgaatgtgtctgactcactctgacatatatggtccaggctgcacaccagtggcatgagattacacactgcctggtatggttttaagaagatattgaagtaaagtggaatacaaaaatgaaatgtgaaattgaaagacaacctggaatcctcattttctcccacattcctttctttatccctataaccactgggtttcaagagttaactaacccttttccaattttgacgtcactccatgcagctttgtatattttatcttcaataagaatccaatgtaattttcatcttctttcaagtataaattactacatgttacataaatactctaatattcattttatgtattttttatactcacaatgtgagccyaccagtcatttttttagtaggacaatgacaggctgaaacaaggaagaatcaccatagaagaatttagagcaatttatcgaattatcacgcacagagaagaaattattgagattttcaacacatattctgaaaaccggaaaattcttttagcaagtaatctggctcaatttctgacacaagaacaatatgcagctgagatgagtaaagctattgcttttgagatcattcagaaatacgagcctatcgaagaaggtatgtttgcatttcaaacttttatcggaatatttatatgtgaagtattttttcttttttcaaaaattatttcaaagcaaagtatttttatgaattgtggttatcaaattaccrtttttggatgggtcaartatctttgagaaaatatattttatagaattgataccttttagaatgctatagtatgcaaccatgacatcctttcctatacattgttcagctcctttcttttaactgcttccangtatctctcaagtgttcagaaatgagcttggaggtgaaagtaagacaatgattctattacatgtaycctattagaagaaagtatcttgatctcatgaataagataaaaccccagttataggtggtcttccattttaatgcattatattattgaaaatatctatgaaaattaaatgtgctaaatgaaaaaaaattctaagaagaaaatattataaactgatgaattttactttgtttataaatataattatctacaacatttcgtaaatatatatacttttcgcttgttcttcatttttgaacacatagtgatttggtttaaattaaatgaccatttaggctaacgatctgtcatagaatttgtgatctttgttccatctttcaatgggtaaaaacacttcacagtttttcatttatgttcattttgaaataaaattataaacacataatacaataaaataatcatatatggtaccaaaacattgttaaagcacaatgtttgaccttacagaaactaactgatagaatagctcaaaatattcacctaggaggggcgtatgaaagttctagttttgcctctttaagttggtttaggctaccaatgtttaacacatgataatgtagtttctaaaaaaccaaacttatttctgcattggatcatacattcataatttattcaaatatttatctgtagtaaccaagtatggttttgggggctgaagatatagtgaagaataaggcaattaggtcttgaattcctgatgggttggaggaaagttgacagtaaataatgaagcatgtaaaaggatatcttaagagagtgctatgtgatacggaaacatagagcarggaaggtgatggagagtaaatgacctgggaggcctagttcaggttgggtgttcagaagaaccctctctgagagtgtgagatttgagctgagacttaaatgacaagaagggacaagttatatgacaaaatgggagaagtgtctaaggtccaagaaagggaagcattaaatctgaattgaataactgaaggaacaggaggactgtgtggttagaactttgagaatgagagagagatgagtttggagagactggcagagatcaaaccatataggttcttataggccacaataaagattttggcttcatgactcagtgccatgcaaagattttgaagggttctcgatattgtagtggtgtcattgagttgagtcttagtgacaatttggtctcagcaccattaaatttttgcaggttagcagcaaggtaaagagcttgcacaagaatactaagcgactatatcactaagcagaactgatgagttcagatgacttttttttttttttttaatagcaagactttctctaaggaagtagtgaattgatttatgttctggctcaagctctttatgtcattgccaactggaaacaaccagtttacagatgagcactttaagtagcactgatctagagaatattaccaaaacaattactttggcactgtaaacttcaggtggtaaattaaaagatacaaatgagatgttgggatggmggcagtgacactttggaattgtgtttgcattttaactacaatattatactgttcatccatttcctcttttgagccttcacctgcctcaaatactctycaacacagccaggaccttgcatttcatttacatgattattgatcactttggtgtcttattaaggccaatttgaattatgatcttatagttccaaatgctgccaagttcctcagcctcatccctcawtgrtatgtgacaggcaccaaatgaggtttttaaaaatccatgtgattaatccttatttcaaactggtagtttttaagggaacaaaatgagtttattttctattccattaccaaagatatttatttaattattcartagttcaaaagggctaagccaattactgctaattaaacagggaaaaataataaatgtatgcaagtcattactgttacaatgcatgattcatttgctccatacacttctatcttcctaaatttatatggcttgaaatagagggtttgtatacctataaaaatttcatttattttcttctagcttttatttttttaaaccaaaatagtaatagcattttgaatgctgtcttcttcatttttatgatgtcataacatttacttacatcactatatttttatgatacattattcttaatggctgcttagyattgtatcatattttgagctttaatttgtttattcccctgcacttatcttgcttttataaataatgctaatgtgagcattcttgtacatcactgtctgagtctctacttccataggataaattcctggaaataaaattctctgccaaagatcacactctaatcaagtgaatgctcatgtcaccttttctttttggttgaaatgaactatcaacagtaataatagcaactaaaaattttagagtgaatatataagggtagatcctattattacccccattccacagatagggagaggttagctaatatgctcaagatcatataacaagttaaatggatatgagtccaggctgtttccagagccagtcttctgcttgatagatattttggtacatattacagtgagtaaaacagttcagagattaattactaaagatgatcagatgcaaatgacccagaaattccattcctaggcatgcaccatacagaaatgtgtatatatttgcactaaaagacatttactggttatttttggcagcacaatttgtagcagccccaaacaggaaattatctaaatgcctatcagtgatagaatgaataaataaattgtggcatagtcatacaatggaatactgtaaagtaatgggaatgagcaatgtataactataactacatgcaactacaagagtaaatctttgaaatagaatgttgagtaaaagaaaccaggtacaaaaaatacatactgtctgagtcaattcatataaagtgcaacaaccaaagaaaactaatctatgcttttcraagtcagatcagttgatatacttgggtgtggtgagtgactgggaagttagtcggaggcaggcttctggaacactgcaatgctttgttcctcaacctgtgtgccagtcatccagatgtgtagcttgtcgaagttcattggtccataatatatgtacttttcttgtgtgtattttcaaaacataaaaaaagagataattaaataatatattatttacttgaatgttaatatggaagaactgaaggttttactacaaaaatttgtttccaaacaacataaatatagtattaatattaattctaaaggaatattttagaaatatgctctactactgagtaagtttacaagtgagatgtagttttttatcttgctaatggtatttttgcatccttttaacttattttattttatttttttagttaggaaagcacaccaaatgtcattagaaggttttacaagatacatggattcaygtgaatgtctactgtttaaaaatgaatgtagaaaagtttatcaagatatgactcatccattaaatgattattttatttcatcttcacataacacatatttggtatctgatcaattattgggaccaagtgacctttggggatatgtaaggtatttattttatttttaaatctattacatttaaaaatasttggaagttcctggcagtgtctacctcagtaggcaagagtgcacaataaaaagaagactctccatgttatccaaactcatagggaatagaaatttttacttgtacatatcttgaagatccaacatttggatgaagtggcaacgtaatttattgtatgcattagtatcatatgctttccttytaatcccacctgttaacctcctctccatggttatggcccctccgaagtttgctgaataacctagacacttctcaaaggaaagcatatgaagaagactcttatttagctagtcagaagatcctctattttaataagtatggttaaaattaattctcagacatcaggacacatactataactaaagccaacacataaatacagtacattgtacaacttcacatttgtggatagtgatttttatagacttgtatgttaaagagtttacatagattaaaaataatccacattgcattgctgattttatacctaacaatgtacctatcatactgttaataccagacttcagtttagtcagtcagctcagatacagtgcagaataagattttcaaagctgctacatttatctgtgtacaagcagatagacagataataaccaggtaaaaaatgttttcaaggatgaatgaatcatacagggaagatgaactaaggtaatgtgatagaaagtgactgtggggtggagggtgttacttagggtaaagttgtcagaaaagtcttctcaagaggtaaaaagaaatagttgtggcatgagtgatgatacaggaagccttagaaacatctagtgggaaggtcatgttaaacagagtaagtgattggcatgtttaaatgagagaaaaatggcaaatgtggctagagacaagtcaatggtgaatgaagggaggtgagtttgaggaggtaggcagagtcagttaatgaggatcttgtagagcatggagaggagaatagattttatcccagctgcactgagaaggattttccttaagatagtgtcataatttgatttattcaataatgtggaggaatgactgatggggccagagtggrggtagaagatgatttgggaagatggtgtagcagtgcaggtgatatagctggtggtgaactcatgaggcagcagctgagatgacaagtagttgaatttgagatacagatgcttctcaacttacaatgtggttacatcccaatacttgaaaatatcttaagttgaaaatgcatttagtatatctaatctaccaaacattatagcttcacctagcttactttaacacacttacactagcttacagtgaggctaaatcatatcctcactcccaaagcacccccaaaaactggcaacacaggacaccatagagttttggttgtttacccttgtgatcatgtggctgagtgggatctgtagctcactgctgctgctcaacatcgtgcgacggagtatctcatacagcatattgctagcttgggaaatgaccaatattcaaaattcgaaatgcgatttccactgaatgcgtattttctttgcattatcataatgttgaaaaattataagttgaaccatcatatgttggggaccatgtaattttaggaggtatagccaacatgacttaccaggtgttttgaagagagatatgagggaaagagaggaatcaagatgttcattccaataaccaaattacagtaatactgttggctgagatgttgaagcccaagagagaagcccattgtagggtttgaggcaacatgcaagggttctgtggtttccatgctaagtttgagatatcaattagtttccaaatggctagatcagatagtctgatctatgtgtgtgtggaattcagaagttatcagactggaaaaacagaattggaagtcatcagcatatatgggatatttaaaaccaaatgattagatagcattacttaaggtaaaaccatcaatagaaaagatatcttctaattccaagataatatcaaacatacaagtaaatattgctgcttctctaatttcaaatctaagtaaagacataaattcacaaattttgaaatgtattcatttagaattctgtaaagacagcccaatttatagctataatttcattataggaatttccattcattttttgttattttaatttttttaagagagaaaatataaatattaaagcagttatatttagaaatatatataattacttttacattacaagaaaaagtttcacccaactgcaaatttacacttaaatttaattgtacttttctctgtttctttatccacctttggaagacacatgcttagtatgaaagtctttcaaaatatttttccttgtgactagtggcataatatagtgtttaaatatcaatgtttaagtttctagtgctcatattycttccctttccctcawctgttaattttgtgacagatataaccattgtgtatctcgatttcctcatatttacaaaaggaaaaagaatattactgctgtaaagcattcaatatcttaatgtaccaaaagattcttaaatttatttttattaccagttaaaattcaacttcaaatagaaaatagtaacattacacaatctaaataagttacaacaaaaattacagtattttataccttgatagtttataggaagtatttgaaggaaatttaaagataaatagatgaaataaagttaagagtggaaatttcataccacaaagttctgtacaaattctagaaggcatggagactatcacctgtaagtttcctagcagccgaagtcaagagagaaacaggattagttacaaggtttacaatgatcataaaaaacagcagtgaatgagagagaaattttctctgtttccaaaaaggctcaaagttaaatagtggagtgtcctcaacatcaccattagagaaggtaaaactttctcttgggtgcctccacatgtaagtggttggcatgacattgcataatcactgaaaacattttgctggtgaccaaaccatgtagtctgaatatgcagttttgtaaaggttgacttgatccatggataaaattaaaactatctagagaagtagcaagagccaatattatttatgaaaagttttctttcacaatatagttcttggtggttttttccccccaccccaagtaaaaagctcaagattgttctctggcagcactccagagaactcatactctgttgataaaataggcaagacaatttaccgtcataatcaaatacgagtcaggaaagcaaacattcttccatagaaattaagaaactttacaaataaacattgtttcttctccaacttaaaatctaaatacataaataaatccgtaagccaagaaatatattcatttgcaattctacaaatgtagccgaatttagaacttctgccttatttgcccagagagtatccacgggccagacaagatttctctatgaatattctaggtccatttctccaatacaaagacaattagttaagaaaactctgaagttttacattatagtgcattgccacatgcctaaataaagcactgtgcacttaaacaaacaaacaaacaaaaaccaaagcagattacccaaatgtggtagcatgtgactgtagtcccagctagttttgaggctgaagtgggatgatgacttgcgtctaggacttcgaggctgcactttagtgtgggtgacagagaccccatcttaaaaacaacaacaaaaaaacaaaaacaaaaacagacacaaaaacaaaaagcaaaatttaaaaaccccatcctggctaacacagtgaaaccccgtttctactaaaaatacacaaattagccaggcgtggtggtgggcgcctgtagttccagctactcagggggctgaggcaggagaatggcgtgaacccgggaggcggagcttgcagtgagccgagatcgcgccactgcaccccagtctgggcgacagagcgagactctgtctctaaaaaaaacaaaaaaaaaaccaaacaccccaaaagaatttattaagaatttaattattcttaataaagatttggcttggttggtgaagcctccaagttaaatgagattcaccaattctctttctctctaaagccttacttcctcatcagggttcttccaacttttatctctattattcccaagggtatataaggtctctctctctctctctctctctctctctctccctccctccgccccccccccccccaccgcctttctctcatattttaggcagtcctgaattcagtacattgacttagtgttataattgttttatctgttctcagctatgctcttacctaagtacttcttgggtcatctccctagaaagggactgcatatgatcgccaaagaagaactaaatctaaaagattcattttctcatatggcccatttggtgctctgtgcttctgtttggaaaaactactgattttatataagtacttggtgctgggacgacactcccttctccaggttgtcatgacttacagcagggtttctcaaacttttcattttttaagtcagataattctttgttgttgggggctgtcctgtgcattgcagaatgtttggcagcattgtgaccgttacctgctagatgccagttacaaacctctccctatctccagttgtggcagccgaaaatgtctccagacattgccaaatccctcctgtgaggcaaagtcgtcccagtggaaaaccagtagcctgtagacatggggtaatttaatgtacttactggttttctatggaaaaatatctctatgtatgacaagggagcttttttaacctctttcctattatgtatcgattctaagatcccggtgtttcaagtcagctctcagattcagttttgtctcttccaagatcgcgttttagatcacatttttctgccttccacttctcttcttacatctctacagttcccatgttttctaatataaacacaataaatatttactaacagtcagtttatgtcaaacatgttttatggactgaaatttcaatccctgctgttgtagaaacagcactaaccattgccttrtgttagtgttgctgaccctgtctgtggttggcacatattagctccatgtcaggccaggttcataggtaataggaacaactatgcaactctttgtatgtgtctgtgaaataatttaaagaattatcttaacgctataactatatttgcatgaatcaagaaaacaatatctatacataaatcaataaatttgagtgaactcttggtagtttggggcaaatgacctatttcatgatggcatacaatggcctactctgggctgggtatgaagattttgagacatccctatttgcttttattcattattataaagtcagtgaaaaatctgaatgcaatcagcttccactgacacagagtaaataaaagcatatgtgctaataaagcatcctgtcactgctctcttgtagtatgaacactgaaaattaatttaaacacagtgggtacaactgatttaatgaacctaagatagaatttatgtttaaatcaagaaaccaatatttattttttaggtagaaaaatcaggcccagttttagatatcagcagaagcagaaatatagtttcctcagttttgataaagctgtgaacttgtattctgaggtaagcaggtcatacgtttctcctagtgaaattatgagtcgaatagacagagatgagcaggtgtccaggcttcctttgcataaaccttgattttctctagtgcttacttggattaaaattagagatggccttatgttaaatggttagagagataaggattatttgctgattcaccaggccctctagcttccatactgtgtagccaacactgtttccagagagcaagtattgtcatgctttatcttttctttatccttgcctttctgccatataccccattccccaaagcctgacatgaggaaagaattagataagattttattaatatattttactattctgagagggctttgaacattatcacttttgaatggtatggcattgaacagtaaatgccaccrtaagtaaaattatatgggttgggagtagggatgtttcagagctacaactatggagcaggtatcctcattgcttactgaaaaccaagccttgtatggagagcacggaagagtaaaacatttgactagcgagaaagacacagtattgtactacacagatagtaygtgtcttcccttttaatgcaaatttctagagactcaaaacttgtcccaaagacaagtttttatagagttttatggactcatttatgcatttattataaaatcaaatggtctttggaatattttaatactttggtatatatttttaatggtccaggagtaacattttattttgctgaaattttgctagtgcccttgtgaaaggatgccgttgtttggagattgactgctgggatggagcacaaaatgaacctgttgtatatcatggctacacactcacaagcaaacttctgtttaaaactgttatccaagctatacacaagtatgcattcatggtatgtacatatctttgttcaactgtagctatttaaacagaagcaattytaatttacttgcttcaaaatcctataatgcttagccttactttagatgatatttcaaattgtgggttatgatccattagtaggcagtgaaatccatgttgtatatagttaaaggtagatttatcaaagttagtttcaggtggtaaggtacatagtgtttcatggaactttttgtttactcgtgtgtgtgtgtattgtttcacaaggtaaaatatatttattattgtggatgatggccaggaaagtttgagaaatactggtctaggtaatagtagatattttaccaatattcaactcttttactttcaagacaaaataaaatgtatcaacaatgcatcatttcaattgctgacattttaatgactataatgacagctattgatatagtaagaaatgttcagaagtttactttggattcaaaaatgtttaatttattacagattcaacgatatagttattcctagaatttgagctcagtttatgaatcctactctataaattgagcaggtttttgcaatccctcaatgttaaggagttctaaataacactggtttcatttataaacgtggctaattttgtaccttcagacattgtgttgtttttgtaaacttaacacacttgatttcttaagtacttcaattatagtacaattttagtacaatcaaaatgactaaaagaattcttactacgtactaaaactgtgtaatgtgtacctaatacattaaatttacaaatgtaataaagttctcctatgtcaatacattacataatctgtcaacataaacttaaaatcacaaatttatataaatttatctactatatattaaaatggagtacaaaataaatatttcaaagatacaaatatcatatatgaacaatttctatcttaatataaaaacattgagagtatggcactgattctcctaaacatgtagtttctattatttctaaatttatttatttctactccagtctctttcttgaactcacaccaaagtacacaactgcctgtttgacattaccacttggatatgaataggcatatttaacttaacatgtttaaaattgagctccctgatatttctctagtcctgctctcgccacgatcttccccatctcatcaatgacaactttcatgtgctctagccaagaccttttttgccaactgtaacctwcttctccttctctcartcccctcagtcaattcttcagtaaatcatcttggctttacttttattattattattattattattattattatactttaagttttagggtacatgtgcacaatgtgcaggtttgttacatatggatacatgtgccatgttggtgtgctgcacccactaactcgtcatttagcattaggtatatctcctaatgctatccctcccccctccccccaccccacaacagtccccagagtgtgatgttccccttcctgtgtccatgtgttctcattgttcaattcccacctatgagtgagaacatgcggtgtttggttttttgtccttgcgatagtttgctgagaatgatggtttccagtttcatccatgtctctacaaaggacatgaactcttcattttttatggttgcatagtattccatggtgtatatgttccccattttcttaatccagtctatcgttgttggatatttaggttggttccaattctttgctattgtgaatagtgccgcaataaacatatatgtgcatatgtctttatagcagcatgatttatagtcctttgggtatatacctagtaatgggatggctgggtcaaatggtatttctagttctagatccctgaggaatcgccacactgacttccacaatggttgaactagtttacagtccaaccaacagtgtaaaagtgttcctatttctccacatcctctccagcacctgttgtttcctgactttttaatgatcgccattctaactggtgtgagattgcatctcattgtggttttgatttgcatttctctgacggccagtgatgatgagcattttttcatgtgttttttggctgcataaatgtcttcttttgagcagtggctttacttttaaaatgtatcctgaatttaactatctctgcccatttttacygtcactgtcgtagtcaaccaacatcacctctcatttaaatgatcccactgccctcttctctgatattcttgcttcttttcttattcccctgcaatctcatctcaacatatcaaccagagtgatttttggtaactcagactatgtcattccccttctcaaagccttcggcctcactcaaaataaaagctgaaatttgtacaatgactcacaaggccataagtggtcagtttttcattacctattttaactctcctgctactccatccctgttcacttggccattctggcctccttagtccttttcagacatatctcaaggcctttgtacttgctattccccctttatatgaaatactcttcccaaatatttgcatggctaactccctcacctaattcagagtggaaaaatgaattaaaaaaaatartgacagtcttaaaattcaaaggccttgcaaggatgaaaagcctacagcttctaagattccaaaaagcaagaaatgggcaactagataagaaaaagagacaaartgcaatgctttytattatttccaataggaagaaaagaagcaacattatgtttatttgcagatgacataatcctgtatgtaaaaaagcccaacgattccacacaaaaaaccctgttagaactcataaatgaattcagtaaagttgcagaacacaaaatcgacatatttaaatcagtagtatttttatacgcaaatagtgacctaatwgaaagaaattaagaaaaaatctcatttacaatagtataaaaatgacatatctaggaataaatttaaccaaggaagtgaaagatctgtatactgaaaactataaaacatggatgaaagaaattggagacacaaatacgtgaaaagatatcctatactcctgaatcagaagatataaaataatattgttaaaatgttcatgctgtctaaagcaatacacagggttttttttcccttggggtgtggtattgttatgttgtcgaggctggtgtcaaagtcccagcctcagaagatcctctcatcttggccttccaaagtgctgggattacaggtgtgaacaactatactaggctacagtgtacagatttaatgcaattcttatcaaaattccaatggcattattcatagaaataaaaaaaaaagtcctaaaatttgtaaagaaggataaaagacttcaaatagccaaaataattctgagaaatgaaaacaaagttggaggcatcacactttctgatttaaaattatgttacaaagctatagtaatcaatacagcatggtcctgtgcagaaaaacagacatatagaccagtggaacagaatagagagcctagagatcaacctaagcatatatggtcaacctaatttttgtcaaggagaccaagaagacaaaatggtaaaggataatgtcttcaataaatggtactgaaaaaactgaatttcgacatgctaaagaacgaaattagacccttatcttataccatacacaacaaatcatgttaaaatggataaaaaacttacatataatattagaaactatgaaaaccctaaaagggaacataggagaaaagctcctagacactgactttggcaattattattttgatattacatcaaaagctcagatcacaaaagcaaaaataaataactgggactacatcaaactaataagcttttgcacagcaaaggaaacaatcaaccaacaaaatcaaagggcagcctatgaattggggaaaaaatatttgcaaaccatgtatctgataagggagtaatatccaaaatttatgaagaattcatacaactcattagtggaaaaaaaacttgattaaaaaatgaacaaaaaacctgaataggcatttctccaaagaagacataaaaatggccaacaagtatatgaaaaggtactcaacattattagtcaccagggaaatgcaaatcaaaaccactatgagataccacctcacagtcttaccatgttagaaggtctcatcaaaaagtcaaatgataacaaatgttggcgagggcgtggcaaaaagggaaccctgtacactgatgatggaaatgtagattggtaccaccaatgggaatacagcatggaggtttctaaagaaataaaaaatagagccaccatatgacccagtaatccctcttctgggtacatacccaaagggaattaaataaccatctcataaagtttttgtgctgcagtgttcactgtagaattgttcacaatagacatgatatggaaacaacctaktgttcattgacagacaaatgaataaagaaaatggatatatgcaatggaatatgattcagtctttacaaagaatgagatctttccatttaccacagcatgagtgaggacattatgttaagtgaaataagccagacacagaaagaaataatgcctgatctcacttttatgtggaatttagaaaaaaaactctcaaatgtacagagatagataaccaaacagtggttgacaggaacgaggtgtggggagggagaagaaaatggagaaaggtaggtcagaggctacaaagtagcacatatgtaggatgaaaaagtctagacatctaatgtatcatatgaggattataggtaataaagttrtactgtatatggtattcatgctgaatgaatagattttagctgctcttgctacaaaaattttaaaaaggrtaactgtgaaatgatggatagatggatatgttaatttgattcactgtaataaccttcttactatctacgtgtgttccatawcatcatgttgtataccttaagtatacacaataaaatgcatttaaaaacacccaaaagagcaagaagtgagattttaaacaaggctttgagcagtggagactcaatgagacttcccagctgaacaaggtgactcagttttgcagcatagataagattaaagtttagacttcctactcaaggtagtcactatttggaaaaagaggacatgaaattacatagacaataattatgactagggaagtcataacttggtctagttgcatgagtttactagaataaatacataagaaatctaagttttaagggacttatactgccaaaaaccctcataagtatgactcttaggtgagccttaaaacagcctttggtaaggaaatggggggcaaacattgcttggctttcaagagagcaaactcctcaacatccactttcaatgtggccagggaagataaaagaaagaggatcttcccacaagatggagccaagaagaaagagaaatgatgtcagtgacatcagggcctcatggaagaatccaccttttaggccatcactttgcccagtctcagaattacttattatatttggaaaaaactttacctattcttttgggatcagagtgagtcagtggactcactctaattcagaagatcattgtgtaggtcaaataagggcttccaaaaatattaagttttaattcctggaacttgtaaatgttgttttatttggaaaaagtgtctttgtagatgtaattaagttaaagacctctagatggggagattattctggattatctgagtaggcgctgaacaccatcataaggacttttataagaaggaagtagagagagatttgatacaccagaggaggaggcagtgggaagacagggacagagattagagagatgtggccacaagccaaggaatgtgggcagccacccaaacctggaagaggcaaggaggattcttcttcagtgccttccaagggagtgcagccttaccaacaccttgatttgagaccagtgaaactgatttcaaacttctggtgactagacagtgagagaataaatgttgttgttgtaagccaccaaggtttgtagtaatttttgtcacagcagccacagagcaatacactcatacattaaaaagacatagtaataatcgaccctgttctgagtgctgtgaaaatgcagtaagacttgtgattccctggcttgtttacaaattggtaaatttgtgccctgataagtatatatgaaatcaaaacaaagaaaaaaattgtaaataagatccagtgatgttttgttccctatktaatggcaagttttgaagttacagcaatgagaaagggcagaaaatacctttgtagagccaccttcacttaataaaactcctttgctattagaaactggaaatatctttatctttgtttctaattctaaaacaatgagttttgatttcagaacttaaaactgaaaaagcagaatattgacatttcccccaactcatcagtgttaayaatgtttttgtttcactttttaaaatctctaaatatttgtatattaacaataaaaatatagcatgctactttttggtaacttgcttttcttcataaayccgtagataactttctatagcagtatagatagctctgtcttcttctttttttttttttatttttatttttgagacagagtctcrttccgtcacccaggctggagtgcaatggtgcaatctcggctcactgcaacctccacctcccggttcaagcaattctcctgcctcagcctcccaggtaactgggattacaggcacctgccaccacgcctagctaattttcttttttgcatttttagtagagatggggtttcgccatgttggccagcctggtctcgaactcctgaccccaggtgatccacccgcctcggcctcccaaagtgctgggattacaggtgtgagccaccatgctcgtcctgccttcttcttaattggtctatatcattcctttatatggatatggtataatttatttattattattattgttatttttgagatggagtcttgctctgtcacccaggctggaatgcaatggcgcaacctcggctcgttgtaatctctgcctcccgggttcaagtgattctcctgccttagtgtcctgagtagctgggattacaggcacacactaccacacctggctaatttttgtgattttagtagagatggggtttcactatgctggacaagctggcctcgaactcctgacctcaggtgatccgcccgcctcagcctcccaaagtgctgggattacagttgtgagccactgagcctggccagtataatttatttaaataagtactcactgatggatgcttcagttgttcctattcttttggtgcaaatagtaatacatttctttttatgcagatttaatggtctctgttttgccaaactcaaaagtactttcagtttaaagaatasttattttgcaaaggtactaaacgttagaagtaagttttaaaatacattaagcacttatattaattgccttacaattatttagaagttttgatgaataaccatagtaatggttacttttttagacatctgactacccagtggtgctctctttagaaaatcactgctccactgcccaacaagaagtaatggcagacaatttgcaggctacttttggagagtccttgctttctgatatgcttgatgattttcctgatactctaccatcaccagaggtaacatttttttctgagaaactcaggttaagaaaaaagtccatgaaaacatgtcactgttatattggcctgtgaaactgggctagagaccaatgaaaatgcttagttttgatcacgtatagaggtttatttttgcaatgttgcctagggaatgttctcatgaatgcttaggtgaatatatttcgattaaaatttatatatatatacatacaacccacattttgattgtgtctcctaccccatgggtccacaatatcaaagcaattagtattaaggaccagaaatttagtatgttttacaggcaaaagtcctagaaagtggcaaaagttctagactataaatagtcagtacccaatatctcaacagctgggtagcaagttcccctttaaaaaatctactcttttcaatttccctgtctctatgaccctttccgtcttaatttgagcatactgaagtatttgctttgaaaaatcacgtccacatctaccatcaggacttcacttctctctctggctgtctctttattactccctctctatggcccggtgcagtgactcatgcctgtaatcccagcaccttgggaggctgaggagggcggatcccctgaggttaggagttcacaaccagccttgagcaacatggtgaaaccccgtctctactaaaaatacaaaaattagctgggtgtcgtggcatccacctgtaatcccagctactagggagactgaggcaggagaatcgcttgaaccygggaggcgggggttacagtgagccaagattgagctactgcactccagcctgggcaaaaagaacaaaactccttcatattgaaaaaaagaaaggaattactccctctcacggcccaaattttcattttcttgtctccttgcaacctgttcagtccctctttctcttctaattgcttcacaggaaagttcccatcacattcatcaaagattttcttactgataaattctaatgaacctcttttagtcttcatctggttgtcctctcattaacattcaatactgtcgacctccacttcctttccctgaattactttctgttgtaacaccacattctttagccttccctcactcctctttgaccactcctgcttagtttcctttgctgggcctttctccctatcccaaattttatcagattacaaataaactttctttttgatgaatagtattgtctaacaacaaatagtttggttttgayatgtcttcatttttgctagacataacaatatttttgtaatatttgggtattkccctctgtaktttccttattttttttgccaacttaaaataatcaaaaggcttgggattcagttagaagaatttattcaagtgcatagtgtaagggtagctttctgggacacacaagacagcaaagaatagtagtcattgctcctggtgtgggaaaaagtgaaaattgttttatacaggcaaaaacagaggtacagaacagaattacagtattttccacacaagggttaacatacagatttaagatttgattggctacggttgattacactctaaggggtttgcttaacattctattgtaaagaggtaatcacaaggttctctatctctaaggtcatttagtcagggtttgaataaagaataaggagtctggtcaatgtataacatctcaacacaaaggtcagaaagcaatggtcatgcaccatcgaagaaaaacagctgtattacatgactaagtttccagggctgaacttttctccctgacataataaatttggaagatcttcaaattttacttcttttaacattttatttaaatcagtgaaaaatwttcaagtgaaagtgttgtgacactagtgacaagacatatagggctgatgatagaactgagacagaaaaaaatgaactgtgtgataaatggaaagaccacggttcttttgtggcataagaatgcccacagactcaatgtgttcaattgtggtggaaagaaatagtaaagaatttcgaaacatatcatcaaagattaaacccaaatcatagtccaattctggaacttataattttcagctttcttggaagagaatcccgcttcctattatatatgaatctatttttctagcattcccgtacatagctttcattcaaattttagctccatattaaagcagggaggtgcttttcaatgagtaaataaagaattaaagttaccctgtaatcccagctacttgggaggctgaggcaggagaatctcttgaacccaggaggcggaggttgcagtgagctgagatcawgtcactgcactccatcctgggtgacagagtgagactccgtctcaaaaaaaaaaaaaaaaaaaagttactttatcctacaatattcagtccttgtgtgtaaaagaattgcctagagacttgttaaaggaggcccaattccagccccacaattcaagattctgattcccttattttgaagtagatcctaggaatttgtccctttcccaagcacttctgataatattcttgatacatgggattgcagagtgcatttggtaaactctgcagtggagagtatcataagggtcattgtgaaagagggaagacccaagatgatggaataatttgaatggatgcctgaggatgacaaaagagaaaggacaatcaaagctccmtggagaaaagaactttactttataacccagatttcagcattgtatataacagagccggtacttaaatgtacttgttaaattaaagaaattatcctaagggcaggaataaccaagtgaaagaatggaaccagaagccttcaaatttagaacaagtgacactgatggtaaattttgctatgcttctaagtttgaaggacagaaaatattaagttaatgatgtttatgtgtaatacagaagaaatttgaagagcctttattacgaatctttaatttagtctatactagatgccagacacttatgatagacattttaatatacctgatttcatttaatactttttaatgttggataagaaaatgatgagctgaagcgtttactaccagaagttgtaacattttcattgcaatatcatggtaagtatttatatatatatacttttcacatatttcaaattgttggaatagtaccaacttgggaaatataaaaaaaatggcatatggtaagtctcaatcataacaggcttattttttggtgaattacaatcaatagcattatatcactgtattcrttcctctactgagatgtgaataggggtatgggaaaaaatggagttcttacatatcttattactgtaggctaattggaaatatagtgaaacacttttcagtgactgttacaatgcaaatttacttgtaaatgtgtaattgtatctctcaaattgtttccttaggcactaaaattcaaaatattagttaaaaataagaaaataggaaccttaaaggaaacccatgaaagaaaaggttctgataagcgtggtaaggtggaggaatgggaagaagaagtggcagatggagaggaggaggaggaggaggaggaggaggaggaggaggaggaggaggataaattcaaagaatcagaagtattggaatctgttttaggagacaatcaagacaaggaaacaggggtaaaaaagttacctggagtaatgcttttcaagaaaaagaaggtgaggtggtgttttgtgaaaatcttacaagtgattggaaagttttctaattttattcttggagatttttttaaaattctggagaaaaatcattttccttcttataaaaactctagtctatcatttacaatttactttgaaaacatcgatggtggaagatgaattttttaaattgcctcttttcttatgttagctgcttaaacatttttttctctaggctgagcacggtggctcatgcctgtaatcccagcactttgggaggctgaggtgggcggatcacatgaagtcaggagtttgagatcagcctggtcaacatggtgaaaccccgtctctactaaaaatacaaaaattagccgggcatggtgacgcatgcctgtagttccaactacttgtgacgctgaagcaggagaattgcttgaacctgggacgcggatgttgcagtgagccgagatcgagccattgcactccaacctgggcaacagaatgagagatcctgtttcaaaaaaaaaaaaaaaatctctataattgataaatattatgcattcttatgaaacaggctttgtgcgaagtgcaaaagatgcagagatacacaacgtaatttccctggtcccaagtaaagacaaagacaagattcaatattaataatacataatgttatatgtatatacattagcatgatgaaagaaagtatattaggttgcatgtgacacaaaaccaatccagctggtttaaataaaatgataattaattaattggcctacatagatgaaaagttcagtgaaagggattttagtttaaaaaatgacttgatatagtgtctcacataaagtcagcagaacttcaattctttctccagctttgctcccactttctctgtgttggtgcatggctattgcaaggagtcagctttatatcatttcagcttcaaatccagtggaatgcctatctcttggcagagcaaccattttttttttttttttttttttttttttgtacgttggctctgatctggttatgcgcacatcccagaaccaattactgttgctaggggaatgcaaagctctgtttagctggcccaatctgcctgactcatacttggattgagcatgagcaagaaatgttttcccaaaacaaaacttgggaaatggctaaaaagaagtgtaaaagaaatagatgccaggttgtgaaatggcaaatgttcgctatgtaatagaagtcatttcaatataaatttattaatgacaaaaattcctaaaattataaaattcatgggaatacactgagatctttaggaaaaaaataaatagtaataattgtggtcctcaatacttattacattaatcatgatttttaaatttaagctagcttatcttaacattaaatatttttttgttcccaaaaataatcatattgagttaatcaaatggtgtttgaggagataatcttatgaaaagatgaaaatcatttgtttgaaagtgtattttctttactagaaaaaattttttttcccaatgatyagcataaaaatgtaaaattactgcattttatttttagaccaggaagctaaaaattgctctggccttatctgatcttgtcatttatacgaaagctgagaaattcaaaagctttcaacattcaagattatatcagcaatttaatgaaaataattctattggggagacacaagcccgaaaactttcaaaattgcgaggtaaatttttgtgactcaaatagatgaaatgtttaaatgagttagattcactgctagggtgttaagattgctcaatgatatttataaaatgtatattctcataaaatttcaacacatttaacataatttagaatggggttacatacctcaggtctcattaagttttatttcatggaacttagccattaattaactttcctaagccatgacattttgattgagaatgtccgatgtggccacatttgttgagggctggggggctgtggtgagcagcttgtataggagagcagtgacagggctgcagagggaggcagagccgaattagaaggcttgaactttgtcctggaagcgaaggtgcgcaggagaagattgaactctcaggagtggcatgatccactctatttctaaacgatacctctgatagcagccaaagggtgagattgcaggcaggaaggcggtaataaagatttctggcagtgagagtggagacaggatgaactttgtggatttaataggcattgaagagggtagggttaatcagacttggaggctctatgcctatggtgaaggaaggggaagaaatggcgcccaggctggactaccagatggctgtgcagagtgtgcatgccccactgcacacctgtagaggtgccatctgtctctgcatcttcctttcactgcctctaattctaaaactgaggtggttattctgtttggcagtgcccaaggtaaaacggggcctgagaaagagaatagaaagaagactcattatgtggggaatgtcccaaacttaaaagggaatgagcaactaacttaagagccaggtgactctgctaatcctcaaaaaatggcagttttttttagtagcaggggtatgggggaagtaaggacaataatggatacaaaactatagttagaatgaataagacatagtatttgatagtgcaacaggtgactacagtcaacaatagtttattgtacatttaaaaataactaaaagagtataattggattgtttgttacacaaaggataaatgcttggggtgatggatacaccacttatcctgatgtgttactagacattgtatatctttgtcaaaatatctcgtgtactccataaatatatttatctatgtacccacaaaaattaaaagttaaaaaaaygcaatctaccatcttgtgtagaaataccamagaaggaaaatcagcacctgcaattgacttgagaaaagctgctggctgtttgggaatgcggattctgaaagctttaatgattaaccttattgggctggtcatagatacccaaagattttgaagtatactttagttcatattctctaactatctattagagagatcctggattttttaaaggctcttttccttttttaacctgtgtgttgtaaccaaaaatcaattcagtaggtctggactacagttaaataatagaatagaatagagtagtatagagtagaatggaatgggatggaatggaatggaatggagtagaatagaatagaatagaatagaatagaatagaatagaatagadgaaaagtgtattgcaagcagtaataataaatatggttttatgaagcaattgtgcatcgtgcatgtgagttggattgtaaaatgtatttcttgctgtaaggtgtggttaagagagtttgaatgacatgctttactggtctctgttccttcatgttgttcatgaggacaggtcctcatgttgttcatgaggacaggacctgtaggcacagcataaattaattataattgtattactctcatcatattaaatacttgcaaaaattttggaaaggaattagatagttctgagtagagtcaaagtataacattaccatttctttgaaggggcatagagcatttttcttgcaccaaaagttatagtaaataatcaatgatgtctgcaaaggtttaacttcaaggatgccaattattattataaacataatgaaaatcattaaaaaataatgttgtagatgaatattattgaaatgaaatgatgttcacattattatagtaaataaagataacggtttgtgaaagggaacaaacattatcattcaacyaaaaattayacacatacaaaagaatgggaagatatatgtgaaggagttatcagtggttatcagttgaatgatgacatatggtttgatttgttctttgatgtcctcctattttacagtaaacatgaactgtatttgtaataacaaacatgtttattttstaaaggttaatctcagaaataacaaaatcatattatgttatgagaccttagtcatcattcacatttattactttgtaaatgagaaacattaagactcagaagagtatgtgttttgcctaaggacagacatctgttaggactagataagggagcatgatacttggacacctatgctgtatttatacacayatggtttcaaaataaactttctctcaaggaatgtgtaacttttgaaaataaatattgataaaattaactgtaatttttaatttgacaatgcttcctaaataatagtatttaggatgargggagaggtgattctattctagttggtttagcaaatgaagtgagccataagcagtaaccattctcccatgatgagtcactatatcagcaggaatggttgcagaaacaggatctgtttaatgaaaaaagaaaatccttggagaagcatgaaatttgtgttcaaaaatttgaagaaggtgccaaatggtaaagggtttaagttagtttgaatctcaagtgacttaaatattatatagacaagaagaaacacaaagaatatgtacagaaactaaratagactgtgtgtgtatgtttgttcctgtttgtgtgtatactacaaatacgtagagattatcccagtaagaacgacatttgaaataattaaaagcattgaaagtttttcaatggagasatgtaaacacagattgaataaactttgggggaagatgctggagtgaagggattggaagtcgaactggacaactttggggtgcctttcaaccctgagaacctgtgaaatgttcagtaggattaatttagctggaatcgtatagctttgtgtgactkccatatgattctgccctactgtgaaaatcaaastggaaaaataataagggaaaatgctgcttttgttttgaaaaatgaatggattatattttggagttttatgtattcttacaacaaagtgaaataatttgggtgtaaaaaatatataaattatctaatcaattttttccttgaatgatcagtgtacatamattttatgataaaattgtcactaacatctaaataatagtgaattatactataaacataaaggcatggatttattttgatattcatgaattgcaaatttttgccaagacaatacatatcaaaattgttgaaactattatagaattatatgatatatatatatatatatatatatatatagtggctttttaaatttatttgaattctttcacaatgttttaattattctttttcagtccatgagtttatttttcacaccaggaagttcattaccagaatatatcccaaagcaacaagagcagactcttctaattttaatccccaagaattttggaatataggttgtcaaatgggtatgttatatasgatattgagttgtttgcagaagtaacataaaatgaattcattttatgaatgtatgaaaaactcgtgaaaagggctttctgtaaaagattttttagccygggggctttggggtcaggcactaatggtrggtcatgtgttgtaagagttgaagtcattcctatctgggttgaagcggggtaaatctcagtgatggtttggggaatggtggttaaattcacgaggagttaatatgagacatgtgtagtggaggaagggaacaaggaaacccaaatggacattgaagatcaaattcctttgcttgaggtatgctcaaggcctcttcaaatcaagtgacctctatcatttatactttacatgagcttctacattcatagttttgaaaagtgaataagattgcctaacttggttatttgccctcaccagactcttattccaaattgaacagctagtacagcactgcactaacccatcagaaagtaccaggtgttacccttctactggattgtggcaaggcctgtaggtgtgaggaggggggatattggggctgggtggagggtggagtgtggtactctctacagtggctatttaccaggctatactgaggtacttccatattgtaacgacaattattgctttgcctgtttctcactttctcctcaagtgacaacagcatctcatggacttgaaaatttatgacatagttgatgtctttacctcttgcattcaatgcactgatactctttattctgacatttcttaagtgttacctgacatgaacattgttattctgtaatctgtactggataccattttgatttctttactcaaagctgtgtagtaatttacttacagattaaactttgcaactcatcaatatacattaatatagacatggcaggagaaagagttttaaaaatcatgaattattaggctaatgatrcttgctcatagaacatttggggacatagaatccattattagatttcagtaagtggtttgtgttcctttatttgtattctctattacctgacaatgtcaaaatacttctttmttacagtggctttaaatttccagacccctggtctgcccatggatctgcaaaatgggaaatttttggataatggtggttctggatatattttgaaaccacatttcttaagagagagtaaatcatactttaacccaagtaacataaaagagggtatgccaattacacttacaataagggtaagattaataaattttcttttacattttttggttattatataaactagatagtgtacattagtattttgaattccactgatttgcttcaatttcttttaaatttctgttmatcktttcaggtactatatgtgggtagtattccagcatccttctatatctgaaaaatgtcttcctgttgtaattttacatgaatgattatctgcctgtgaattgacatattgaggctaaaaccttctcctctcaaagttctactatatgatttcattgtatttaggcatttaatattgtgagatacaggtctcagttcagcccactaattactttgtgggcatgttactttttctcgcctttgatgaattttacctggaaattttaggagcccttttcttttcctcagtctccacaattaggcttttgtaggtcaggattcttccccccatatgtctgtgaatatcatttgattacttaaaaagaaaaattatccatatgtctttctccagtatctgtcttcagtgtctgttaatttgtgtcaactttaacatattcccttttcctctgcatgttgggagagcttttttgtttgtttgtttgtgaaagagcgcgctttattgggaagcagactgctgcacagtgaccaacagacaggccacccagtgggcacttacacatcgtactccaaaagacacaggatgttttgctaataaaaatcaatgggaacagagattcctctgggcaactcccccagcctcatccctttcagggactgagaaatcacccaaccattttcctgatggcagccgtagttcactagagatacagcccctcaggggtgtcttcctgtttcttataaagaacattttctttagattttttgaagtcttcatttgttactttcattctacgttctcttaaggccatcagaccagcttctgtacagactgccttgatgtcagcaccagagaggtcatctttagccatgatcaagtcgtgcagggttacatcatcagccagcgtcatcctgcttgtgtgaatctgaaagatgggcttcttcgtcttttcatcaggcagggggaactcaatcttcctgccaatgcggcctggtctgataagcgctggatccaaagtttctatttggtttgtggccatgrtagctttcacatctaccctagaatcaaatccatccaactggttcagcagttccaacgttgttcgctgaatttctctctcaccaccagaattggagtcatatctttttgtcccaatggcgtcaatttcatcaataaacacaatggacggtgcacgttcttcagcaactcgaaacaattcccgtccgagtttgggcccatcacctaggtacttctgaataagttcagagccaaccactctcaagaaagtggctgaggtttggtttgctactgctttggctaacaaggttttacctgtgccaggtggaccacagagaatgacccccttggaggctttatacccatctcttcataatattcaggatgggtgagaggaagctccacagattccttaatttcccgaatttggttgtccaaccccccagtatctgcataggtctcttggggggccttttccaccttcatcactgtgaccaggggatccatgtcatccatcagcacccctatcatggtatgcaccttgtggttgagcctgaccgagcagccaggttccagaagatccttgtctrcaaatgaaagaatgctgaygtagtgttctgagcccacagatgtagacacgatggcatgattgtcatcaatratctcttccaagattcctactgacattggggtccccctcagatcatccacttttgatcttttcccttcttgcttttcttctaatggtttcatttgttcctgatttctaatgaattcttcctccatgagaagatagtctttaattctctctaacttcagtaattttaactggcactgagtgtgaggtgtcaccagtggcagtttgctggcagcatctggtccctttgttttcttcttctttttccccactgtagttggtacaggaggttcatatttctttttcttgtccttgagttgttagarcttgtcatccttcttgccacctccaggaccatgaccaccactctgactttgacccatcttgccttggcctgggagagcttttaacattttttctttatgttgatgattcaaagtctgtatttgattttgttctttactgatttcaatgtagaaatgatttttttctcctgcataattagtcctcctgccccattgcggttgacctcatattgcttcctttttatttctgtctgtatcccacctagcacctttcctccagactctcgtcttattattttagcttttattttatcacatcctgtaaaaccttatggagcataaaagcagttgtctaagatttgtttccattagtaaagacttttcaaaacgtttttctttttcctctataacctaagtgctatgcttattttctttttaaaatgtcattaaatcttttgaaaaacctctagttgctttttctctccacttacttatgagcagttctattttaggctataactgtacctgttgtttgcaaatcaatagagtggctatggtttcattggtccctctttctatttaactagttactcctagaactgtataaaccatctcagatcctacctggaattttgtagtgtttatgtttctgtccctggccagcaatgtcattacttagtgaagctctgccagctgctgagcgctcctctgctccccattacctggctgttagagtgcaagaaatgctggggcctccagaatgtgcttctcctgcgacttttcctggctcagctcctttttccaccatcgtaataccacaggatttgggaagctacactccacgtctacttcaggacctagccactttatctcagctgagaatgggaggattgagagctgttttccagaaattaatgtggaaagtatagcaaagatgaccaggactagaatgatcctgaccattgcaggaaacagtgcctgtgaagtatgtagctggcttttgtattgtctgttaaggagtttgtgactctgatgtagaagcatttagtggataggcagcaattgcctacaacactggattgttggtactccttcaaggtctggcaaagaattaactactgacttcactttacaatgctattataatgttgacatctttttgtagttgatctggtaaaaagaagtggcaaatcagccactttgaagagcccttccatttctacacacattgctcttctrtgctctgggactggactctccttttaccccctaccttccaagtgattgtcatttttacttgtggcttcctctttctctgccttcccttaagatatttatgttaactaaagtctttccttaaaccttgtctcaaactattctccttggattctgttacataaacattcatagtttcaccaccaacaatgctcaagtcttyaattggacatgattttrggaatctaaaggcatattttagctcactgagcatccttacctccttaatcaccattctgtcaaatttaaaatagtaaaacttgaacatcccttcctaatcaaatctacttctgctctwacttaaatgtcaacaaattgccccattcttccactctgctcggactagaaaattgggaaccattctaatctttcacatctccttcacatcccacatccagaccaacgttaaattctgctgattctattcctaaatattttccttctccattctcttgatctgacctattttgctgctctcctgtatcaggaatttactacctgtcatcaggtctatttctttggcttcctgatggtttcaggtagcctgtctcagtcctccatatctattctccacaagttgaccggagagattttgctacagtgctaatattatcatgcatacgtaatatttatttgtgtctcttgactactatcttagtcaggccttgccctacttgcctagccctatctctcaccacttctagcctttcatcctgttctacaaccatgtggaactaggatccttctctaaccatgactcacctccacgaattgcgtaggctcttcctgtgactagagcattctttcagccttacctgcctatttcattttgactcagttttcaagacttaggaatcatgtctttttgaaagcattttcctaggctaggttagctgtgcttcttttcatagctttgctgttttccgtaacaccctctgcatgcatatattatggcatttatcacaaggttttataattgtttatttacttgtaacttgtcttctccatttgtctgaggattctttaaggataagagatgtgggctgggtatggaggctcacatctgtaatcccatcactttgggaggctgaggtgggcagattacctgaggtcaagagttcaagaccagcctggctaacatggtgaaaccctgtttctactaaacatacaaaaacttagctgggcatggtggcatccaactgtaatcccagctacttgggaggctgaggcagaagaatcgcttgaatccaggaggcagaggttgcagtgagccgaggtcgcaccgttgcactccagcttgggtagcaagagccaaagttcgtctcaaagaaacaaacaaacaaacaaacaaacaaaaaacagatgtgttttgttccaccttatttgtgccttacacaaagtatatgcccaatatatctaggttcattgaacaaatacattatttttcctgttatgaatagtaaagagaacatatgtgctcttttattgagaaagtgaaggtggaaggcagctagtgtgcacaaatgctcacaagtgccacgtttgtattctgaggagtctcttgttgaggtgtaactggcatggagagttaatgattctccaggaagctgctgccatggccatgtgggtctttctctgttgcctctatcactctagggagctttgtgattactttatgacttgctcagatagtagaaggcacgatttgggaatcagagagccaagttttactataagctttcttaagttcttgatgaaggcatttgacattgctgctttactcttcgtcacctgcaatctgagagttttggtctaggccagttattttcaaatttataaaagctacaggactgctttctaaatccaaaatcttatgggtaaggccaatgggtaacaacagagttgaccactgagggcttattgtttgatatcccttcctctgcattggctcctgtacaaacaaatttgttaatttatttacaaattatttgatcaatgctccctaaaccaggggtgtccaatattttggcttccctgggccacgttggaagaagaggaattatcttgggccacacataaaatacactaacactaacgatagctgatgagctttaaaaaatgcaaaaagaatctcataatgttttaagaaagtttatgaatttgygttgggccgcattcaaagccaccatgggccacatgtggcccgcaggttggacaagcttgscctaaattctcattcagttttcatattcaattatgtttttcaaaattagataattttttttttctttctggaatgaggtacaccragctgaacctactccattttgggaagggtctattacctgtaaagtgatatttagcgggtctatagtggtattgggaccagtgtactatatgtttatggccattgttctttctagttactttgatgtctaattatgctgatgcccattccatgctgattgctaaacagttgcatagtcatactggcttctagctaatgccgtaatctgtggaattaggaaaaatcacacattagtgttttttcttttcctttcttttctactccttctctccctccttccttccctcttttcctttctttattcctttataatcaaacttaattatatatttgtttctccttatgtaaccttcagaaattggaattatgcctcaatttttataactgcgtttttaggcttatatcttctatctcttagcctaagtcagtacatttcaaatatagttttgttgtgtgctcattttgttccttaaattataacacatttttgcttcaacaattagcttggcaaatacaagtttaaatacaattattattaattactttgttaagatttttttgatacccagtccctaatatacatatgaaataactgattttgtgaaactcagaaaatgctatcacagggagttaaatggtacattttttaaaaagtaatatttctattgctttaaattttttccagcatatatatatatatatatgaattcaaaaacagtacgttatcagagtaactcgacctgaattccctgaaatgtgatcataacaaatgattttaaaacaaaaatatgttaataaatcaaaaattgtggacattgtggatttcactataattttgtacatattcttggtgtttatctactgataactgaggataaaagacttaaattttaaaatttgtattgtattccactttcaatgtttgtgggagctgacttagagtccatcaactttttgtaatacataacttaattttgaaataaatggtgatgtaacttaatatcttgctaaattcttatattcatatatatttgtgcagctcatcagtggtatccagttgcctcttactcattcatyatctaacaaaggtgattcattagtaattatagaagtttttggtgttccaaatgatcaaatgaagcagcagactcgtgtaattaaaaaaaatggtgagctcctgatataccttattgaatttccattagacttcttgttggaaagcttacaaattatatgttgatagagtttttgtacatatttattattcataagacaagggtnttccattatgtccaaaattagcaaaatgttatatgcaacaaaaacatttttataatgattaggttgtttagctgtattttcagattatgaatacagaaatgtacctgaccttcaaaattattgcttaaaaaaaatttacctcttttttatgttttctctcatatcaccgaattaagaaggcattttaacagcctcaaatctacttagctkctagcctttgtattaaatcaaaaatttgtgatttttgacacagcatattatatatttttataatgaattatttgaattattttagattaaaagtctatggcttctgaatcaggctaaggatgccatagaagcctactgatagaatttttggataattcagtcatttttgccataagggaagtgaagaattaagggaaataactttggtaagattttcatcattctggcatgctatgacatcttacacagtatagtactggcattgccatttcttctctgaggttgaaatgactaaggaaattagaaaaggataggttcctgggattgatccctggtcaggatcaccttgaaggagacattggaactgattcttgagtctggaatcttcttcaagggatattctcaaagcaaagtggacttcattccagagtctagaaatatgctccagatcaaatggcaatgacagagtagcaggcacagttttctttttcttcttggataataatttctaacaatgtccatagtctgcctcctttgcactcccctgaatacttccagtgtggcttctagagcgaaagtcatggaaaaagatttggaaagattttattgccttatcctatgttatcaatgggaagggatattgatgatgacttcctgcctcatttgacaccctttagagttgaaggcacattgctacggctgtgtccagagatagtaactgctgatgtcatgaagcttataataatctatctcttgttccctccatcctctacttgaatcttcatcacaaaatgcttagaaacttaatttattcaatgcaccccttataatactgtgattctagaatttgtattacctccttggattttatgggaatatccttgcagaaattcaatttggttcatcaaacattactgagcctctgctatgctaaaagccttgtgctgagtagtaaaagacttaaaatctgtttattaaatgaattcttatatatggaccaacgaactcttctatagatagtttatagttcagtgtgaaagatgatgctataagtaaartaattatgatttagagtaattcgtgcttcaagaagagtacaaagatttgtactccaagggggcacttttggagatggttcttggagaatgagtagaattttttagagattggggacaaggacatttaaggcagaagccataatataagtcttaaaatatgaagaaaatacaatttaaacataccagagacagaacacaagtcytaaaatatgaagaaaacacaatttaaacatgctagagaaaagccaagaaactcaagatgggtggaatatagggtgcttaagaaagattagtgagagataaaatgagaaaattatttagggagggtcatggaaaatctcaaaagccatgctaaggtgtcaggaactttcttttttctagaaaatggataaaattcagacttttaaatagggctataactttaacagagttgagtgttaggtttttttctgcagatttgagaagaagtatacgagagggaaatgagaaatacaaagtagagtcaggataaaatttcagtggttagaggatataaaagtcatggtataaaggaggccgtggcagtaggaaaggaatgggggatgtaagtgagaaacactgcgcagaagtcaacgtccagatggctggacaagaagaattttaagatgatttagctagacatgagagtctgggaggaaaaggataacatttggataaaatgtggaaataattcttcagttttggtcatgtctaggataactattttcatcactatcaaatttggtatcctggtttacttttttttatgttgacaactgaaagtgaggrctttctcttataattaatccatattattgtrtgtgtgtgtgtgtgtgtgtgtgykcgtgtgtgtgtgtgacagagagagatacaggaggaggatggaagggaggcagaggcacatgtgtaatgaagtaggattggaggaagaagaaatcagtataaacatttctgcagatgttttgcagtatctataaagaattgactctaaacctgcctctgtaccccatgaaattatttctcttcttaggtcaaggtaatatggtcattattccagcatgagccaattagtttactatttctgtgggcatagactgcaccctagattgctatgtggtaaatgtgctcttgtgaccacaggtgaaccatagaaaacatagatatagtataattagaaattcatcagtgcttctggaaatgtaagtcaaagaacaaaaactattgacatagcaagtgtagcattgcctttgtaaatgaaaaataatacacatgattcttctccaaacctttgagtctttattaagcagaatttatatttaatctggatgtgaatttcttgattctgttaaattacgctttactttttggatgatttgggtcatactgtgacacratgtggatttcttgcttggcagaaattggttgcttgggatgatttattttcttagagattgaaattcatcaactttggactttgaaaggagcacttagtctaaagaaggatcaagagttggctttagtttgttatctagctttcagtctaacaactaagtatggaactcttcccataataagactgactgtattagtccattttcatattgctctaaagattctacctgagactggataacttacaaaggaaagaggtttaattgactcacagttcctcatggctggggaggcctcaggaaacttagaatcatggtggaaggtgaaggggaaacaaatttggaccttttcatgtggcagcaggagattgctagtaagagtggggaaaactgccttataaaaccatcagatctcatgagtactcactcactatcatgagaacagccccctataatccagtcactttctaccaggtgtcttcctaaacacctggggattacaattcaagatgagatttgggtgggggcacaaagcttaaccatatcaaggacttagtatagaaaaatgatgttacttaattttcttcatttctcaatttatttgctaaagaattgcctaagtacatcagtcatattgcataatgattaaaagcttttgctctgaagtcagactccccgtttttgaattcctgatctgccacttaatgaccacatatgtgaaaccttaggaaattatgtaacatctttgtggctcagttttcccatcccaccctgatggggtggttatcagaattaattgagttgatccattcttagaacattgcccagcaatagtaaacactcattattgtctggttattattcctctcacactgagtatattaaaaacctatgtgctctaaacacaagatattattgttaaagggttgaaaagaaaaagtttggagaacaaatgtaatctattttttcctagatatggtatctattattctttgtatcttctttttttatatttcagcttttagtccaagatggaatgaaacattcacatttattattcatgtcccagaattggcattgatacgttttgttgttgaaggtcaaggtttaatagcaggaaatgaatttcttgggcaatatactttgccacttctatgcatgaacaaaggtaatgtccctaaaagttagatgattgtaccagcatttaaatataacttgtgtatatcaaagacacattttgacataccaaatagctctatcataaagtaggatgtaaaggaaattttatgtattgacacatattttttctctgtggaattataaaaatgtgttctcatgtggaaggtggggtgggggtgtgggactgacaggaaggctaattagacaaacttggcatgtataagcatttctttacatgcatcctagttcttctgtttcagtaaagagtagtcatgactaccataaagaaatgatgatgggtggcaaccagaagggagaagcagtgactcattcttcctgcctgaggagaagagattgggagcctgagactatcctttcctgaccccttttcagggctgactacctttatgttgcagagtcacctttccagggtgatttacactgtgctcccaattaccttgtctcaatatgcttacttttctaacagcatctgagatgtgcctaggaaacaggtcttcctgaagcagaagggtggtggctaattttggatcatgcagcgctttgcggaaggagaagtatgagctgtgtattcagttttgggcagttaggaagtcagaatagaaaatgcaaatatttaatttttgtggaagattaatataccagatgggaatataactctatagtcatggtttttaatgtaggcttagtaaagagctcttgtttctcagcaaggctattggagacaccactgattaattggttattggtctaattagatataattccttttgcaggttatcgtcgtattcctctgttttccagaatgggtgagagccttgagcctgcttcactgtttgtttatgtttggtacgtcagataayagctaatgataaatgacatatcattagctatgcatcgcaataaaacagccaaaatgaatgtctttatgttttcttttttaaacataaagaaaaataattactcataaaactagaaatattgagcccattcacttaaaaatatacaaaaataaatcagtggaagaaaagaaaatagaaacttcagagggtcctaacccagcatggcgttcttgtttgctgatttctcctgcccttctgctgctgagttgttttcaactggcttgtatcatttttaattactagaatttataarcttttgaaatacatctaattataaaatatacattggcaaatatttagcagtataaaagaaatgtgaaatctaagagtgttttaacttctagacacccactactgcgtatttttgtgggaaggaattagattgccaggccctctgagccttttcatatcctggagagtaattagcccctgcattcttatgctagttcttagatgctgtgcactggagttggtaccctgtaattagacagccatttttacgagtgtgtataaaattgatttgcctgcaaactgtattcagactccgtatctataaaagagatctactgtgtggacttacatgcttggatcttaaattaatttgcaatgtttctgaatctatactaaatatactttcaagatggtttcttggtcagagatgaagttcctgtgctatctcacttgctggacttcttaccaacagcaaaactttgctttattaaatgtcatgtagaacaatatggaaccactgatattaatactaattctaccacattgttgcatagtagtgatgtgaaagcacccagcacaaagtttgacaaagtcagggacttttaatagggacttttgcaatggaatcctaactaataactaaaataataaaatgtttgggatgtgtactaacatgtgatatctttatgaccagaaaatataacccaactagcatgttttactattatcatggtttactctcagtactaaatgtttaaaataaacgtatcactgagaattcaaattcccaagccataggtagtaagaaatggatgtggttactaagtgcacaatcttccagtttccacctcaagggctgttggatttaagatcagtgcacacccttcccagtagggatgcacagccaattcttagaaagatgcctctgttttgccagataatgaatggatcttatttaaatcatctactgttcagcatgacagcaggagggagtttcagcccattgacccaacgctttacccttccctaatctcctaaggccttttgaagatctggaattccatgaaatttaaaggctttaatcaagcgagttttacaagagagttcattaattctgcagtggaataaacttctcatttataccatcaagctttgaaatgagagagaaaaaggatatattttattttctctccttttctttaggtaccaaacttatctcactaattttgaagaccaaattgttcattttgaaatattccactctatattaggaatacggactttgcgagaaatattaaattattttatttcttgttcaagaatcttatgatgtcttgaaacatttttggttccattttaaaatttgcattatttatcatttaatgtccctatgtattgaactagaattttgattagaattttctcacaagaactattaacagattttattcatgtaaaactccagagtcagggaatgttctcacatttagaataggttgggaatgttgtgagaagatagatttgattaatgctttttaggtacaattcatttacaagaaaaaattgtgttggtaaatgtaagaaaacatcggaaaaggctaaatgaacccttgagactgtggcaacagaagattttttaaactttaaagtcttagtttaaaagtcagttcctcagggaagccatccgtgttctgctagattaggttatattccctgacttacgcttctttacaactgataatgacagtcaggaaccaactttgtactatcagccagactttagtgttgctaggagctgccgtggagctcacagctaaactgtcgtgtttccttgttgaacaataaacagtttcacagagcatcaacccggacacagccactctgtaccatgacggaacacgacaaagacaagaacattccggaatcatgactgaatgcacggcaaaaacatgaatatcgtccaaacgcaacaatgctacacactcccctatcctggctgacataaatgactattaatttattaccaagtatcgctttagccttgatttactcctctcatcatatagataagatttactccaatcatagaattgacccctgttcttgacgacatccaaatacagaggagaactctacttttttgaaatctcccccagatcatttaatccaagcccaaatccaatagtgagtcctttctaataccctcttactgagatgccctatggcttcccatgttgtgtctccttttgtagtgagcaatagatgcaactgtgtgttcctggttgtctttggctggacaaattctgacttcttccattatcttgtacttacatgtgttacagaaaagtttaattatgttgttaattttgagggtttattctttttctggttgtggttggttagggtctcaaatagaagatgagtacagtctctctacccagacttatctggacttttgtctgggaaatgatggtcactggaggtaaatgacaggctggttgctaaagagtaaagttgccctgtctctgaaagaggtgtgaggaagcttccctgtagctgtaaaaagaaggtctccattttaaatgttggatataagggagtgtcttgagggatgtaaaacatgtcccttatacagagcctctaggagttctagtcaaaatctttgtgtaaatctcaggaaatttgggagtcacactaggaagaagcttgtgctgttggttagtgcagagagaatggaatcccttttgagtgaaatgcttatgggattgaacaatggacattttactgggggactatatggactggatttcatttttcaagagttcttaatatccctttcttctcagtactgcaaaaacatctgtttaattacattactttccaagtaataacacactggaaatatgtgtaccaacaaagggttcttatgatgcattctaaattcttaggccataaaatttgagcattctataggattcatagttaagctacttctaccagccactggaaaccctcattccaaacactggagggttgaattgaagtggatttgaactgatgaagagatagattttcttttatgtatcttctacgcttacacaacagctcagcacacctgggagctggtgttaaatgcctttataatgtacctgttttcagggataagtgccctttttctactttccatgtgtacataatttaactttcacactttcagtcatcttttccattcttctcgcagggcagtcttttttctaatgtattaatcacaatatctgcaacgttagccagggcctaatgtgtgcctaatattaataaaaattaatcttaatcctttcagcaatcttacattgtattgttaatgacacaggctcggaaacattgaggcaatgtttacaggcattataaacattgcctatggtttacagtaaatgacagaaccagggttattaatctagggccatctggaaaaaatgaatgttgtcacttaatgcacaatacacaaaaattaactcaaaatgggtcataaacctaaatgaaaaagctaaagttatgaaacttctagaagaaagcagatagaatatctttgtagtcttgggataagcaaaggtttcttgaaacattaaatgcatgaggcataaaataaatgatagagttgatttcatcaaaatttttttaaaaagaacttctgccttttgaatacatcataatgaaaatgataaggtaagctatatatatatcaaaggacttatatccagactatatgaagaatacttacaccttaataatgacaacccagtaagaaaaatgggcaaaatatttgaacaggcacttgccaaaaggaaatatgtgaatgattaataagcacatgaaaagaagctcaatgccattcatcatcagagaaaggcaacttaacactataatgagttatcgttagtattgctaaaataaaacacaaatgaccacaccaaatgttgaggtggatgtggagaactgaactcaatcactgctagtgggaatgtaaagtgggacaatcactgtgaaaacagtttgaccatttcttacaaagtcaagcacatccctaccatataactcaagctttttggtcctagatatttactcaagggaaatgaaaacacatgtccacacaaaggcttccataactgtttatagaaggattttttataataaccccaaactggaaacagcccaaatgttcatgaacaggtgaatagacaacaaatgatgttatatccaatactatttaatgtaataaaggaatagactattcatacatgcattaataacaatgaatcaaaatgattaaaatgaatgaaagaatgtaggcaaaaggtagttatgtactgtgtggttccatttattcaaaagaacaaaaaatgcaaattaaatttctatagtaacagaaagaaaatcagtgaatggcgttagggatggaaagagggatggattaaaaggagccacaagaaatttttggcatggatggaagtgtttatctcaattatcatgatggttgaatagggatatgcttatgtcaaaacgaatcaaattgtatacttcaaacgtgaagctttattaacttcaactatatctcaaaaaagttgaaaaaattcaaatcctgaaaagaaaaatagcataattctggctttcttttgagcacgctgaccagtaacttgtgtaaatgatgcatgaaaggtttatttggctcagatgtgacaatgtgtgttctaacagcagtattagccagacctctaattggatcaggtgatagaagccttcctaagtggggacacagaattgaatgaataggaggtgtaaagcactgttctagactctgtggacagctgggcttgctagaaacttgtatagagttgtttgcataatatttatagcaaatccacatatccacaatgtcattcatttaaccaatgagagttatatttctcatattctttatgctaattgacatactctcttgattgaaatacatttatgtgcatccacacacacaaacacaccacatacacaagcacacatgaatatggatacacatgctcacacataaatatcaggtgttttatgacaaattattaaagtacaattttaaaaccaaaatggaaggatagatttgtgcttatattttttagatctatctacatgtttagaaaacacaaataattatttttgttttaaatgtagaccagttgttcttaaccttatctgaacactggaatcatatagaacattttaaaaatactgatgtcttttctcccttttaagagattctgatgaaattggtgtggcgttctgcttcagctttgtgatttttgaaaattctttaggttattctaaagcagtgctcttaaagcactgcattaggtcctcagccagtgaaaacagcataggggacattttaagagacgaaaattcacaggcttcaccctagacctcctgaactggaaactcagaaggtctggccaagcagtctgccttctaaccagccctctatgtgattcagatgcatgctcagatttgagaaccactgttctaatcagtggtcaggactgaaaacaactagccttgcctctattcattaccggtttgattgcacggtgctgattcagcctatgtcgtgtgcctggcttagctttctagaaactgtcttgctcgccatctttcctcaattcatatgctggtttagattttgctctctggatttaaagtgctcacatatttgtgcatcatattgtggcaagcagcctgaccaggat

SEQ ID NO: 95188 - DNA, 13085 bp, Homo sapiens
ggtcagttgttaatttttttttctttgtccattctctttttaaagagaaagaacaggagctttgtgttcgtgagagactagcagaggacaaactggctagagcagaaaatctgttgaagarctacagcttgctaaaggaacggaagttcctgtctctggcaagtaatccaggtatgagaatcaacttggtcaacagaagctggtgctacaaatgaagaaatgtgcaccagtgttgctcccaaagtggcttaggtagcccttttcatttacaaatctcaaattttaagatggatttcattgaatatatgcatttcaatggaaacaaaattctgttatagcagtgatttatttcctgggttcatagacctgaggcaatgagtcatagaatttcatgtttgattttctttaccttatcaaactacatgtttagtaattgatacttatttttattatcattatttatttttttattttttttgagatggagtctcactctgtagcccaggctggagtgcagtggcacaatctcggctcactgcaagctctgcctcccgggttcacgccattcttctgcctcagcctcccaagtagctgggactacagacacccgccaccaagcccggctaatttttgtatttttagtagagacggggtttcaccgtgttagccaggatggtctcgatttcctgacctcgtgatccgcctgcctcggcctcccaatgtgctgggattacaggcatgagacaccgtgcccagccgatacttatttttaaaaattagggcatttacaaaactattgtatgtttcagatttcagagagataaactgcatttcaagtaaaaataaacattttaatattgccatgcctcatttttcatagaaagcatggcttaaaaggcatgataagccacctgcagaataggctgtcacgtttggatctttgctaacaccctttcaagttgaaagacatatttgttgaaatttgattgtttaatatctacatatgttctctgcatttccttctttatttaaagtctggtatatagatattcagctttctcagggccctgcctttgtgtggcattgtcccttcactctgccgcactgagatgtggttatcgtatataccagtgaaccattgtctaacattctccattttatagaaaccctcaatctaatttaatcgactctttaagattatgtaaaatgcaaactgtgaaacatctttttgcttgatttatgacacaaactaactgttaaaagttgttggtttcaaaaatcgagcatctgaattttcaataaaattcagagtttttataactcccttattccatgtaggacagcatatatgaaagctattattcccatctttaataaattgagatgtagtgtgatcaatttagtgagcattggcagcattttgtaaatggaacagacaaaaaaccctacttaagttagattgatgatcacaataactttgtagtgaataagtgatggaaagaaatgaaactactgatagaagtaaatgaaacaaggattatatgaaactttggcttcatctctgttaaaataccttcttttttcccaatattgcagtctaccatttcaatattataaaaatatttattctggcttttcatagattccacactgtcatccataaagacaaaatagacttaaatcatgattagggtgataaaatgaggagaaaattttacctggatgaatttcatgcatcaaacccattgcagagaattacttaagaccctgttggggatggctgttcggttaaagagtttatttacatttgccctgatagtctttgagcaaaagatgaaaatagctaagtaaggatgatgtgttttactttataggatacacagataagkatgggaatctacttatatgtgaatcatggcaaatatttaaaatgagccataggaatcaagtatccactggggcaagcagacattttagggtattgagtgctgaaagtagtgaacacatcagagctataagataagcatcatagcagtggggagcgggtaccattctgaactcaggacagttggaaatattctctccccatccttgggctataaaatccacacgtgaggaagccatcacaagtatattgaaatcatcacagcaagcagcagtgtcttttttaaaagctgttcttttcgtatttgatgaaatattcattcttctatttaatggaagaattttaaaaatgtttttaaaacactttctttcttataaaactgtcccattaagagccaagtgtggtgacgcacctatagtcccagctactctggggctcaggcaggaagatcacttaagccgaggcgtccaaggctgtagtgcactacagctgcacctgtgactagccactgcactccagcctggaaaacatggcaagaccccatctcagacaaaaacaaaaacaaaataaaactatcccattagtaagacaatgttgacttacaaatgtaaaggtatttgtggtaataagaaggtggatagagttgaaacagtggagataaggtctaaaagcaatccagtttgctttgaagcagaagcgacgtatgaagcgggaagtcacaggacccttggaaggcagtgcatctgtgtgccagcctttcctatttcttctgcctggagcactcttcatccagacagccctgtggcttcttacttcagaaatgctgtatgaggctttgtatcattacacccagcacccagcacccagcatgtccctgtttccagagctatttttcctaatagcacgtattaccatcaaatattccccaccagtacttgtttgtttgtgtttggtttatctcctcctactagaatagggcctttgtttggttcacagtggcccatcctatgagctcagtaaatattcgaacatatttcctttaacacaaaaaataaaaggattctagaatctgtaagcctccagcccccagtaattctgtcagcagttaatagtgttgccactttaagtaaatatgattattatttattttttccatgtaaagaatagtttacagtttttactactcttacttgatttaccttttccacactgaatttgtttagattttttggaaacagatttctcgtccattaagatgctttgaactaagtgttcttgaacatttaaccaaaactgtaggtgttctctatttaaaaaaaaaaaaaaaacaaagacagaaaaaaacctctgcttctacacttttctgtaggtaaggtgttctgcatagaatggcacttattttcaaggacagagataaataacattgatttccaaaagttttatgttgtccataatactcagtgtgtttaagagtaaaattgattgttggttgttaagagaataaaacttatgttccttgaattttggcacattccaatattattttttcaatgctgtggattaaaaggctgatttctgcaagtcctacacccctaacctcctatcccagagaaaataaaacaggcacctagatttcaaatgtgagccataagagcaaatactttttgataagtataagtatgaaggagttgaactctgttcaagtaactcagagccctttttctttttccttctaaagaacttcttaatcttccatcctcagtaattaagaagaaagttcatttcagtggggaaagtaaagagaacatcatgaggagtgagaattctgagagtcagctcacatctaagtccaagtgcaaggacctgaagaaaaggcttcacgcygcccagctgcgggctcaagccctgtcagatattgagaaaaattaccaactgaaaagcagrcagatcctgggcatgcgctagccaggtagagagacacagagctgtgtacaggatgtaatattaccaacctttaaagactgatattcaaatgctgtagtgttgaatacttggttccatgagccatgcctttctgtatagtacacatgatatttcggaattggttttactgttcttcagcaactattgtacaaaatgttcacatttaatttttctttcttcttttaagaacatattataaaaagaatactttcttggttgggcttttaatcctgtgtgtgattactagtaggaacatgagatgtgacattctaaatcttgggagaaaaaataatgttaggaaaaaaatatttatgcaggaagagtagcactcactgaatagttttaaatgactgagtggtatgcttacaattgtcatgtctagatttaaattttaagtctgagattttaaatgtttttgagcttagaaaacccagttagatgcaatttggtcattaataccatgacatcttgcttataaatattccattgctctgtagttcaaatctgttagctttgtgaaaattcatcactgtgatgtttgtattctttttttttttctgtttaacagaatatgagctgtctgtcatttacctacttctttcccactaaataaaagaattcttcagtttccctgtagttatgtgtcttgcatttgttggtctcttagttgatgggagttgtgtttatgatttgtaggtcttcattgtagggtacagaaggaaacatggatctgatgctcaagggagtggcattccagtcctaaactgtatggcgctttacctcccatctcattaatccatgtatgtaagccagtggtccttaacagggtgattttgctcctcaagagacgtttggcaatgtctgggggcatttttgattgtcatgatttggggtagggtgctactggctgctagtgggtacaggccagggacactgtaaacattttacaatgcacaggacagccgctgacaacaaaatgtccatgggtttggatcataatcctgaatgatacaatctcaaatgcgaaaatcctgaaagaccaaaatccctaatgtcttaaatcccaaaagatcagaatccctaatgtgtgaacttccaaaatcacaatcctgaaagattaaaatcccagatgttaaaatcctgaaagccgaatttgaggttagggattagtgccgtttcagctgtatacaggataattgcatcatgttaggcagaactattaccttgttattgtcttcatttggaaattaagtatggtttaagagatgtggatggatatcgagttgataaggggtgaacttgttgatttatgtgtcaacttgactggattaaggaatccctagaaatctggtaaagcattattttagatgtgtctgtgagggtgtttccagaggaggttaatatgtgagtctcagtagactaggtggggaatatctttcctcaatgtttagtgttttgaagatcataaaagcgacttttcaggtgaaaagtacaagaaatctctcctgccaaattattcagttatgtacaaattctgctccttcatgaatagtgccacgcttgccttaaaaaaatgccctttgtcagagaataaaattcgacaagctgaacgaccttgtgaaccaaagacacttgctgatactgaggttcctccagtgttacaaaactcattaaccaaactgttcttggttagggatttgactgtcgaagaagatagactgcttatatttaccactaaatctaacagaaaaactatcgcatgttttcattttggctagtggacggcactttcaaaactatccctactggtttttatcaactatacatgattcatgcccctgttggttctgaagattctagaacttatctagtcatttaaacaattatttgaagatttgctgcactttgcagaagaaaatagctttcgattgaatccccaaaccataacaacagatttggaattaggtgtgatcaaagcttctaaaagtgaatttcaaagtgttaccaataaagtttgttttttttccattcagcccaatgcatttgatagaaaattagatgagtagataggccaggagatacagcaatgacaaaaacttcagtttagaagcaggaacccgcatccaggaatagagccctttgctcctccctcagaatgaatggagatcaaaaatcagatgcttatgcccaagaaaaacaggatttcattcagcacttctcccggattgttagggtgctgactgaggatgagatggggcacccagagacaggagatgctatcgcccagctcaaggaggtcctggagtacaatgccatcggaggcaagttatcaccggggtttgacggtgcttagcattccgggagctggtggagccaaggaaacaggatgctgatagtttccagcgggccctgatggtgggttggtgtgtggaactgctgcaagctttcttcctcrtggtagatgacatcacggattcatccctcacccactggggacagatctgctggtatcagaagctgggygtgggtttggatgctgtcaatgatgctatgcttctggaagcatgtatctactgcctgctgaagctctgttgttgggagcagccctattacctgaacctgattgagctcttcctgcagagttcctatcagactgagattgggcagaccctggaccccatcacagcacccccagggcaatgtggatcttsgcagattcaasgaaaagaattacaaattgtcaagtacaagacagttttctactctttctaccttcctatagctgcagccatgcatatggcaggcattgatggtgagaaggcayacaccaatgccaagaagatcctgctggagatgggagagttctttaagattcaggatgatcactttgacctctttggggactccactgtgactgacaaagttggcactgccatctaggacaacaaatgcagctggctggtggttcagtgtctgcaatgggccactccaraacagtaccagatcctgaaggagaattaggggcagaaggaggccaagaaggtggtccaggagaaggcactatatgaggagctagatctgctggccgtgttcttgcagtatgaggatgacagttacagccacagccacattatgggtctcattgaacagtatgcaatgcccctgctcccagccatctttctggggctggcgtgcaaaatctacaagcggaaaaagtgacctagagactgcaagggcagggagaggaggctctcaataaattactgtgtaaccttgaaaacaaaacaaaaaacttcagtttaaaaatgcactttccagctgggcgtggtggccaaggagggaggatctcttgaacttagaaatttcataacagcctgggcaatgtagtgagacactgtctctagaaataatttttttaaaagttagccaggtgtggcgtgtgcctgtggtcccagctacttgggaggctgaggcaggaggattgtctgagcccgggaggtggaggctgcagtgagctgtgatgaagccactgtactccagcctgggagacagagagagaccctgtctcttaaagggcaggtgggtggggggtgggggaagagtgtttccttgtgtacagtatgtattaagagatggggaaaaaatgtatcattcgcctgccttggaattccttccagctgatgacattctagaaacttttaatgaattaaagccacatttgcctgaagacgtcagcaaagttactgactgttttgaaaataaatatgtacatggtaggataagaaaatacacaatggtgttgctgtttgatcaccagtactgtttctgtcaaatctgtggcctaatgagtgcatgcagaacagatttctgagtacccaaaacaacacagaagcatgacacagaaaatagggaaatttagtagggaatgctcctgtcagtgtatatggaatcatagaagaatgccaggaagaacagcaccatgtagaaaatgaatgtgaacatattctccaagtagagccatgccctaaaagagaaaaagcagctattcctcatgatgcaagactttaaaatatagttaatgattgtggaggttggccagctcttatggactatctccatgcaattgcccataatccagtcctgtaatacacttttttgtatgtcaaattatcttttttttttctgttttatgtttttttttcactatttaaaattgttggcattcttttttacaatttgctatgctatataattcatcttcaaatcatttctgatactggaggcataatttgtgtagagacttagaaagttctgtttttttgcaaatttgactccatgaaagtacattgtcacagcattgactgtgtgtaagcattgttcctgtacataaaaacattgaagcatcctcagtaagtgaagaggtgtcctttttgtacatctgcatttgtgaaaggtaaaatgtttgaacatcttggctctttaggtggctgcatatgcagtagtgacccatcctgtttttgatagatctcatcaaaagaatcttaggttgttatggtatttcagatgaccaaaggcataaaactgggtgcacacatttaccaaccatggggatatgcatttacatttcccttcttgacctatttcttttttttctttcctttttttttttttttttttttttttttttgagatagagtctcactttgttgcccaggctggaatgcagtggtgtgatcacagctcaatgtagccttggcctcgtaggctcaagtaatcctcccacttcagcctcctgtgatggagtctcactgttttgcccaggatggtcttgaactcatgggctcaagcaatcctcccaccttggctgggattacaggtatgagccattgcgcccagcccctttatgacctatttctttatgaatatggcttgtctgttcattactgatataattatgcaactttcattagtatatatgaatgtttatgcttgcacaaaaatgtatgttattattgcctattttattgcataaagtgacctatgaagtgttctgtgttttcatatgtttctcaaataaattccctttaaaaatgtaaatacatgtaaatgtaaaaaaaaaagtaaataaatatcttttaaagaatttttaaattatattttccggaattacatttttggaattctgctctttcaggattatgattttcaggttttagactttatggattttgaccttttgggacttcagcattatgacattcgggattatggcattaaaaattgtatctcctgggactatgatcggctcccaatgtcaatagtgccacttttgagaaacctgatctaagctcaaacttgttgggacatatctcagccttgaaggaaagttattttggattttgatggatatttaaatatgtatatatctgacttttagtataaattagcagtctatgctgtgccttttcctttgtgagattttcctggcaatgctagtccttttagcttaatgaaataagaccaagttttaaagggttaataataaatgagaggaaatagctcctttatatatgtaggattattacacagctggcagcatagttccatcaagtacaaatgatactatccaaacacaatcagaaactgattaccagatctttaatcctaacagaatcaccttgacatgaatgttgagtataactcctggccagctataaaatttgcaagacctagtgcaaaatggtaatgcgggactcttgttcgaaaagcaggaaacaagtaccctgaaaggtacctacaatgcttttccctttcttccaaggtttctctctctctctttctctgcttattgtgatgttatttgctatttaatattctaagtaaagaaaaattaaaaatttaaatgattagcatgaattttaccatttatgtcgtgcaatgcagattttaaatgcaaatagcagagcattcagctgagatagggaatgaatttcacaattcatattttgtgactcttctctgagggtgcctcaagttgaccagaggagacagacacaccagaccctcaggcatctgggaacccctgactctgacacctgctcagttcccctttcctccagtcaccagacctatgcaatgccaggccaggaggagcagagcctggcatcttccttttgcacaggccaacggccccagcccatggcagtttggccacctccaaggatctttaaacctccaagctgggactttatacttggaccagggtacctcgatggcccttgtcaagacatggccaccagacatgccatggggctgccatgggggagaggggaaatggcttcagaacagctgctgccatgacctgcctggggatgcattggagcctagatactcaatgctgacccttcccttgcctgtgcccaggccccttctggtcatgggaaggggaggttgggtggggcccagtgcactagagggtagggaggggtctgagaatcatcctgggagtctatggggctgatgggaggtgggatcatgcatgaggrgaggccctgagccaccacgcaggctcccattgtcccactggactccacttacaaaaggcaaattcaaagacacaagtagtagccaggcgtggtggctcgtgcttgtaatcccagcattttgggaggccgaggtggggtggatcacctgaggtcaggagtttgagaccagcctggccaacatggtgaaaccctgtctctactaaaaatataaaacaaattagctgggcttggtggtggacgcctgtaatctcagctactcaggaggctgaggaaggagaatctcttgaacctggaaggtggaggttgcagtgagccaagatcacaccactgcaccccagcctggttgacagagtgagactccgtctcaaaaataaataaataaataaataaatataaagatacaagtattaagaatttcaagacttcagcctcagagcactagactccaggtgccaggcccttcctaataccaggtttttctacatgtggggtcctgtatggctgtgcaggttactcggctgtgaaaccaccactttctctaggaaactcctttctaccttagaaaataatacgttttcttctcactttgaaacctgaggcatgctggacaacttctctaattttccccatcccagatttcacctttattttcattcatggcttaattcaaccaacaagcagttattgagcacccactatgagccaggcactgtttaaggtgctgaagatacagccatgaagaaacattgaaatccctgccctcactgcccccttcaaatggggcgtgacagtcagcaactaatcagccacagggcatgtcagcaataagcgttaaggagcagagcaaagtgggaaagaggagcaggagtgggggcttgcaatttcagaagaggtggtgatgaggggtgcagcaggaagaggaggagactaaccatagcaggttacagtggaggtgggggtggaggggaaaagcaaagggaatgggagacctgagcgggtccggagagaggaaagacagcagaccagtggtgggctagggggctggggaggggagcgggggtttgagtgaaactgggagaagcaatatggcaggacttggaaactgaggagacattttaaatctgatcatgaatcccctctccttgctcttaagctaacaaaaccttgtttccagttagtcgctgaagctgggaacgtctggggtatttgagcagtcatggtagcttagaagggggtccctttgatgggggcgtggagagcgggttccttccaaacgatgtttctccagcatcgcactgtaagatctttccaagatgttctgttagacactagcactgtacttaccattacacagtttacatgtttaaataataatgagttcaacccagcacaggcctactcacaggcgcttgaaaaagggtcactggatttgaatctgattaaccgactgtcctggccgacagaaccgcaaggtggcgccatggctctgctagagccgcagtcccaccctccccgactagcctgagcaactgggagttactgcgagagtctatgccgggcattggataaatgccttctccccattatttccttcaatccctacaatacccctgtgaagtaggtatcattcgaatcacattttacacggggaaactgagactcagagatcacagctccggagctcaggcttttggcaataaccctccactgcctgcctccgcaagacagcaaaaggttggctttgttccccaagtcatccagtttcccacagtgatgggttaagcgtcataacccatggctttatccaagccatttgaattgaagaggaaggtggacgcagagccagcatggttagggccagtggcctttccagacttgcgtgccaggagagatgggttagcgtgggggaggccggagaaggggttttcaagtgaccccggtaggacccccacgtctctctcccgcctttgctcagcatcatctatagcatggctttgcatttcctcaaaagcccaggccagatgcccagtaccttcaggcggtccagtgtccyccaccccctagagccayctcattcaggactgccctcccctgaaacgttttatgtttccagaagacccttctccttccagggcaaagccctttcagttaggcaagctagttccctcagtgacttaagataaggctgtcctcctaggctggacttgggctgaatgcaaaaggcgacacaaggcagctgtttaaaaaagaatgaagcaaatttatatgcaccaacaagaagagattattgctcattgtgacttggtggctgggaaaataaggatccctattagattgatggatttcacaccaaggaggaggatagaaccagccctcccagagggctgtgcttgctgcaggctagctgatgagacacgtggcttactttacccctcgctcagccccagcctcagcctccctccctctacacagggaagacagaggtcagctgctgagggcctcctccatgcgaaaggttgcattccacccggcattcagaggggcaccctcgctaacctccatggaggcaccttgcttacatttctgacaccacagccacagcgacagctctggggccctacagctcccctcaagctgctgaaatcccagacaaccaaagctgctcatccctt

SEQ ID NO: 95189 - DNA, 19961 bp, Homo sapiens
cctaccttgtcggattgtaggtcataagacccctgtttcaaaagagagtcttgcccagttccctgaaagaaggaatgctgcatagaggccaataagaatctgaacagacagcccttgctgggtttccctattgcgtctattagtattagaccacacccttcttgtccaatcacatttctacatggttgtcaatcatgactacccagtgaagtctccataaaggcccacgatgactgggtacagagcacttccaggtagctgagcatgtggaggttcctggagagcggcacccccaaggagggcatggacgctccaagccccttccccatacctcgccctgtgtatctcagcatctgtgtactttgtaatatcttttataatgcaccggtaaatgtgtttccctgagttctgtgaacctctctaacaaattaaacctaaagaggtgaatgtgggaaccccaacttgaagctggtcagtcaaaagttccagaggcccagacttgtggttgatgcctgaaggggcggcagtcttgtaggaatgagccctcaacctgtgggatctgatgctctctgcaggccgagagcatcagaattgaactggaggacacccagctggtgtccattgcaaatgcttgcttggtgatggggagagacccacacatttggtggcagaagtctcctgtgttgatggtggtcattgtgttgagtgagagaacagaacaagcacagtttatgttttctcctcttacccatgcttttacaagttcctttactttttatgatcaaatatcctatgttatacatttgagggggaaaattggaaccaaattaatatagcttattcacttctagatagaatgaatgtttatgatcatgttatttatatagatccaatgagaatctgtcctttttcttaccagaaaataattggatactgaccatgccaaaattccatttaattaggtatgtgttaaagaaaaaaattatccaatgccacttgttgaagtatgtaaggatgtctttatccaagatcattatgacaggtacaggaaccagggcaatggggtcttgcagttggggggagagattgggctcaactctaaatacagcatgggcaagtggaaatcagtagctaaggaccagggggtctgtagacagaagttactaagaggaaacaggagtaagggggattctggctaaacagacttaacaggattcttgctgcagacaggccagggtggtcagacatcccctggggcatgataaaggacaaggaacctggtcagatgtcaaggtattcagatgttgagggtagggggttcttgctaaattgacttagcagggctctttgctaaaactggattttacaaggaagtgcacagatgggcctaggagaagattcagaagcccgcctgaaatttggccaagcaaagaatttttgttatatgataagccactattaaggaataaagactacattttacatgtggaaatgacacctatgaagtcctctagaaaactctggtatggctttagaactgatgacattgcagccttagaggtagtaaaataagtaaataaataaataaataaataaataaataaataaataaaacctacatttcctggcagtctaggaatattaacacatatgggaatcttagagaaaatggtgctgatataatacttcacacataaaagtaatttcttcccagccctaggggctttacaaagcctccagacagaagctcactgtaaagcatcaatatcatgtggctctggtttcgctagccatacaaaaagaaagtatttatttcatcaacacctcctgttatgtcaatagaaataaattttggtcaaataaaacaaaatatcaatttgatgatgctgcatcaggaagttattaagcaacatatacggttcaacccatgcctcaatggcaaggacttgcccacaaggaaggaaaatccgtagacgcaaagcccaactcttcactctactggcttcattcatgaccaagtaccactgcggggtggggatgggaataatttgcatctggagataagccaagaataataggttatcctgagtggtttaagacaccaaaataataagccttggctatttcccataaatttggattcccagctgggtgtggttgcacacgccattgatsccaacactttgggaggctgaggcaggaggatggcttgagcccagaaggtcgaagctgcagtgagcccagatcacgccactgcactccagcctgggtgacagagtgagactctgtctcaaaaagaaaaaaaattccccgaaaaaaacaatttcatccctgatttttgctatgctgataagtgaagatgtgttgtaaaaatgatgctgatctccaccaaacgtgataaccttgggtcattttttttttccccttcaaatacttgttgcattttgcatttgacgagccagccattctgaaatctgactcgcttccgcttttcacaagcaactgttttcttctctaagtgtttctgcctctgagtcttcgacagcttctactgtgcgccagcaccaccaccgagctgaggatttggagatgatttgaattcctgcctggcagaagtccaccctctggaggaagagactacttgtaaaagagagaattctcctcaagcatttggtggggcatcaacaccacctctgtttgctctgacacgccatgcaaaatgaaggaatcctcaaaaccactgtgcccaaggggccagcccaggctcccaggagcttgttttctgaatggtggtaatgtccaccctctggctcctgatccagactcatcttgtgcctccctcgagctccctcctgctaattccatgcctcaaccactcttgaattcttctggttcctgaacataacaacctcttcctgctccaggtttttgcacaattttttttgtgtgtaggggacggtgggcaaggggcagactaacacctgcccttccttcgtaatacattacttgcttttctttgtttaatgtccatcttctttgccagactgtatgcttcatgaggacagggactgcctctctgttcccattcacctttctgtctctactgtctacctcagtggaaggcaactactctagtacacttacttaataaacattggttgaacactatcaatgtactgtggggcctagaaatgtttgattagggaaattaagtcaggaagcttgttttgtggttttatggcacctcctgagtcagttcttcacagggtaacaaaaactattgaatgagatgaaattttgagaacatcagggtttaaactcataagagtgtgaagttatgcaccattttgagatcatttgttcatttattcaacgagtactttactgagcatctactatgtctcaagcactggggatagatacaaaggtggataaaatgacccagccgttgcctttactgagtttatagtctagtgagagaggcaaacaaaacatccactgccacacacaacatataaaattataactgagtcaggtgttaaggagagaggtacaaagtgctctgacagccctatagcgggttttctgtcacctggagactgccttttctgcagacaaggtgactcctgagctgcaatctgaaggatgaggaagaataaagcagtcaaagaagagcagtgttaggctgcaattctccatccgcaattctccaaccgcaattctccatgggttgcctgcatttcctgcacagcttatgtgcagaggcactggcttctttgttctaggcaatctttttagtgatgtttgtacagcaaacagccttggaagatagaaatagcgtcccccctccagaccaaaaggcagatttgtttactgtccagtaataaagataatgtctcccttatcttgggctggccaaggtgaggaaggcttactgctcatcatgaaagatttgagttccttaaactagggattcctctgctgtgatgtaactcattgcattcatggcatctacctgggctcctccaacactgcccttgtgagacctgagggctaaggggaactgaccctaacatgaagttcatgctgcttgctgtaccatggataataaagtcctttgtctctgacctaggagtctcgtgtcttctgccaacatccacgaaactgtagttatgtcattaatttgcaagtagcataaaatctcagatctttcatcgttatttacaggcaagtggatgtcatatataaaggccctgtggcgggagtcagtagagcaaatataaggatttaaaagaagacatataagcatgagtggaatatagggagggtgggggtcatggcctgagataaggctgggaggtggtgagcctatgagacccttggccaatcctgctaacacaggcctgggggtatcttggccatttgttgttacaaagctgccttcaggcagagcatgtggaattaataaactgagcttgagggagcataggacaacaaggcttgggccaatctaagcctatgaaataatttttaacaaagggagatagtgaaaataggaggtgttttcttaacatcctgtgctctgtgatgaaaaattttgcatctgcatgccacttcataatatcactattagaaattagaagtcctcctctcagtgccccaaatgaaccagaagaagctatcattgactgtcattgctgtcaatcatcttgggtacaaaaggaggcagtcatcttaaaaaggaaaagtgatgcctctttagtattcaccgagcgtgattctggacaagccactttttgtccacctctcttacaatgaagggaaggcactggctgagttttaaaggaagagaaagggagagagggagagaagagggagagagcagagagacctcaccgagagagctgcaaaaccagcctggaaaaattagagtattacctaacattagtgaaaaataaaggtactttcttgagaagcccttggacccattctgcctcttggagttctgaacttttcactcactgcctattaattaatgttaagcctgcaaagaatggagttgtcctggatatttggccaaaaaaaaaatgtatccacaaacagggacgtaatcaggcagggagcctcgttaagaagttttgttcttgtcctaggagtgatgagagatcactgaaggatttagagaggggctgtatcatcaggcttgggttccaaagcctcactgagagagttggggagctgactgatgtcagatgctcgtgcagccgccccgtagggcctgtatttcctccatggtgcctcactgcagcaccgagcttgcaaaagatcctctctctttatgggaatttcaaaacagaagcaaaatagcaccggggcttaaagcattcttgggaatttccctgtctttccctctaaataatcagcatgtaaattgcaaaaaaaaaaaaaaaaaaaaaaaaaaagacacgggcccaaaagggagcgctcagtttcaggctctttgctttccttcctcccgaggctctctggcccttacccagcctgaagacagaaagtgtgagggggagggtaggaaggtaggtcaagcagggcaatgctgagcctgggaagaaaacaacagccttgtttagggcactgtggcttacgtaactaaattgtgcccagtttccacctggccaggggcctggagtgaatgctgaagatgcaaaggtagaggctgccagaaaagccaggaaattgctggcaagaaaggccagtggtggggtgcaggagtgggaggaaggctgggaaatgcggctgagtcacatctccrgaagccccccatcatcaccctagtggctcttctgctggcaggtgcctcatgaagacctgacccaaagttttcaaaactctgcggtttctcaaccctcctctggtaatccatagtactcccccgcctccacttgccagcctcgtgattccttcattgacacatagctcagttcccataaaagggctggtttgccgcgtsggggagtggagtgggacaggtatataaaggaagtacagggcctggggaagaggccctgtctaggtagctggcaccaggagccgtgggcaagggaagaggccacaccctgccctgctctgctgcagccagaatgggtgtgaaggcgtctcaaacaggtatctgggctagccaaggttaatccatcagagttgtgggttttcaggcccagacagcccgcagagccatctgcctgctgggtgagggactaagggagtgggcagagggggaggagaagcagagccaggggagggactgaggctgcaaccaggaggtgggggtgggggaggtgggtctcagttgcttgggggagggagcagggcggaagggcaggatgcacttgcaggggtctcatcctggatttctcttcaggctttgtggtcctggtgctgctccagtgctgtgagtaatccctccacctccacttttaagtccagaggcgtggcgagggcacagggcaggtgtggaggaggtcttagctccaagggaacactttgccaggttcttctgtgcttccaatgacttcgaaatagtcacgtttgctaaactggagtgaggagtatatggatgtttattttgctatactctttggtatatgtgaaaattctcaaaataagaaactttaaaaggtcctggttcagtgaaggctttgactaacagcccctgggagccgctagtacagttgcccagtagctgcttggatgagtgatgcccacattgtttgcagcaggagaaacagaattagaggcgaggaaggatttcctggtccattgtgatattgtgccccagcttgggggacatgscgagggagcacaggactgccattccgggtgggttacaagttagaggcactctcaccaggaggcagagaaaggtgggccagagtccctcatggatgaaggacctcactgcaggtcactaaaggtgccagcctgaaagccagggccatctgtgacacaggctatcttgggccttcccctcccacaaagccactgcttccaggaagcctgctgtgctggcaccaagtcccatttcatccttattccccagctcctacccttcccccacacagtgcctgtagcgtattcatcccctgcattggatcttttctaagcattttcagaataggccttattttcaccagtcagggaactccccagaggcagggggacctgaaccagctcctttcatttaagaattctgactttgctcacaatctgcaccccactcctccctacccaaccccacaccccattggtgctcagctctgggctcagcctgaggtctcttgccgaatcctggcccgggccccaycccagacttctccttcaggctctgcatacaaactggtctgctactacaccagctggtcccagtaccgggaaggcgatgggagctgcttcccagatgcccttgaccgcttcctctgtacccacatcatctacagctttgccaatataagcaacgatcacatcgacacctgggagtggaatgatgtgacgctctacggcatgctcaacacactcaagaacaggttgggccagggctggccaggagaggagggaccagctgggctggtcccagggcagggcaaccccacccaggaggaagggcgaggccccaccctgctcacctatgtttggagagttagaggggcttggcttaaatgggtggaggggatgactgtaggtgctgggcaatatttggggtgatgagagactgtagacggaagcgcagctgagcccctctggragaggggaaccctctcctgcccctaacgtgctctccagggagcatggaaaatgagcaagactctactttgccatactctgtcttctccactggggaaaacaaaaatgggcagcagacctcagagtaactcccatgaagcctgtgacccctcagagatccaccactatgaatctctatgggattcccatgatgtcctatgggaggacatcagcggcctaacccagcctctcacccaaagcaggaaaccttctatggcstctcagacatggggccacccagtgtcatgacaatgtcattccactcctgccctccccacctccctgtgctccacaggaaccccaacctgaagactctcttgtctgtcggaggatggaactttgggtctcaaaggtaggagcctctccccaggggcaggacggcagaggaygatggcataggagtgaggagcttgggtctcccscatccactgtatggatgttccaggggctccagactagataggtacaaggcctacctgtttgtcaagggcctgcctgatrtgtagcaaagaaagcagagcccagagagagagcaggacttgccaagagtcacacagcaagttaacagtggatctcccaattccctgccaatgctctatttactacctcacaggcccgaaaatatgggacttctggggctaccaccattagggctggaaagagagagatggaaaccaatggggacattgagaagtggggagaccctgggaggagtctttggattaggtggggttggagcagggcttgaaatgggggtggttatggccatcgttggcacccatgtgctgggtactctttctgtgtccagcaccctgtctccccatgatcccatgttgtcctcacaacagcaaggtgagctgttatatttgtccccattttacagatgatgaaactgagactcaggttataacctttcacagtggctggctagtaagtgatagagccagacttggaaacctggaatgcctggctctaaggcacatgcatgcctggaggcgacccctgtcccaatcatgccctcccagagctgtgtggcctcrggatcccagctctgcaggtcctggaaaccccaccagaggcscaaggcacctagcatatcagtgctgagcatgctacagggctgattttggtcctagattttccaagatagcctccaacacccagagtcgccggactttcatcaagtcagtaccgccattyctgcgcacccatggctttgatgggctggaccttgcctggctctaccctggacggrgagacaaacagcattttaccaccctaatcaaggtgctggtcaggtcagggacagggagggaggtgggcaggcatgagggaatggggtgggctagaagccggcgtcagctgctgtcctcctgaggacaggtaaagagggacttcagcctcagggcagtgtcctgggaccctgtgccctgaagatctcacatagcaaggaaggcttcttgtgaccatggtgggaggtgggaatggggttctaagaggtggaaggttgtgactgagcagagcacccacttataactacccacttagtgcattgcccattgcccacccttcaatcccatactgatgccacccatacccagcatgcactgtgtccagcagctctcagctctgcctgggggcagcctaagtatctccagttaccaggggcagaaggagagtctaaacaaattgttcacaataccagcagcaatcactttaactttgggatttcatgyaccagctagaacaaagcacagaccgaaaggcaaatgtctcccaaagtcatctgtgggccaataggggtcacccactgtccgatgctccctccaggacagggagtaattgagtgctgatgggtgtgcmtgggtttgrggagaarattagtcagttttttaggaaaaggatgggtgacttgaggatgggaccactgatgagccactttatcacttccactaggccccaggcaggttggggagtacagcaaatgggttgcgcagagacctagtccgccctcgatgagtctacctctcatgccacttgggaccctttctctcacctgcctgtctcccatctaggaaatgaaggccgaatttataaaggaagcccagccagggaaaaagcagctcctgctcagcgcagcactgtctgcggggaaggtcaccattgacagcagctatgacattgccaagatatcccagtgagtctcctgccccaggcagcctccccagaacctctgccaacactcctgtttccccgccaccsccagccctagcactccatgtagactgaggacactgggcttccagtcccagttcttccaaagccttgatgtgtgaccttgagcaagtcacttccctgccctgtgcctcagtttccccatctgtcaartgaggcataacaatccttgcctttcctttttcacctgggctgttggctgagcagttgagagagctgctatgaaagtattttggaaagggaagtggaaaaagctattcaaaccctccagctattgcagagtattttctccacaccaggcagagcagagtgctgggccctggagaggccacacagcagcctctttctagagtgctggggagtcctcaaggctctctcatacacacaggcctccccctttcctgttggccccacgcctcatcctcaccccacccctcatgcctgtgaggaacaaggaacagccaagcagcctcatctctcctgagagcagagccatgggtctcgggaaacccaggagtaaggaacaaagactcttcaaaatgacttcagagctttctttaggatcccagggaggtgtaaactcagtgcttaattaaatggattctttagagggtgggaaacaggtggatgtcaaccatttgccccacatacccgtattcatgcaatccacccccagtgggctcaccggtgcgggtgtgcaaaacctcctcccaccccagtcatcttaggttcaggtcatcctttggtcctgctctttccccgccaggctgtctgttgatgctacttttaatctgctttcactaagataagcctggcagaagtggtgggggtaaggtgggctgtaggccagctcccaaatgtgtgctgggcataacagaagacccattcttgactgaagtgcccttgtgggaccctgagcccstgccctggagtggcacagggaggtgtgccagcaatggggaccgaggtcactggggactgctggggttmgggctagtggcctgtctggctgctgtctgcttccctcgttcacatcctgctggagccttaaataggagcccaaargcttttctttcttacttttttttgagacaaaatctcactctgttgcccaggcyggagtgcagtggcacaacctctgccgcctgggttcaagcgattctcctgcctcagcctcccgagtagctgggattacaggtgcctgccaccatgcctggctaattttcrtagttagagtagagacggggtttcaccatcttggccaggctggtcttgaactcctcacctcatgatccacctgcctcggcctcccaaagtgctgggattccaggtatgagccaccacgccyggcctaaagcttttctattaataatttcctgcctcaccctccatccccttcctcctcagacacctggatttcattagcatcatgacctacgattttcatggagcctggcgtgggaccacaggccatcacagtcccctgttccgaggtcaggaggatgcaagtcctgacagattcagcaacactgtgagttcccagaaggagggagggccaggagggggccgcaagacctgccatctgccagtgctcacacaccaatctctctagycctcagtacagtcctgcaagaggggggtyatgaggcccattccacagataaggaaactgaggcccaaagtctgggcatgctgcgttgctctgggaaggtgatctgcagggtaaatggagtgagggcagggggccraatggggagaggctgggagccgaggaggtaggagtcattgtgccctcagagccaaccacctgatttctgcatctgtcaaatagtaatagccccttcctatgcctcaaaggatttttttcaagaatgaaactgtaaaattcactttaaagtgacatgatccgttcccggagggacaggggaatccccagtgcaccatacaccaataacccctgctaaggcagcagtattaattgctcaaccttccgcacctgtgcactaactgctcacgttgttcccaccctaccccacccaggactatgctgtggggtacatgttgaggctgggggctcctgccagtaagctggtgatgggcatccccaccttcgggaggagcttcactctggcttcttctgagactggtgttggagccccaatctcaggaccgggaattccaggccsgttcaccaaggaggcagggacccttgcctactatgaggtaatggagttggggagaaggtaggattcccccacaccaccagcagccctggggaaggtgattccccaccacgttcttgctttttctcctttgggaataaagaaaatgtccggttgccccagcatgcctgaggaagtggaagggagaggttaggacatttgttgctgaaaatctccagcaggtacaggcacatgggcctgcaccactaggcacctgggatakccctctggctatggggctgaggtcttccttccagcccaggaaagagcagaggtcaagaggcagattttttgtttcactctagcctctgctactctgtgtggccttgggcctgtcctcagtgtcaaccagcaggcctcacatctctgtttaaatggaagaagctamgcagggccaaggcagccaccatctctgggtcatttgcctctggtttgtataaacttrtgtgatgcatgcagcctgcagaccctgcagagagtgaggctgcaggatggagcaggagctaaaagagatttggagagtggcgtctcctggtgacctgcaaggtctcggcacgactccccacactgccttttccctgttatctgctcagatctgtgacttcctccgcggagccacagtccatagaatcctcggccagcaggtcccctatgccaccaagggcaaccagtgggtaggatacgacgaccaggaaagcgtcaaaagcaaggtaggtttccccaaggccacrcctcaggacaaagagaaagaaggaggccccgctcccagcagccagattcctgtcccttgcactgaggtctgggctgggctcacagagcacatgtgccctgtacacactctgggtcagggaacccagccctgctcctctgggcctcccctgccaggtgcagtacctgaaggacaggcagctggcgggcgccatggtatgggccctggacctggatgacttccagggctccttctgyggccaggatctgcgcttccctctcaccaatgccatcaaggatgcactcgctgcaacgtagccctctgttctgcacacagcacgggggccaaggatgccccgtccccctctggctccagctggccgggagcctgatcacctgccctgctgagtcccaggctgagcctcagtctccctcccttggggcctatgcagaggtccacaacacacagatttgagctcagccctggtgggcagagaggtagggatggggctgtggggatagtgaggcatygcaatgtaagactcgggattagtacacacttgttgattaatggaaatgtttacagatccccaagcctggcaagggaatttyttcaactccctgcccccyagccctccttatcaaaggacaccattttggcaagctctatcaccaaggagccaaacatsctacaagacacagtgaccatactaattatacccyctgcaaagcccagcttgaaaccttcacttaggaaygtaatcgtgtcccctatcctacttccccttcctaattccacagctgctcaataaagtacaagagcttaacagtgtgttggygctttgctttggtctatctttgagcgcccactagacccactggactcacctcccccatctcttctgggttccttcctctgagccttgggacccctgagcttgcagagatgaggccrccatgtcctctgcctagccgcagagagccccagtgggaggccagcgtcctcagattcacctgccttggacttaacccaagcatggctgatggccttccaaatattaaagtcattgccatccagatttctaaattaaattccctgttgaaagaaacgttttctgtttcctgaaggctagcaggccctgggaaagaaggcttttcatcccaacactccctctcttctgatccacaggaaggtggtgggagctcatcacaggaccaggttagaaagccctgaaccctggaccctcagggccagcaggaaatgcagatgtcatctcatgcacccttcctgcctctcgggactggagtccctgcagagtgcttgagagatggccctccagcctcccagtgaggggcagccgattaccttggaagcaacccattccgtggctgggctgaaatctgtcaatagtcctagtgctgggcttagccctttgttctgttcacccctcccctaacactcatccctccacccattcagagatcaaagtacctctgctcaagctggcctgagataggaggtcgggaggatgtgatggggtgactcagaagaatagacagattttcagcctttatgaggtggagacgctctcatcaggcttctgttgaattcccagggccccaggaatgcctttatccaaaaaggctccagatactcaccccagaactaaagagaattgatttgtggattctctgatgtttggattatctgtgacttaggataatcacaaattggcctgatggtttgtgacgccggtttgaagtggagggaaggaggaaatatctgaaatctgaaccagctggagctgggcagatgctactgatcccaaggtcacagccctgctgaaggcgaagaaaacaaggactcggcaaggcgtggagtggggtgtggggagggggtacccggcatttcacctctggctggtggggccaagtattccctaatccctgccactgcccaccccaccacacaggcatctttgaaaccccagggctgcaagcccttgtgggcagccaactgccctcccctggggccacccttcccccagccggggacaggctctccagggctgactcagtgtcctgtggggttagtcacattcacttatagctgcagagtcagaggccaaggatggagatcccgtctccaggacccactccctgcctggcaagaygtggagtcacctagcagagggcgagggcatccagggagggccagatccagaggctcccaggccctgcactgccactccccagcagagacagcagggttgagaggcagccacaccctggtgtccccagtccycaggaaagggaagagcatgcatgctgctgagggccctgaataaatcacttttacttatttttaaattgtgagcacatcttacgtgctaaagagtgcataaatgtatttgtttaatttgaagaataactatgtagtaagaacctgtgtaaccaccacccaggtcaggaaaggaaacctcattagcacccctgcagccctcacgatcacagatatccctgttcctccacctagaggcaatcgccatcctaacttttgtactggcctcatcttcctttctggccttaccgcctacggatgtaccttgaagaagggagcctggtgttgactgcatttggatttaatgtagatgagacagatgagacgcaacatttctgtgtgccttgctcttctgctcatcactgggtctgtgagtagctgaagttgctcatttgaccccatattttgctttacagttgcataaacactccacagttatttatccatcccactgttgagggacagctgttttcccccacatttcaacaattacaaataacattgccatgaaccttcttctccatgtctcctggggcatgtgtgggtgttatatgagcggcacggctgggtcacggagtaggcacctcatccattttactaggcactagtaaaactctcacattttccagagtgactgctccaataccagcaataaaagttcttaatgttctccctccttcctgacacatggcattttctggctttccagtgattcccagtcttaacattttatcgaacaaatgaatcaatgactagaaatctggccatatctgcctcctttggcacactgagaaagcccatgcccacagcctgcttggaagagtctagaagcttcagagtgctctcctccactagggcatcttccagatctgcctacaactgcamcccatcccgaagggcgaggggttctctgtaacaggtggaaaactgaggcccacagcaggcatcaggggagacgagctccttaccagccgcccaactgagacaggagccaggagacttagtgccccttcctggggttccaatgctggaggaccatcctctgagcagctccaccctcagcatctcaattccctccctctctagggccctcagcctcatacagcacaggcgagagtccctgggaactgtgggagcccagggaatgtggaccccagaggcaaagctgggagtgctcacaaggacgattgtcccaaactgtcagggccccagcacccagtctgagaagctctgggaacaagtggccccatagacgccagacacacagagcctgagctgggctcattctccagatagaagttcttcctcctattgccctgacacctggcaygcggcctgctcgatgtcccatctcacccatctgcgccctcccccagctgggcaccagcaccctggctgttgaaggccagtcrgggagatggatgaggaagtgactcctcaaggggcccttgtggttcctcccccagagctattcctggcctgggcgcctctccaccctccagtcctcctgcttgacctgaccccacagctgggaatcgtttgctgggggtggggcarcccctgactatataagcctggacctaggtgtcccaggcaccctagaggcccaggccccccaacggctgacccctgcacactccaccctggccccccagccagtccagcaatgatggaaaaaaacacctccgagggccctgcctgcagtccagaggagacygcatctgaatctgccaaggtgcccacagcagagcctcccggagaagtggcagtatcagagtccaccagagaagagcaggtgcccaagccgcaggcccctgccccacaggcccctacagcctccacagccactaagcctgcacccccaagtgaaggtgactgaaggtggggcagggggaggagggaggcaggcatgtcaggggtggaggggagctcttggccatgaacctcttcatctccccagatgtccccagtgccccactgctgctgaccctggatgatgtgagcagcagctctgtgactgtgagctgggagcccccagagaggctggggaggctgggcctccagggctatgtgctggagctctgcagagagggaggtgagtgctgggctaagtcttgcatacayccaggggaggttgtcatggagggctgcagggacaagtgcacaggccctgtggttggtcagtctgggagagatacagaaggaggggatgcgagcagtaggctcctcaacccacccacctgccctttcttgctccaccagcaggagagcaagaaagggtaggtgggtgggttgaggggctcccttgtcctcagctccaaggagcttctgagtaagggaagggtaaggggrcactgggttctcctttggtgagaagggaaggaagtgctaagtctcagaggaccccgaactgtaggaagtggaaagggaggagctggagaggggaatgttagcgtaagagacagtgaggagaaagcgggaatggggtgggggtgtgggggccacatccctgctgccactgtccccctccatggcccaagtccagcctggcctctgcctctgcccctaccttgctgtgtgactttgcaaatgtgtccaaccctctctgggcttcaacaacctcatctctagccacaatttcagggctctaacatcaggtgtctttgatgccatttgacaagaagtcagggaaggcaaacaaggggaaaatgaggcccagagagggaggctgatttccccagatcaccagcaggaaaagaagccccatggagaggggcgcctgtggccacattgcaaagacctcacactctctccatcccctcagsctcggagtgggtgcctgtgagtgcccggcccatgatggtgacccagcagactgtgcggaacctggctctgggagacaagttcctcctgcgcgtgtctgcagtgagttctgcaggggctggcccgccggccatgctggaccagcccatccacatccgagagaacattggtaaagcccatcctggccttcagctacccagcccttcccaaacaccttatctaatggagaaactgaggccagcaggtagagggaaccaggcagtcatttcccccgtcccacgctcacatgcacaagccacacgctatcaccatcttgccttaagaaagttccaggttcctcagcagtaaggggcctctggaggtctaagaagccatttccctgagtggtccagcccccacgccttgagaaaggggctcagaaacaaaaggtcaagttccctgggtcacctgctcaatgctaagagtccatctgttctatctcccatctaatctcaatctctccagtggccataaatgctcattttctgcccatttcctgtggcctgggttccagattctctcaaaggtcttgaaacagagagaaggcgctgcttgccccttgttccaccatggccctagtggaaagaaaaagaaggtctgcaaaaggcccatgaagacttctccattgcagagggcatacctcactggggccccgcaggccagctgccatccccattgctaatatttctatttgcaaggtgcattagcctcaatcctcccctcgctcccctcccggagctgatcgggtttcagtctgttaatgacagtgagtcatttggtctgatctgaggtctctggggacagcacagtcccccagggtgaggagagacacaggcaggcaggtggcctgaagccttctccaccttccttcttgctcctccactaggggatggatgatttctggtagctctagacaaggcctccagaaggagaggggatccacaggaggggtcaagtctggattcgaaaggaaatgctcagctctgaggcctgagagacatgggaaccatggggttagggagcttagattcatagattatcaaggcccaaggagatcccaaggagcccagggcatcccttgaggtcacccagccttttattggcagtcccagagtctgatgcctacacaggaccactcatgtcccactgcactgcagagcatcttctctggtggcacccaaaacccaagcctcccaaccctaattcccagcctttggctctaggtgagatgtggccccaccaggcagctgcattatggctgtgtcgaccctagtcctggaggtgccaggaaggcttcttggttgggacggtgctgggccttccccagggaaccagggagctcagactctgagaggcccctgaggcccagcattgatggacccagccagactcagcacccacttctccattcaaattcctctggcaggagagaaggggatttcctggagagaagagggagaggaggctgtgaacaagtggggaacagccaggcttatcacagggcagagtgggggccctgtccasgatccttggctgctcagctgtctctccttggccacctggagctgccaagcattcttgaccccctgcagctgtccctagagcattccatgcctgagctcccagagccaagtgcccactcagctaatcctcagagacaccgtgttccttctcactgtcttgtcctcctccgccctgcatgccaccaaccaactgctgccacctgtttgctgctgaggagcctcagtcatggaccr

SEQ ID NO: 95190 - DNA, 63737 bp, Homo sapiens
  misc_feature (1)...(63737): n = A,T,C or G
ggctaattggagtagaactagtacaggagaatagtgactggagatggggctgttctacccaggatggtaatgaaaagaggtatacctaagatttgaagagaaggcagacttgagtaaatctaggggtaaagtgttccaagtgaaaatttggaggccctgtttttggaaggagcttggtatcttaaagggcaataagaaggccaatatggctctaatgataatgcagatgatattaagaggtaggcagacattaagaggtaggaagagctaaattgagggtggccttgtattctgaattttactcgggatggtagggatctgaacgttgatgcgatctgaattaggagctgtcaggtgacaggtgatggtagcttggataagggttgtagcagtggagacggtggttagtggtcagttaacaggatatgttttcaaggtagaacctataaagttgcttagggattggattttgaatgtgagggagggaagattgaaggatgactcataggatttgggggcagcttggatggaaggctatggtactcacatagggaaagaggagaagtggattgtggaggggaaatcaacagttctgttttagccatgttaagtttcacatgccaattggatatccaagaagaaatgtcaggcaattaaatgtgtgattctggagttctgagaagtctgtgctgtgagtggtgcaaacagatctttgcagcctttggattagatgagatcacttaagaagagtatgtatagaagagatgaggctgatgaatgagacctcagatacttccaaaacttagggttatagtacaggagaggagcatacaaagaaaacaatgagacaaaatatgataagtattggtgtcacggaaagccaagtttcaagagtttatcagaaggaaaggatagatagttgtgtcaaatgctgctgaaagttcaaataaaatagcaagtgaattagagtgggctaactgctacaataaatagataccaaaatgtctaatggctcagatacaatagtttttttttttttccctgcttcctgtaaaaagtattagagtggcagtgaaaagaccagtggtctggccctcccccctcgtagctatttagggacacaggtgaatgaaggctctaccaacttcaataggtggcttcaagatcacggaatcatctctaatatagccgactaaaagggaaaaagattttggaggatcatgagtgctagatttttatgtgccaggaatgggaacgtacacatctcatattccattggcttgaattcaatcacatagccattcccaacttccacggaggttgcaaaaaataagccatgcatacaggcaaaaaagaaatcagcttattgtgagtagctagtaagctccactacagatgtctttggcaggatgtaggtcatagtgactttggtaagaactatttcaatgaagtaataaggatgaagtccaagagaggactggatattggaaattgaactaatgaacaccaactttttctgtagttttgctataaggatgaacagaggaatggggtgaaactagaaggaaatgaaaagtaagtgagggtaataagaggcatgttactagtgcaaacaaacagaaggtatactattttatttattaccatggttatctaagtaggaaagaatatatagtatttttaatatttgaggaatggattcctatgttcacaaccactatggtatagatgctggtggctgatacagcaaggtgtgatatatgttgaacttggcaaaataagtggcacattatactttaggttttcaaatctagttgtcttcataatcttttaatgtagtaatcaagtcattaaactaggtttagcaaatgtcctcccatcaaaaaaacttagaacttcaaaataagtcagtccattttcttaatagaatggggaaatgtattcatagttgcatgttctataatatactgataatgaagaaccttttgtagtctaaagattttacggccctttcacttggtgactcaattgaggtgatgccaaaacctcatcagtcaggatctcatggggcccggggggactagtggtggacgggcaagaaaagggcccaagcacattgttttttggatgtcaagatatgtagaaaatgattgttgtggagagtaatttaagagatgattgctaatgtgaggaagaatgggtctactctaaactaaaatatataaaatcattgaaaaatatttctgggcaggctttaatttctaatccccctctagtctattatttttaagttgagatacaaattacataaaattcacctttttcagcatacagttcagtggtttttagtatattcacaaggttatataaccatcaccacttcctaattccagaacattttcatcaccccaaaaaggaacctcatacctaccagtagtcactttccattcccatctaaccacagcccctggtaaccactaatgtactttctgtttctatggatttgcctaggctggacactttatataacacgtgcctttttgtgtctggcttctttcccttggcatagtgttttcaagattcatccatcatgtatcagcacttccttttatggttgagtaatattccattaaattgaatacaccaaattttattcctccgctgatggacatttgggttttttctgtttttttggttattaataatgctgttgtgagcatttgtgtgtaagtttttatgtgaacatgtttttatttctcttataatacctggaagtggaattgctgggtcatatggtccttaatctatttcacatttatttcattgccattgccatctctcaagctgtcctctcttgacatctacctcatgcactcccatactgttttctttagatttttagaacattttcactttcttcactgattaatgtctttctcagcctcttccactatagtcctacttggtagttcatgttaatgaatttttcatactgtgacctcaagtttctttgaactcaatgacattttccactcaacttcagctacccaaggaacagccaaatactccaccctttagaactgatcatcctgtgccatttccaacatctggaatacacaaactgctttctctgataactttttcctcctatattgctcctttaaacttattattcatgcctatgatgacttccagaccctcagtgcctccgttttcagtttattagctaactgctgtcaaaatttatcttcctatttagcaggagcccatggcaagcaattttaatggtattttcttcagcatctttgattccttttttttttctcagtgatccttgttctgaaattccttaactcctttgtttaatctttttgcattaccagttctctaaaagaggcagcttatatatcatctattttctccattctttcctttggggttgcccaattctgggcaacagtgtcagttggttcactgtaaattcatggtacccaggctcaagtgagcacatttttactattttgtgttccttttatatcaaaatgacttcttaactattctaacgtatttctgctctcaaatccttaagcctctatctcaccattacctttttatgcaaaaataaagttcttttactgagatggcctgggcccacagtgtatgccctacacttttctcagttttttccattttctctaaacctcttcaagcctaaccccttctcatatattattacctactcttcagtacctctccttggtttttcattaattattcattttcttgcccctttaaggtctctccccactctttttccctataaatatttccctctttaaaaagaaaaaataggccgggtgcggtgggtcacgcctgtaatcccagcactttgggaggctgaggcgggcggatcaactgaggtcaggagttcgagaccagtctgaccaacatggcgaaaacctgcctctactaaaaaaagaaaaaaattagccaggcgtggtggtggggtcctgtaatcccagctacctgggaggctgagacaggagaatcgcttgaacccaggaagcagaggttgcagtgagccaagatcgtgctgctgcactccagcctgggcaacagagtgagactccgcctcagaagaaaagaaagaaaaaatagtaacacaatcctgtttctacataataccttctctattaacaatcctgtagatggccagaatgtgtaagtctttaataacctctgtcctctacaactggctttcaaactcagttcttactgaaattgtttttttttggtttgtttgttttctttttttcagtctcccaagtagctgggagtacaggcgttcacaaccatgcccagctaatttttgtattkttagtagagacagggtttcaccatgttggcctggctggtatcaaactcctgacctcaggtgatctgcccgccttggcctcccaaagtgctaggattacaggcatgagccaccgcatctggctgaaattgtttcctaaagcatcacttgttcgccaaatccagtattttcagtctttatcctttggttccctgtgagatataaatagattattgaagcttctaggcctcttgcatgaaggggccttaaaatgttatacggttgaatatgattataaagttgcaaaagtaaaatagttttgcgctcttgttcttaagcttcaggcccaacaaaactgaatctacccccatataaaagaagttcatcagattctcttatagcctatagaggtaccaaatgggacagggcttctcgcaacttggacacagctaaggacagagctaattgctacactaagagtcacatcttgaattgaccaaataattctattctttccataactaggcctcaggtctggttctcaatattacaggttcaggaactagattttaagcagtttgaccaaggtaattaaccactgggagattaatgcaaactaaccaaactcacaaaagactataaaaagaatgtctatttcttaatgtacaagaaggaatcaataccttaacattaatgattaataccttaatattgactagggtatatggtagacatttgtctatccaggacactctattccctaaatcaaagtagtttcgagaccaaaatgatcatgaacatttagttatcatgattgaaagtgttattttactggccttatggcctcctcgctgcctcagattctttgaaaatggggtaagctctgttcctgtgtgatttaagcctgtgcatgattctgacctaccagtcttgctcagtcgtggattgagctgcatttttgcatttaaggcaagttttatcgcaagccctaactccaccccatttggctgccatacgcgggtgttgtgcgtgtcctccagatccccagccatcccagcgctttcccattccactcatgccctctcttccccttcctccatctcagtgttttccctcactttcaatggccagactggccttcccaaggtccctcctaacgtcaggtctgtcatcacctaccttcttccaccttgcctcgcctactaatcatcacctcctaaactgtcaccgttatctcctacctggctcacactggccccaccgcccagaacagaaaggaagcatggaatcccggtcaggccgcgcctacgcgactcagggcgcccggcgcccgcccctgccccagcggcgatgctatgagggaaaccgtatcgcattttgcatagtcttcgcagtcctacataaccgccacctttacccttcgcgtgggcatcacaatcgcctcctcccgctggggaaggcagaaaggcgcctcctgacgagaaccaaggcgtgtggggacgcagggcctctgcgtgtcagggagcagaacctgggccgagccctaggtgaaggggcggggtggttggccctgagccaatcatggctcgtgacgactcggctcggccaatcagaagaagggaggcctggcgctctcggggcgggtgagaaaccgcccccccttgcagctccgcggccaacgccttcgcccaggggtagttggagcggtgcaggttcccaggctccaggtactgggcgccttacgagctgggaggtggtgcctctcacccagctaattgctctctagcccttggccttcacaggtgttggtgcctgccgtgaacgcattctgacctgggccgtatctgtctcccaagactttgtgcctatggttggggacagagtgaggtcgttgccttgacgacgacagcatgcggcccgtggtcctcctaagtgtgagcttgcggcggaccgaggcccacctgcctccctgcctgcttcgccctggactcgtgactgcgtccgcagaagaaatcacaacagcgctggaattgctagtttgctaggcagcatcttttggacctgcgaaccatatgcatttcacctcaaatttgtttccaagttgaaaacctttgggtctttctatgcgaacggattgaagaaacggtaagtatagtacgttttaaagcttctattatctcgttctttgatctataaaagatttcaatcttttttttttttttttytttgagacggagtttmactcttgttgcccaggctggagtgcaatggcatggtctcggctcaccgcaacctctgcctcctgggttcaagcgattatcctgcctcagcctcccaagtagctgggattacaggcatcaccaccacgcccggctaagtttgtatttttagtagagacagggtttctccatgttggttaggctggtctcgaactcgcaacctcaggtgatccgcccgcctcggcctcccaaagtgttgggattacaggcgtgagccaccgctcccggccctttaatctgtcttaaacaaaataaaaaattagcattctccaaatatttttatcaaaattgttgcttttagaaccatccagaaataacaccttgcccattggccaggtttctttttcgtttgtattacctttccgttcaagagtagaaggcatgagaagttatagtttatgagtaactgtttcaggaaacargaggctttgtaggctgtgatacttttaaagtatttgtggacagtgycacttgaaaaagcaggtgtgttcaatgtggtgtgtccagatatgcaattggttgggagaataaacttgaagcagtcaacttgcattaatgttagcttgggatatgcttcagaacacctcagacatgcttaaagtcattttttttggttcactttgtgctttcaaatattgaggacatcaattacaaaatgttttaaaataatccaggttatagattcaagctatttttgtcattggtatgataaacctaaagcctagtgcttaataaaacatactctcttaatggaagagaaaaaaattaagaagggatagaattatatggagattttttttttcaaatacaaacagtttattaaaaaatagttaatggaagtggaatagaaggtaaaatgtcaaatgcatggaaagttagtgtctgggacactgctctgtaaaaagtttgtagtagaatctactatgaaaactggtagtaaaataataatttaagtcgatgttcattggtattgttttcatttcccacccctcaagatcaatcttctggttctccacatatagctacattaaaaatatatatattataaaatctcaaactattatatgtcaagtgtggaaaacgtattgtatacattggattagcatagtttgctagaacaaagagaatatttgttttgtctttgcatcactgttccaatagagaaataggaaaaacagttcacgatctgagtaaattttagattgccgtaagtatacaattaatacaacaggcaagaattatttcttgttaaaatctatctgtatttggactgaaataattttttatctattattactgaaataatagatagttaaaatctatctgtatttggactgaaataatttttttctgtacgaaagcattttgtccaatgattgctggaccttcgtcaatcattggtaaaacaagaaagattctcttaggattgcctttattcagaaaatgtcatataatatgagtaaaaaatttcaaggccgggcgcggtggctcacgcctgtaatcccagaactttcggaggccgaggcgggcagatcacgaggtcaggagatcgatacaatcctggctaacacggtgaaaccccgtctctactaaaaatacaaaaagttagctgggcgtggtggcaggcgcctgtagtcccagctactcgagaggttgaggcaggagaatggcgtggacccgggaggcggagtttgcagtgagccaagatcgcgccactgcactccagcstgggcgacagagcaagactcygtctcaaaaaaaaaaaaaaaatttcaaacacaaattcaaattatacttatagtgagtaatcattaacagggtttttgaaatacttttactgtacttggtactactaatatttaatttaatttaataattacattaaatttaataaaatttaatttaattttaaaaatctgcttatataccgatgtcattactcttattttctaagttcaatatagtaacagtaacatggcgaaaccccgtctctactaaaagtacaaaaattagctgggcgtggtagcggtgcctgtaaccctagctactggggaggcagaaacagggaatcgcttgaacctgggaggcagaggttgcagtgagccgagatcgcgccagtgcacgagactccgtttcaaaaaaaaaaaaaaaaaaaagaaaaaaaaagtaaagaaaaatattttatgaaagatgctctgtgttaatttgttatgtgatcaaatattttttccaattaagtggaaggtgcataagtatttccaacattgatctaaatccagtgtaacaaaaaagttgatctttattaaaactaaattcaggccgggcgctctggctcacgcctgcaatcccagcactttgggaggccaaggtgggtggatcacttgaggtcaggagtttgagatcagcctgggcaacatggcaaaaccccatctctatgaaaatacaaaacttacccgggtgtggtggctcacgcctataatcccagctactcagaggcggaggcaggagaattgcttgaacccaggaggtggaggttgccgtgagcctaaatctcaccactgcactccagcctgggcaacagagcaagactccgtcccaaacaaacaaacaaacaaacaaacaaaatcccccaccaaattcagttatacatctttgagtgaaaaggaattgtgcttttttttttttgagacagagtctcactctgtcacccaggctggagtgcaatagtgctatcttggctcactgcaacctccgcctcctgggttcaagggattctcctgccttagcctcccgagtagctgggactataggggtgcaccaccatgcctggctaatttttgtattttagtagagacagggtttcaccatgttggccaggctggtctcaaactcctgacctcaggtgatctgcccgcctccgccttctaaagtgctgggattacaggtgtgagccactgcacctggcctgtgcattttgtttatttgttttgttttgtttttgagacagattcttgctccgttgctcaggctggtgtgcagtgccatcacagctcactgcagcctcaacctcctgggctcaagcaattctcctgcctcagcctsccaagtagctgggaccacaggcatacaccaccacacccagctaatttaaaaatgtcttttgtagagacagagtctcagtatgttgcccaggctggaattgtgcttttttttttttttttgagatggagtctcactctgttgcccaggctggagtgcagtggtgtgatctygrctcactgcaagctccgcctcccgggttcacgccattctcctgcctcagcctcccgagtagctgggactacaggcgcctgccaccaagtccggctaatttttctgtatttttagtagagacggggtttcaccgtgttagccaggatrgtctcaatctcccgaccttgtgatccgcccaccttggcctcccaaagtgttgggattacaggcgtgagccactgcgcccggtctggaattgtgctttttaaagtgagttgtaattgttatgtgtgatagctcaagtattgctttattggaattaaaaatatatggaatttcattaacatgacatttagtaatttaaagttaatggcttcaattccatttgcgttgtctattatgaaatgtgtgtgaccattttgaaaacatagcttaatgtgtgtgaccattttgaaacatagcttacatgtagaaacactaggaaattgtgaattaatacaggacagccatgaacacagtgactaatatggaaaacaagcagggaagaattaatttgctgggaaggcggaggaaattaacgtactcaactttgttaaatctatgttttggttttcacagcaaaaagtttctacggactttaaattaaaatggaaaaatatgaaaacctgggtttggttggagaagggagttatggaatggtgatgaagtgtaggaataaagatactggaagaattgtggccataaagaagttcttagaaagtgacgatgacaaaatggttaaaaagattgcaatgcgagaaatcaagttactaaaggtgagtaaatgcatatattgaatcaaaaaatatgagtataagtttcttttttggcaataagaagaaatacaatgattagatatgcaaattcatttatctggtgaatgtaaacctgattttaaaagtgtttgttccttctctctrtatctttctgtgtatttatcaatcatctatctatagtctgtgttaggagtcccaaagaccaccccagatttgatgacttgttaggaggaatagcattaatttttgttctttattatttcattttttctacttatttgtatgggtttattttgcagcccttttycctaatttgttgagatagatgcttctctaatttccagacttttttcccctcaaatatgcatttaaggatatacattttcctgtaggaacagcttggtatgtatcctggaaattttgattgttaacaatattttctcatttctcttatatttttcttaatccctgagttatttaaaagtatatttctgtatttccaatcatggacattttctaggttattctttcctggttatttatttgtgagacaactgccctatgttctgagtatacaccatataagaatttatttctttgaaatttcttgatatttgctttttgttcagaatatagtcaactaaaaaaaaccctcttgttcttgaaacgtatttcatatatgttcatgttaattgtgttgttcaaatcttccaaattcttatttattttccttacatgcttgttttatccaacactgagaagaaatatgttaaagtcttcctttgtgattattgatttttctacttttcattgtagttcagttaatgtttatttttataaacagaaacagtattattagtgtgttatatttagaattattatatcttgctgttgagttaaatcttttgttattatgcaataaccctttttattatagtaatattttgtttcgttggttttttttgagacggagtctcactctgttaccaggctggagtgcaatggtgctatctcagttcactacaacctcctcctcccgggttcaagtgatgcccctgcctcagcctcccaagcagctgggactacaggtgtgcatcaccatgcctggataatttttttttttttttgtattttagtagagacggagttgcaccatgttgattgggatggtctcgatctcctgacctcrtgawccgcccrcctcagcctcccaaagtgctgggattacaggtgtgagccaccacacccggtcgtttcattttgtttttttgagacagggtcttgctctgtcctccaggctggagtgcagtggcatgatcatggctcactgcagccttgaactcctgggctcaagcaatcctacacctcagtctcccaagtagctgggattgcaggtgtgtgccgctatgcctggctaatttttttattttcagtagagataaggtctcactgtgttgctcaggctggtctctaactcctgagctaaagtaatcctcctacctcggcctttcaaagtgttcagattataggtgtgagccaccacacctggccagtattttgttttaagatctaatttatttgaaattaataagagtacatgcattagcttaattttggttagcgtttccatagtaaatcttttccatatttttacttctaatttttctgaattcttttttttttttttttgagatggagtttcacacttgtcatctaggctggagtgcagtggcgtaatcttggctcactgcaacctctgcctcctgggttcaagcaattctgcctcagcctcctgagtagctggtactataggcgcccgccaccacgcctggctaatttttgtatttttagtagggatggggtttcaccatgttggccaggctggtctcaaactcctgacctcaggttatccgcctgcctcagccttccaaagtgctgagattacaggtgtaagccacygcgcctggccccctaatttttctgaattcttgtttagatgtatctcttgtgaaaaccgtatagttatattttgcttttttcctgtttgataatatttcccttttaattggagcatttattccatttacttgtaatataatatctgatgtattttgaatatatatatctaccaccttaatatgtgctatttgtattaccagttctctatttctttgtcttttgttacttggattgattacatttatcattcctttttttctaataacttggaaattttacattgtgtttctgtcttttagtggttacactagggatttgttaaagtctaattatctaatacttgttcttgatcttaataatggtgtttgacacagtcaaatcttatgacttttcccttatggctatccagttgtcccagaaacatttattgaaaataccatctttttccccactgttctgaatattccttttgccacacgttctcctatataggtaagattttattctgtcccattggtctatttgtttaagcttgcgccagtagcccacaatcatgtttattctagttagtaggtttttttttgagacagggttttgctgtatcacccgggctgcagtgcagtggcatgatcttgactcattgcaatctctgcctcccaggctcaagtgattctcccacttcagccttctgagtagctgggcctacaggcgtgtgccaccatgcttagctaatatttgtatttttttgggtaaagatagggtttttccatgttgcccaggctagtcttgagctgcttggctcaagcaatccgccctcctcagccttccaaagtgctgggattacaggtgtgagccactgcagctggcctagtttgtaagtttttatatctggtagaataaatccttctgttttgtccttcttctataagaccatcttccctatttttgtctgtttgcatttccatataaattttagaatcaatttaccaatgttcataaacactctaggaatttattgaatttatacaatcaatttgtggagaattgatgtgtttacaatattgcatccagttcatgaacattgtataatccttttgtttcttggtcttcttgtctggtttttttttttttttttttttttttttttgatggagtcttgctctgtcacccaggctggagtacaggggtgcaatctcgtctcgctgcaacttctacccgctgggttcaagcaattctcctgcctcagcctcccaagtagctgggattacaggtgcccgccaccacacctggctaatttttgtattttagtagagacggggtttcaccatgtcggccaggctggtctcaaactcctgacctcgtgatccagccactttggcttcccaaagtgttgggattacaggcatgagccaccaggcctggccagtcttcttgtcttaacatacacttcgtcattagtatgtttgcacttttgatcattatttatatgatatatactttttaatcctttctcctattaaccttctgtgtcgttagatgtaaagtatatctcttataagcagatacagttatttcttttgtttattcagtctgacaatctttgtattttacttggagtgtttggtctatttatatttaatataaaacttacatatttggatttatacttctcttcctagttgccttccatatatctaggttttttctttttaaaaattattttgttaaacattcttttgctggtgttttagagattgttctagatattttaatatacaaacttgacttattgatactcaaacaggtacttttacatgcaaaaatcttagaaattttaacttcagttaccccctcctttctcccctccacccatcagatatatgtgttattgctgctatgtaacattgttaaattctgtgtatagttaaatcccttttaaaattgttcacagtcagcagttattaggatatacctaatattaccctttctattactctttaattttccctacatttctgagtttccatctggggtcaatttccttatgcttaaagcacttcctttattttccttaaagcaaatctgatgataagaaattctattcatttttgttagtgtaaaaaaaagtatgtattctactttgtgtttaaaatactatttcaagctcggtgcgatagcgtgggcctatagtctttgctattcaggaggctgaggtgggaggatcacttgagcccaggagtttgagactgtggtgtgcyatgatcatgcctgtgaatagccactgcactccagcctgggcactgtagtgagatctcatcgcttcaaaaaaaaagaaaaaaaggccgttttctcaggatatagcattcagggttgtcagttaattacattcagtatgttcaagatagaatcctactgttctgggctccgttgcttgtattgaaaaaatcagacatcagtcttactgtgttccttaataaccattttcttctagatacttttaaggttttctctttggttttcakgagtttacaataatatgcctaggtgtgggttttttttttttttgtctgttaattttatggctcttgcttctatcaaataatgtcatttgtcattttaaaaaaatgctgggcatggtggctcatgtctgttaatctcagcactttgggaggccaaggtgggcggatcacttgaggtcaggggttcgagaccagcctggccaacgtggtgaaaccctgtccttactaaaaatacaaaaattagctgggcatgttggtgcgcgcctatagtcccagctactcaggaggctgaggcaggagaatctcttgaacctcgcaggcagaggttgaagtaaaccaagatcatgccactgcactccagccttggcaacagagtaagactccatctcaaaaaaaaaaaaaatgctcagctataattgttgcttcacatactgctactgtcccatttaagaattcagcttcatatactaagattcatatcagctactactgatagcttgaggacttttagggctaacccaaatgaaaggatttcaccagcactgtactccttcttttcaccttcacggcccctgaacgtcaatcactgctaccttaggcctgcaaaatggtgaaaagtgctactgatcctcttagtcttccctctaaagtggcatatgtttcttgggttaaaaaaaatttggccctaattgcctggctcacttttctgggtttctgtcttcctagcccaggtattttttactatattatctttttcgttcctccaagtagttatgttatatattttgtccagcttttctacttgtattcagttggagaattgttacaaattaccaagtctactgttactgtgaacaaaagtaattatacttttctatcctagaatttttatttgggtccacatctgttatgttacttttcatggttttaagttccctccattttttgaggttggctttcttttttaaagagtagtagtccatatctgataattacaatatctgaagtcattctgtatctgtttcaatcgccgatatgttctggtatttcttacttatggtgtcttatttcattgtgtgcctgcttatcttcaattttgtgctgaaccttatctttgaaatactattattatcattattattattttttagacagggtcttgctctgtcacccaggctggagtgcagtggtgcaattatggctcacttcagcctcaatcttccagattcaagcagtcctcctgcctcagcttcctaagtagctttgaagcttggactacaggcatgtgccaccatgcccagctaatttttttaattttttgtggagacagggtctcagaatgttgcccagactagtctcaaactactgagctcaagcaatttttctgcctcaacctacccaaatgctagaatcataggcgggagccaccacgcctgtcctgaaagattactttttaaaaataatttgaggctaaggtaaaaatatttttctccacagacaatttttatttcattcttccatgttcatgggcactgtgccagtaatcaatttattgtctctcaactccaaatcactccttttttttacctactttgtgatattagaactggactctgtaaacatttcttttttattgcccgctgatttgattttaggttttgtcaacagatagagggcatggaaagacattgtcggtccttagcaagaggaagagacttttcttccagcttctggtgtgctttttttttttttttttttttttttatacagctgtgagcccatcaccatgtgggaggtctgttagctcacttcagcatctttcaagtaccagttctggcctacctgcacattctggtgagtttctctaccaactgctggccactctacaaaccatctctggcctgtgtgctctggtgaattttttcactattggcaatctttagatttttgtggctgctgggccatttccaatgaggactatgtgtctggtggttattgggggctcttctacatttttagttccttcttgtccctatgtattttccttcagccctaaaagtggggcttcctgtatttgctagtttaaacatatcccttacagtcttcttttaccccctttagtaattaactacccttcataatgaaaaatatttacattaaaattttcccagttctggtttctgtctgatacaagcacactaccagctcaggacctccttagtaagttcaaagttcttgcttatagtctctttttatcttgtgtttctcattatcctttagaattgaatgttgtttttgaaattttatttgtagaaatattttgaggctaaggtagggttttctttgtccagaggtgatattcatttgcttctgacaggtacatggagatgctcccagtccagtatgtgaatccatgttcaaggcttttagttccttgaacgtgatgttaaattaagtctagtgatgcctcgtttatttctgttcattttcactctggaggatgtagttttttgggtcctagctttaattggaggtggtttctcagatatcccacctttagaaggcttttggactttggcttttcccttttagccctggggagccacaaaaatcaaagctcatttccacacttgttacttgatgtcaaaattagctttgagtcccgaggttaactctctggattctcatgttcttgattttagcccagtaatcctcactgtcgttttagccttttatatgtttaagaagattttttgaaaattaatccaacttttaaagaattttcaatggctgggcgcggcaactcacgcttgtaatcccagcactttgggaggccaaggcgggcggatcacctaaggttgggagttccagaccagcctgaccaacacggagaaaccccgtctctactaaaaatacaaaattagctgggcatggtggcgcatgtctgtaatcccagctattcgggaggctgaggcaggagaattgcttgaacctggcaggcggaggaggttgcgataacccgagatcgcgccattgcactccagcctgggcaacaagagcgaaactccgtctcaaaaaaaaaaaaaaaaaaaaaaaaaaaaagaattttcaattggaggcctggtctgagttactcagtctgccattaccaaagaaggtaaccatctgccattaaaaatataagcacaaagacagagaacctgtggagctgatagtctgtgctttttttttttttttttttgagacagagtctcgttctgttgcccaggttggagtgcagtggcacgatctcggctcactgcaacctccgcctcctgggttcaagcgattmtcatgcctcagcctcctgagtagctgggactacaggcacctgccaccacgcctggctaatttttgtattttcagtagagacagggattcaccattttggccaggctgatcttgaactcctgacctcgtgatccgtccgccttggcatcccaaagtgctgggattacaggcatgagccaccatgcccggccgatagtctgttttaattatgattgcaggtttggagctactgtggaaatctttgcaagaaggacttgacatagagtagagaaagataaattatctggtgctatagtgtgaatttttaaagagtaaaaagttttagtgtaatgttttcttctattagaaatgtgccaaaacagcccaatggaacaagtgacattctagtattatttagatttcttaatttgataaaatagaacttgtcagaatttatagttccattargatatgaaatttgtgggttttggggcatttttgttggtttgtttagtttttttggtttttttgagaaggtgttttaatcatgcctctaccagttattgctgtgtgaccttggacaagttccttgacctctgtgtgagttagttgcttcagctataaagcaggataataattgtacctatttcataaggcttttgtgcttagaatagtacctggaacatagtaagcattgtgtaagtattagttattattatgtataatatcatactcttttataacttttatttttttcttggcaacgcttcttttacattgtaaaatgtctgttttaagggaaggcagggtagaagtttgtgtttttttttaacttttaagttcaggggtacatgtgcaggatgtacaggtttgttacataggtaaacatgtgtcatggggtttgatgacttggagctctttccaaatggactagactaccaastagttcaaaagtacttgtttcagattattaataatggaattggattttgtcgcagtcacgatgtaagtcttgggtttaaacaattatttgtcagtcatttttcctggtcctctcccttctcccaccctttgccctccggtaggccccagtgtgtgttgttcccctctatgtgcactcatcatttagctcccacttataagtgacaacatgtggtatttggttttctgttcctattagtttgctgaggataatggcttctagctccatccatgtccctgcaaaggacatgatctcattcttttttatggctgcataatattctatgatgtataactctttaaaaaacatttttctatatgatttttgaattcctttttttttttttttttggagatggagtcttgctctgtcacccaggctggagtgcagtggtgcaatcttagctcactgcaacttccgcctcctgggttcaagcgattctcctgcctcagcctccttagaaactgggattacttcattgatattacttcattacttcatggtggtggccaggcatgccaccacgcctgggtaatttttttgtatttttggtagagatggggttttgccatgttggccaggttggtcttgaactcctgacctcaggtgatccacctgcctcagcctcccaaagtgctgggattacaggtgtgagccactgtgcccggcccctgaattccttatattatttttatatttatattggatatgtttccttggtaatcttttttcattttttaattttttaagagagtctcactctgccccacccaggctggaatgcagtggcatgatcatagcttattgcagcctacaattcctggcctcaagctatccctccacttcagcctcccaaagcgctgggattacaggcataagctaccatgcctagccatattgcttaccttgataactatagtgttaaataacatagttacttctttgtaaattaattattctatttctatttcattttctctcccactcacctaccatctgattttagaaaatatcttatttactttagtgttttgttttttcattttgtttcaagataaggtcttgctctgttgctcgagctgaagtgcagtggcatgatcatggctcaccacactcattgcagcctccaactcgtgggcttaagtgattctcccacattaacctcccaagtagctgggactagaggtgtgcccaaccacaccaggctaatttttaaaattttttgtagagatggggtctcaccatgcccaggctggtctcaaattcctggcctcaagtgattctcttgctttgtcctcccaagtcactgggattacaggtgtgagccactgcacctggtgtatatatacacttttatcttgtttacatcttctatatcatttgtgcattgttgcatttaaaatgttcactttctgtttcataaccatgatgcccacatttgtataagatttagtcctgccttaaatggattcaatgctcatgttgtttttacttgaatgctcattcatgcttttacttgaatgacagtttggttgggtataaagttcctggatcatacttggattttcttgaggattttgagagctgtattctgcattccattggtttctttccctttaaaggtggcaacatttttttctggtgagtgttaatctaccatttatgtttctttctcctttcttccccatttcttacatctttgaatagatccttgattggttcctttttgattgtttcttataataaagtctgagtctttggaggactatttgtaggaggttctggggagaggccatgactttgttccaggctagcaggaatttaccataattcacaatggtgttccttatcacatatgcctcagtgtgggatttaattctattaggtttaatttctctaaaacttgcagttgcaggcttgttcataatgaattgttttgccttctacactgcctcactgagagattgtttccagcaaatgtgtttctgtgtgattccttatccagcccttccccaatgctgtttcttggtgccattcagttctagggatgttttcactgctgtctatgagccttatttcatatatatatagtgtatatatatatatgaatatacatatatatatatactatatatatgtatacatagttttccattatattaaaggaggacttttttgtcttttcagggtatgtcactggcttcagagaactcttacgcttccagctttgtagccacagatgatcttttggtgccttcctatactcctgtttgaccktgattagatttagtagtcccatctcatttgttgtgagtagggggtcatagatccctcttagttttagcaaagatggagttacacttatttttcttattagctttattttgttctctgagaggagaaaggagcaatatagtctctcaattgtagtttaaaaaccagaatatgcttttacaatttacactatgtatgcattttatttatatatttttcttacgctgagatctattttaaataattaattgctaataatttgatcttagtttatataaactattttgcatttttaaataacagctattttgcattttttaataacagcaacttaggcatgaaaacttggtgaatctcttggaagtgtgtaagaaaaaaaaacgatggtmcctagtctttgaatttgttgaccacacaattcttgatgacttggagctctttccaaatggactagactaccaagtagttcaaaagtatttgtttcagattattaatggaattggattttgtcacagtcacaatgtaagtattgggtttaaataatttgctttatcacatatttattcattaatcctttaatctgtcttattgatttatgcatttgaaaataagttgcagacatcagtatactttaacactaaatacttcatctgtgcatctattaattggagttaaatatttgttttctgagttttttgtttgtttgttttgtttttttccgagacagagtctcgctctttcgcccaggctggagtgcagtggcaagatctcagctcactgcaacctctgccccccaggttcaagtgattctcttgcctcagcctcctgagtagctgggattacaggcatgcaccactacgcctggctaatttttgtattcttagtagagatggggtttcaccatgttggccaggctggtctcaaaactcctgacctcaggtgatctgcctgccttggcctcccaaagtgctgggattacagccatgagccaccgtgcctggctctattttctgttcttttttaaggtaatatttactaagcgaaatgcacaaattttaagtgatgaattttgagaaatgtatagacccaagggtctgtgtatttgttagtttgtgttctcttgcctaattacaaagtgtgaatgtttgaaaatttctacccttaccctgtagtctatcacaataattttatatactttgagtatcatataaaagcacttacaagaagaatgatacctataaagtataaatgaatagctcaacacatagattttgccagttttacaaaatattttaaatgacattctttgtgtgattataagagtaataaatattaatggtagaaaaatttaaaactaaagataattataaaagaaagaaaaaatcattttacatacctgccacctaaattgatatatttcttttcggttattattattattcactgtctctaattttttaactgtcttttattgtgtagttttgttatgttactgagttatagtgtgaagtttacatacataaaaaaattgctcagtagaggcagatacctagtttccactgggaaaaacactgcccttttttaggaggccttccatagtggcctcctggcaactttttaatgatccaggctcagaaaatctattttttttttttttttgaaacggagtctccctctatcgcccaggctggagtgcagtggcgcgatctcggctcacggcaagctccgcctcccaggctcacgccattctccggcctcagcctccggagtagctgggactacaggcgcccgccaccacgcccggagaatttttttatatttttagtagagacggggtttcaccttgttagccaggatgatctcgatcttctgacctcgtgatccgcctgccttggcctcccaaagtactgggattacaggcgtgagccaccgctcccggcccagaaaatctattttgagaaacctaattttgagactatctgtctcttagggcagactcatattgaccaaactcaggagactgaatgccagtttagtaaattgcaaagagagataattgttacggggtgaaatatatatagtagaataacaataatgttggatttgcaggaaatcagatcagcatgaggtgttagtgaatcaaatacttaatgtatcagtttaaaagatactgattcatccttcttcataaaaatgatgatatcttcccaatgggcctgtaatatttggagttaggtggctgaatgccctacattcannnnnnnnnnnnnnnnnnnntacattcatctctgtactaaggataggcttgccagtggaaccagtaagcaaaaagaaccattgtctctctcacattagaagcgcatttgaatgtgtcctgcctacattgcttctgtgtccctttatttttatactttcatgatgaatcaacccatgtttaatataacacattctacctttagatgtacagatacatccaggcagtttagagtcaagtactgctggcatgagtgccattctgtgtttaaggaaagagattttaggcctggtgtggtggctcatgcatgtaatcctagcactttgtggggccgacgtggtctgatcacttgaggtcaggagttcgaagccagcctggccaacgtggtgaaaccccatctctactaaaaatataaaaaaattagccgggcatggtggcaggcacctgtaatcccagctgcttgggaagctgaggcaagagaattgcttggacccaggaggcggaggttgcagtgagctgagatcgtgccactgccctccagcctgggcaacatggcgagactctgtctcaaaaacaaaaaaaaagattttaaaatctagtgtttctccaggcacagtggctcacgcctgtaattccagcaatttgggaggccgaggcgggtggatcacctgaggtcgggagtttgagaccagcctggccaacatggtgaaaccccgtctctactaaaaatacaaaattagctgggcgtggtggcacatgcctgtaatcccagctactcggaaggctgaggcaggagaattgcttgaacctgggaggcagaggttgcggtaagctgagattgtgccattgcactccagcctgggcaacaagaacgaaactccatctcaaaaaaaaaaaaaaaaaaggtggttccctgctaagcttcagaacatttacatatctctttaaactatagaaaatgtgaatttttatgggtggagaactgatctcactctaacttatgaacacttgtctcaagggagcattagtgttattagtgttgcctggcatactactttttttccagtccatttactcttttttttttttttttttttttgagacagaatctcactctgtcacccatgctagagtgcagtggcacgatcttggctcactgcaacctctgcctcctgggttcaagcggttctcctgcctcagcctctcaagtagctgggattaccggtgtgcaccaccatgcctggctaatttttgtatttttagtagagatggggtttcgccatgttggccaggctggtcttgaacttttggcctcaagtgatcggcccacctcggcctcccaaagtgctgggattacaggcgtgtgccactgtgcccagcctccatttactcttaaactcttctagattgtgatttcttaccctctttcttctcaaaccctagtaccttttctccaatccttactcccagcccctagttaaatggagataataatagcacctatccttagggttattatgagaataaaataagttaaaacatgaaaaacatttagaatagtgcctgacacataagtattcaagtgtcagctattattaccattattattaaaggtatattttaaggttttgttttctgggcagttaacatttctctttttaatgtagacagataataacggtagtggctggaataaaacacacagatatatacatacatacatacatatatataaacacatatatgtacacataaggatgagatgcttgactttaagaaaatgagaacatttattctcaaatatattattcatttttaaatgtatctatatatgtgagcacttgaattttttaaaatataaatatgattttaatcctttatgagccagactgaataacatatttaaaaacaaatttaagattgctgcccattgaagtttgacccaaatagtacagaacattatgaggtttgtagaaccctaaacgactttttttactgaaattactaggtatcataatttatttaggttatatctagtattaaagacccatgtcagagcctacccttttcatagtactttctctggccaccccagtctgcaatgatggattttaggaaaaattcaactcatatcatcttggttatacttagaatctattgtgttacttaagttataaggtattagagttgggaagaaacatggtgatcatgcactttagccctctcatttgtgggccgagaggatagacttagaaagattgagttgtctatggctgtactgaaaaccagggactagacccaggtctcccgactcccagtttagctctttctttttttctttttctttttttttttgagatggaggctcgctctgtcgcccaggatggagtgcagtggctcgatttcggctcactgcaagctccgcctcccaggttcacgccattctccctgcctcagcctcccgagtagctgggactacaggcgcctgccaccacgcctggctaattttttgtatttttggtagagacggggtttcactatattagccaggatgtctcgatctcctgacctcgtgatccacccgcctcggtctcccaaagtgctgggattacaggtgtgagccacygcacccggccccagtttagctctttctacyacagcacaggtggtctgagactggacctgtgtcctcatcactgatatctagggtaatawagttggtagcctatacaacgtgctcagcaatggcagattgccgtttaggatgctggtcttctgaaagagttaaaacaaatctatcttttttagttttcaaaatacaatttgcttatattagagaattaggcctaataatgtcttttgcctagctgtagatttttaaatatatatatattatatatataatatatcatatatgatatatatctatataatattttttatatatatwttttttgagatggagtctctgtcgcccaggctggagtgcaatggcgcaatctcggctcactgcaaccttccccctcctaggttcaagagattctcctgcctgagcctcccaagtagctgggattacaggtgcctgccatagtgcctggctaatttttgtattttgactagggacggggtttcaccatgttggccaggctggtctcaaactcctgacctcatgatccacccacctcaacctcccaaagtgctgggattacaggcgtgagccaccgcacctggccagatttttaaatattatctgaatatcarcatcctgttttattcttacaaagtctctcctttagaaattttaatcactaatgtttttgtttactctttacatttctaattgcctgatgaatgtctatacttgggtgctcagcattccacccaaaagtccaatgattaaaactaaactaattattccattaaaactaactttctctaggcttttctaattttgaaaatgaaaccaccattcttttaaattctcaggttcaaacaaaatatctacaaaatatctaygactcttctaaattctatttctttcttttcttttttttttttttcttgagatggagtctcgctctgttgcccaggctggaatacagtggtgcgatcttggctcactgcaacctccacctcctgggtacaagcaattctcctgcctcaaccactcaagtagctgggattacaagcgcgtgccagcacgcccagctacttttttgtattttagtaaagacaaggtttcaccaagttggccaggctggtcttgaactcctgacctcaagtgatctgcctgcctcggcctcccaaagtgctgggattacaggcttgagccactgcgtgcggcctattgatttttgatttattgtatttctaaactgcatttcctccttcccattcctctgagcaccaacctaggttaggcctttatcacctcatactggtcccactgctcttcttcctgcctctcgtctttctctctgatttagctcatttatggccaacatcaattttaaacaccacattgtctatcacttccatgggttcccagggtcttgccacacttcctagtatgtcagctgagatattccgcctccacttcacacaacctatactctaaaaaaaacagttttctggccaggcgtggtggctcacgcctgtaatcccagcactttgggaggccgaggcaggtggatcacctgaggtcaggagtttgagaccatcctggccaacatggtgaaaccccgtctctactaaaagtacaaaaattagttgggcatggtggcaggcgcctgtaatctcagctactcgggaggctgagacagtagaatcgcttgaacccaggaggcggaggttgcagtgagccgaaatcgcgccattgcactccagcctgggcgacaagagcaagacgatgcctaaaaaaaaaaaaaaaaaaaaggtttttggcccgggcgcggtggctcacgcctgtaatctcagcacttcgggaggccgaggcgggcagatcacgaggaggtcaggagatcgagaccatcctggctaacacggtgaaacgccgtctgtactaaaaatacaaaaaattagccgggcgtggtggcaggcgccagtagtcccacctactcgggaggctgaggcaggagaatggcgtgaacccgggaggtggagcttgcagtgagccgagatcgcgccactgcactccatcctgggtgacagagmgagactccgtctcaaaaaaaaatttttttttccccacaatctcttatctatccccatttccattcttgctctccttgttacattcacttgggctgcccttctttctctttatttatctaggtcatacttagtattaaagacctatgttagagcccacccctttcataaaaatttcccctgactgcctcagcttcaatgatagctttactctcttagtcttgagagcagtacattaactgaacagttgatttagtaatttgaaaaaatatattttatccaatgtttttgattgtttaaataaaatttcaagtatagatgttctttcttgcccaactaggtcctaggttgttgagggctaggagcaactttctatgcttttgtttgtattctttatagggacaacatacaatgccctgcacatagcaggtgccccaaaataattaattttatttaacatccgtcacactctgcttcttgtctagatcatacacagagatataaagccagagaatatattagtctcccagtctggcgttgtcaagctatgcgattttggatttgcgcgaacattggcagctcctggggaggtttatactgattatgtggcaacccgatggtacagagctccagaactattggttggtgatgtcaagtatggcaagtaagacatcagtaatggggaggagtagatttttactcttgcttcttgctatagtggaatatgtttatgatatagtaaatgatccctctaatactgaaaggaaggcttgagtttcagggactatataaagtaaattgtaatcatttttggtgcttcccctttaaacattcctgtgaaacaagtatacttattttagaggtggggaaattaagtggtctattttatacagtgggttggaaatagatatatttatcacttgtaaagagaggtgaacattgattggttaaatgtgacattgttggaatggggaagatggagtaagcaagggtggaggcagaaatataattaagtaaaatgtttttaaaacataaattttcttcacaagggaattcttcaaagaagaaagggttgtaacttttactgcttttgattgaaatctttctaaaatattttctacaagttctgttgtcagagcacactaaacattatttattattttcttgattactgagttcttattttgctaccatgttataatttttgtgccattttataattcagcaataaccttaagcattttaaggtagttgttcctatgccaaatgatgcttgcatattctttgagttcttgtaactgatttttaagatagtttcaaaatttttatccctaggctgggtgcagcggctcatgcctgtaatcccagcactttgggaggcccaggcgggaggatcatgaggtcaggagttcaagaccagcctgaccaacatggtgaaaccccatctctactaaaaatacaaaaattagccaggcatggtggcatgcacctgtaatcccagctacttgggaggctggggcaggagaatcacttgaacctgggaggcagaggttgcagtgagctgagattacgcgactgcactccagcctgggcgacagagtgagattctgtctcaaaaaaaaaaaaaaaattatccctatcatccctcagttctcttcattgttactgtatttatccttagcagccacctcctctttctggtatgctgttttcagtgtatgatggcatagcatagattggtcaagcttgctagagttatgcgtaaacaaagaatgaataggctctaaatggagcctgagagttttatttccagaataaagtatacataataactgttttggcttttcagaaggcatttcccttttatgtcacatgattgaagtttctggaaagctcacttatgtaaaattgggagttagaattttaatagggaaaaatcatttcatgggtaatttaaggcttactataggttgagtattccttatcctaaatgcttgggaccagaagtgttgcagatttcagatgggtttttttttttttttggattttgggatatttgcattataccattggagcatgccaaatctgagaatctgaaatctgaaatgctctggttggcatttcctttgagcatcacctcagtgctcaaaaagctttgggttttggagcatattaggatgccagattttacaccacattgcttttctttcagggctgttgatgtgtgggccattggttgtctggtaactgaaatgttcatgggggaacccctatttcctggagattctgatattgatcagctatatcatattatgatgtgtttaggtaaggttacacatctgcattttaaattttagagatttttctgcatatttgtttgtgcctgtgtgtttgtgattttttaagctgttgcattaaagattatatatgttttaagtgaaggtagggagcatataggaaaactctgtgtgtgtgtgtgtgtgtgtgtgttttgagatggagtttcgctctccttgcccaggctagagtgcaatggcgcaatctcggctcactgcaacctctgcctcctgggttcaagcgattctcctgcctcagcctcccgagtagctgggattacaggcatgtgccaccatgcccagctaatttcgtatttttagtagagatggcgtttctccatgttggtcagtctggactcgaactcctgacttcaggtgatctgcccaccttggcctcccaaagtgctaggattacaggcgtgagccaccgcgcccagccacgtgtgtgttttaatttattttttccttcagtctggcattggtctatctgatgcatgttcttttttattttttgagacggagtctcgttctgtcaccaggctggggtgcagtggcaatcttggctcactgcaacctccgactcccaggttcaagcgattctcctgcctcggcctcccaaaatgctgggattgcaggcgtgagccactgtggcccgccctggtgcatgttcttaatcacgctcacatcccctttcccctcaagagagaggaaaagagcagaggttgtgcatttctctgtacttttacataccgttaattacatgtagagaggatgcaatgatcatttattattsttgagtcagtaagcatttggtgtaatgtgactactgtccttactttcacattcaagaggagagacacagagatttccaaggttgatttaatcttggcacagatttggacttctgctattagtgcttttgacagaatttcaaagctggactatcaaaatcttacgtttgttgaaatatcaacttcatgtttgaagatggagcttagaaatggaaataatgggaaaatacttgggggtaatttaactatttgatttgaagttttcagattagaaattaaataagcagtacaatagtttcttacagtggaattttcagatatattctacattcaactagatattaaagttgagaaaaaagattaaagtgctcaaatctgactttaagataagcacaaaatcagttgaccaaatattaaattcttaaaggggagaactgatttatctagattagatcctgtccatatgactattaatatatttgttgttttattcagcactttatgctttctagttagaaacgaagtgctggtacttatatctggaaagttataaaatattttttacctgtccttttcctatgctccttaagactgccatataccaccacagtaacggcattgtctttggtcaattttgcatgttgagagagccccaaactccataagctgtgttccactatttcctctacttcacaccacctgtctcttcaccatttctatcatgttgtataataacagagatatgtgctgttttcacttccaggtaatctaattccaaggcatcaggagctttttaataaaaatcctgtgtttgctggagtaaggttgcctgaaatcaaggaaagagaacctcttgaaagacgctatcctaagctctctgaagtggtgatagatttagcaaaggtaatcatacttattgtttacactttatgacagggaatttatgcactatcaagaccttttttttttttttttacttgtctagttgatcttttttttttttttttgatggagtcttgctctgtcacacaggctggagtgctgtggcatgatctcggctcactgcaagcttcaccattcttccgcctcaacctctctagtagctgggactacaggcgctcgccaccatgcctggctaattttttgtatttttagtagaaacggggtttcactgtgttagccaggatggtctcaatctcctgacctcgtgatccgcccgcctcggcctyccaaagtgctgggattataggtgtgagccaccagccctggcctctagttgatcttttaggtcaacaatttcctctaataattttaatttttgtacatttagaaacaatttaaataatttgatgggggtaacttcagagaaaaaggactgaaaattttacctgttttaacactcattaagaaaccatttattggccgggcgcggtggctcacgcctgtaatcccagcactttgggaggccgaggcgggtggatcatgaggtcaggagatcgagaccatcctggctaacaaggtgaaaccccgtctctactaaaaaatacaaaaaattagccgggcgcggtggcgggcgcctgtagtcccagctactggggaggctgaggcaggagaatggcgtgaacccgggaagcggagcttgcagtgagccgagattgtgccactgcagtccgcagtccggcctgggcgacagagcgagactccgtctcaaaaaaaaaaaaaaaaaaaaaaagaaaccatttattgttatctagcattttgtaaatgtgaaaacatcctcactgaaaaacacattaaaaacataaaaacactgtatgatttttacgtttaacatttaaaatacacgccttgtttaaatggaaaagaaaataaaagtaggataagaaaataaaaagggkctgggcatggtggctcacacctgtaatcccagcactttgggaggctaaggccggtggatcacttgaagtcaggagttggagaccagcctggccaacatggcaaaaccccatctctattagaaatacaaaaaaattagctgggcatggtggtgcatgtctgtaatcccagctactcgggatgctgagacaggagaatcacttgaacccaggagrcagaggttacagtgagctgagatcgcaccactgcactccatcctgggtgacagagtgaaactctctctttaaataaataaataaataaaggatagagaagtaggaaaatattaaaatgtaggrcataggatggccgggcatggtggctcatgcctgtaatcccagcagtttgggcggccgaggcacgtggatcatgaggtcaggagttcaagaccatcctggccaagatggtgaaaccccatctctactaaaaatacaaaaattagctgggcgtggtggcacgtgcctgtaacccccgctactcgggaaggtgaggcagagaattgcttgaacctgggaggtggaggtttcagtgagctgagattacgccactgcactccagcctgggcaacagagcgagactccatgtcaaaaaaaacaaacaaacaacaacaacaacaaaaaaaacaaaatgtagggcataggatcatgatctgtatgatattgtcaaaggggtttttgcttagccactgtattggctgcagccagtttacaaatggccaatacttttttgttgtatttgattaaggaagatgttaggttttcattctatcaagtgagaatcaactctaaaatttgacctttttggggaatttttagctcaaaaagttctcatcagttaagattgtttaaatattgataagataggtacctctaaaacactaggctataagatttacccaatttttttgttttttaattctttaactcatgacgtttaataagcttataactaattaaacaagttcttagaataatacatttccagttttttacataatcttctaacagatgcaaatatttttaattggtacaagctttgtgatctatctgtaaggagatataaagggaataaaggtaaaactattgtccaacttgtgtaccttaatcataccttaaggaatcatataaaacttttaaaacattttattatggaaaatttcaaacggaaaagaaaatagaaagaatagttgtttaacaaaccttcatgtacttatcatctagtttccacaattatcaaccttttgataatcttgtttaatttatctacactctttaactttttttggagtattttgaagcaaatcccagacgtattattttacttataagtagcacagttatgcagagaamttttcttgttcatttaaagctacttattgagtcccttctatttttactggcatgttaggggttttaatgaatcagaacaagactttgcaataaaataaaataaaataaaataatctttgtaaagcatctagcatagtgataagcacaggataaatcctttcctttccattctgtaatagccttaagttttaaaaattccaaataatttcttactatcataaaatatctaattgatgtttaaagtttcattaattttcacaaaatttatttcatttcatagtttgaattaggatctaaatgaagactatagattgcaattggtcgatatatttttaaaactttatttataagcttctcttcatctctttcttttttgtttaaatcttgcaatttatttgttgaagaaactaagttgtttgtccttagaattttctacataatgcagtatacatgttcttctgtgtcctgtatttcttataaactcacagtagagctagagctcgatcagaatcaggttgattttttggcaaaactacttcataggaggtttgtgtatttccatatagagacactgaatgtttggtggtctttttgtgatactagcaaccactgacggtcattgtctagatttgtgctttattctttatccttgattattgatgtgtaaaattcattggcgggcaagtgtggtggcttgcgctggtaatcccagcattttgggaagctgaggagggtggatagcttgagctcagagttcgagaccagcctgggcaacatggcgaaacgctgtctctacaaaaaatacaaaaattagctgggtgtggtggtgtgcacctgtggtcccagctactcaggagactgagatggaaggatcacctgagcctagagaggtcaaggctgcggttaagtagtgatcacaccactgcactctagcctgggcaacagagtgagaccctgtcttaaaaaaaaaaatcgttgactataaagaggattttttttctatatttataaatttaaatgtaggtagtttttcttgatatgaactctaagtgttcttaatttttcagaaatgcttacatattgaccccgacaaaagacccttctgtgctgagctcctacaccatgatttctttcaaatggatggatttgctgagaggtatagtacttacccatgtttttcaggccataccaacctagggttaaagtcttccacaatagtcacaaatagcacttctcttatttctgttcccacctactttgcaggatctcagatatctaccactctacccccatattcccttagcaataatgcagttcctaggggtggtctcctacatttactaaattagtgctcttggttttcatgaagcggtcattttatgtcttctttctgtctccctgtggtgacgtctaccagtcagatcattgatttctatgttgctaccaactgtgtgatgccatcatcttagatgctgatgtagttacaaaagtgccatctcctattgctgccaaactcataccacaccaagtcctttgatactgctgacactgctgatgtgttggagaccttgatatgccaaacctgtgggtgccagagttgctggcatggtcttctgtgctgctcaagctgctggcaacagtgcagctgacgaaacaaagaatagtgagatgagtggcagtaacacgtagcttaataaaaggtagctaggttttcctatttgcttttgtactcaattagttgtgatatgttgtttttgtggaagtatatgaagaaactctggcctcacgtaagtagataattgtgggtattctttgattctataccaaaactctgataccatagcaaaacttgacagtggtagtttcttttttttttttttttttttttgctcttgttgcccaggctggagtgcagtggtgcaatcttggctcactgcaacctctacctcctgggttcaagcgattctcttgcctcagcctcccgagtagctgggattacaggcatgtgccaccacaactggctaattttatatttttagtagagatggggtttctctgtgttggtcaggctggtcttgaactcctgacctcaggtgatctgcccacctgggcctcctaaagtgctgggattacaggcatgagccaccgttcctggcccagtggtagtttcttaaaggctggttgcattgtggaatgtgaaaccatatcattgagtctttcttcctttgttaaattaaaatccatttgtctgtcttgcctttttaatggatcttttacccatgcatgcttttgtaatatcatgctttagtcatttggaaaatattagtttgctgagttaagcagatcttaaaaatattgatatatttcttgtacagcatcaaaaattacattctatctcataaaagttttgtgagttttgggaagctgctaagctcacagtggtggatacaagtttaacagaattgtaatttttgcataaaattttgaattttatcattaacacaattatttctgttttccttgaagtgacaagatcactttgtttatttgttaaaagaaaatgtttcccatagacccaaagtcttaataaccatagtttttctgtcagtctttctttcaagtaaaaatatctagtttagtttgtatcacaaataattatgcaagcatttttcttaagacaaccatagtgtttcggtttgtagcagaggtgctttacgtatattctcattttgtcacacagaccataaaaaaaggatgcgtttaagagtttggctttaatgaagtcaatacctttttgctgattcatcagagacattcttaagcaagactgccttttttttttttwaaaaaaaaaagcaactgagaatgtgtggttatcaagaaagtaatgactgctagtacattttggttttgctgcttttcttcttggtaaggtgtcagcagttttatccaccactgctttcatgttaacctggtgagaaagacaaacatctttatgttaaaataatagcattgactttgtgaaccttctgaatgttcttagggatccccaaagatctacacaccaccctttccaaactgctgatctaggccaggatttttctcatttttaataacatagactagtttaacattcaatttttaaaaaataaatatcttgaaagtcaatttttttgtaggtttatccatgtcttacaattttattttattatatttttatgtaggttttcccaagaactacagttaaaagtacagaaagatgccagaaatgtttctttatctaaaaaatcccaaaacagaaagaaggaaaaagaaaaagatgattccttagttgaagaaagaaaaacacttgtggtacaggtaaatgttcatgtttcacattttagatttaatatacttatttttttaaattttttgagaaaaaatatgattttgaaaaaagttttctgagcagtgagcaaattgttaacttttagtttagttgtaaaaatgtatcttctcagtagatattacctgtttagaaaacttaacatatcatgttttgagtacctgttatgtgccagactgtgcaacagtgcttaaatcacattcatccaagaacatctagatatgtgttttcatgaacacatatacacacagacacatggaacaaacaaccctcaccccacttatctttcttaaaggatatgagtgaaaaatattgtctgtagaaatttatatgaagtaaaaatttgaaaagtgagatttggatacttaacttaggtttgcttttcctggtgaactacccaggatctgttcttgataaggtaattcaaatccaccaccaatccacttatatcaagtacaccaaaagaagaaagagttatcagttttgtgttccatgactctgaatatgtaagaacaaaagtggaattcttgattcctcttccatgagtttttccactgatgtgtgtgtatgtgtgtgtgtgtgtgtctgagtgagctgtgtgaattgcatttccattctttttgtattttcccaataactatctgaataagaatctggctttaattttaatcccctaggaagaataaagaaaacagtttcaaaaaggtgatacttatgatattctgctctagttgacaagtactttataagaagaggtaaattttcattctcttcagatcattaaccttattaatatttttgttaatgatcaggataccaatgctgatcccaaaattaaggattataaactatttaaaataaaaggctcaaaaattgatggagaaaaagctgaaaaaggcaatagagcttcaaatgccagctgtctccatgacagtaggacaagccacaacaaaatagtgccttcaacaagcctcaaagactgcagcaatgtcagcgtggaccacacaaggaatccaagcgtggcaattcccccacttacacacaatctttctgcagttgctcccagcattaattctggaatggggactgagactataccaattcagggttacaggtatgaattagtaaaataagatcaaaaaagtgtttaaggacatatttgcaaattgcaagggtttgtcaattcatccacattgtttttattctcagaattctggatgctattcattcttgtcaggtagctgtttcaaaagactttttggctgtgtgatgaagattattagcatttgatcaaaacaattcaccaaagtcctgagaaagtagggttttattgcttaaggtgaagagaatctacagctatatagtctaataatgtgaaagcaggttgtcatactaaaagagataatttttgagtggctgctgctgcatggtgtgactgtgagcctatagtagtataaggaagctccatttgggaattttgctgaaaggagggtaatgtatttggtaggagttgggggctgctgggaggcatgagggtagtgttaaagaatagaatgtttcaccagatttatgtgcattgtatatttgagaatagacattacactctggttaaactgcttgttagttggtgctgtgtcatttagttttgtgcttgaaaaaataattattgctggttctaacttaaaaacatttttttttgtcgttacagagtggatgagaaaactaagaagtgttctattccatttgttaaaccgaacagacattccccatcaggcatttataacattaatgtgaccacattagtaagtaagcagttctyagtagtagaagagcaaacaccagtcagctctagacttttattaaaattaaatatgatagtgaagtattgagaattttgtttggatacacataaagtgaaaccttaattgtgcatatattatcccaacccatcatagtcataaacgtgaaattctgaaagtttaagttttatgagtctaaaaactccttccttcctyccttccttccttccttccttccttccttccttccttccttcctyccttccttcctctctttctttttcttttcttttttttttcatggagtcttgctctgttgcccaggctacagtgcagtggtgagatcttggctcactgtaacctccacctcctgggttcaagtgattctcctgcctcagcctcctgagtagctgggattacaggtgcctgccaccgcacccagctaattttttatttttagtagagacagggtttcaccatcttggccaggctggtcttgaactcctgacctcgtgatccacctgccttggcctcccaaagtgctgggattacaggtgtgagccatctgtgcctggcttgttttattttttctttagtaacatagtaaattttctcaacttgatgattgctggtcagttcttttttagagtagatgaaaagataaattgtcttatctcacccacaccagatttttggtggctgtattctattggccagggacagtagcacacatctataatcccagcactttgggaggccgaggtgggaggatagtttgagcccaggagtttgagacaagcttgagcaacatagcaagatcctgtctctacaaaaaattttttaaaaagttagctgggtatggtggcacatgactgtagtcctagctacttgggaggctaagatgggtgggttgcttgagcctggaaagttgaggctacagtggtaagctgtggctgtaattgtgccccagcacctgagcctgggtgacagaccaagaccctgtctcaaaaaaaaaaaaaaaaagaagaaagaaacgattctatttatttatataataaatatttatcaatcgttatgtgtgagacactggaaataaataagtcaatctttcttttcaaggacttcatgatctagaggatcagcaaattaaagcatagtatcatattgtatttagacagagcacaggaaggaccattattattctcagcatggcctccagaatgtttctcttttgaagttaggtgaaaccctcatcattcttctgctaaacttcctccattagcttcttatcactgaggaaaggccaaagtccttatagggtctataagtgcctgcaggattgactccaaccaaccctctatcccatctccacctactctttctccatcaatctgttctaccacactgatttccttgttattcctggaacatagtcagacatactcccacctttgggcttttgcacttgctatttcttttgctttggaacattcttcccccagataacccaatggatttgctttttctcttcttagctcacatgaaaccttactgtgaagtcttgtaactcattatgcctccctttatgttcgatgccttctccttgcttatttttttttccattgcatttacctgacatcgtctatatactcttatttatatattgtctgtctcccccagctagaacgtaagattccaaggcagagatttgtgcttttgttttcttcactgtacttttccttcctatgcaagtagaaaaaataattttttttttttttcgagtcagaatctcgctctgtcgcccaggctggagtgcagtggcatgatctcggctcactgcaacctccgcctcccagatttgagcgattctcctgcctcaacctcccgagtagctgggattacaggcacctgccaccacacccagctaatttttgtatttttagtagaggcggggtttctccatgtcggccaggctggtttcgaactcctgacctcaggtgatctgcccaccttggcctcccaaaatgctgggattacaggcgtgagccaccagggctggcctaaaatttaaaaatgagttcaaactaccagattaatatattcaaagagtgaaaataaaacacaaaataaatatttataataatacatttattcacaccttagaatgggggtataaaacatgggagagaggtattgtcctttaacctacaagttgaagaaagtctaggcttatctctgcttgcattaattttcattaaggaaagactccatactgaatgaatgaatgcttttcacaacaaagggaggtatggatgtattcccaaaggaatattccttgtgtgtgtgtgtttgtgtgtgtgtgagacaaatttccctctctatttctctcactatcttcagagctgaaaaatacagccttttcatctctctcatgatttggacattgtatttgtttttcttttaattattcttagtttataatttctgtgccaatagtactttcttttttggtttctttgtggatatttgtgttttaaaatcctgatttgctttggaagattattttaatcaggaaggcttttcaaaatagctggttcaataccattttgccagaactgatatcaacctgctttcaggtattrcataatcaatgctggctgataattttagatctgatttattcttctttggaagaggtaatttattcttctttggaagaggtaatcaagagaggaggtgaagattaggagggtgaagacccagtggagtctttccttaacgaaaattaatgcaagcagagctaagcctagactttcttcaacttgtatgttaaagatcaatacctctctcccatgctttatgcccccattctgatgtgtgaataaatatattatattatatattatatatgttttattttcactctttgaatatgttaatctggtagtttaaactcatttttaaattttattttttgtacttgcatatagttttctttaactattttattttataaccaacttgaaccaatagccttagcgcttgttctatgaaaagagtaagcagaaacatccaaaagaaagaaactcaaaagctcactgcaggactcttgaagactttctggtagccagaatggcataattcacagaatattaagtttgaggcatcaaggaacctccataacttaatgtcattatacatatgtttgtgtgtatgtagctcattatacatacatatgaatacaggctttctgtgattctcgaatgaaaaatattggaaaagtgtcaaattcataaggatgcagaattgaagtgctgctgctattcctcactattttttctgactttatcaactgtgaaataatagtactaagaaagatcaggaaaataattgaagttataattctttctgtgtcttaataaattgtattcctgggaagatagtattatattctaactctgaggagcaagacaaggacatatatagaaaaatgaacaacaaaattatattgggaaagtgaaaaataagctagggggagatatgatatacatgtgaagataaactgttcaaaatttatgaagacaacagcaactatttgctgaaaagcctaggaagtgtaaggcccgaccttgctggcctgaagaaccagcgcatcaatgcccatcttttaaccttttactacttgctgggacttacacactgataattggcaaaggaagaaggagaaactcatagcactcaagttatctacttgttagcaattttaatgaatttaatgaggaagacatttgaaataattggatgaattttttttgtattattaatgtccttcaaattttttattatagaccttcaatttcacaaattttaggatatgaacataggagttacagaagaaggaaagcctagctaaccttgaaactaattcttttttgttgactatgttgatgatattaggtctctagtgaaaaaaacctcttttgggcaagtaagaaaagaagagaatactccaggacagatgtccgtttgcctgaactaaactataatcatctccctgaactaagagcactgggaggcataggtgtgttgataatgcttttactttgtgtagtctgtttagattatttaaaatgtatgttagacagaatttaaaaataaaaattcatactaactttacatatttaagtatgtaaatacctgttataataagtacatactgaggaacacgtagagaatgtgaaaaactaaaaactaacaaaatgtctaatattttcactgtgtttatggtcatttctatctagctcgaaattccaggctaacaaagaaagagagcaaaattctttcagaatctcgaattccttctctggctgctattgacctgcacacccccagtattacattacatcaggtacagaaatactctttataggatggacagaactcgggtctctctcttacttactagtaaagtattttagggagagtttgctcttaagaattgtgcaggtttattggtgggatctataacattttgcttgcaaatgttgtttgattcattgcacttagtacctttattacatatatatttacataaacatttcctaacttcccataatactttctttttttagagacatggtctcactctggtgcccaggctggagtgcagtaacatgatcccagctcactgcagcctcaaacccttgagcttaagcaatccaactacctcagcctcccaagtagctgagattacaggcatgcaccaccatatctaattaatttttaaattttttgtagagatgaggccttgctatgttgcctgggctggtctcaaaactcctggcctcaagcgatccttctgctttagcttcccaaagtgttggaattacagatgtgagctatggctcctggccagtaatccattttttataggttaaaaatgtgtgtgtctgggtatgcagcctagctacagtttttgttagctactggggttttttttatatttcgtagtatttcactacattaactccaaagtaataaacaacctacctttcaaagggagaaactctggaattgtttttattcttccagaatagattatctatttgacatattttcaccaagacaatccattttatccatgttaaagatttgctattccatatagtcatttttttctatcattgctcttaacttttcagaatatatgtgtttctattacctttatatcaacagccatatcactcatttttacactgaaaaaactggcaaacttaaatctccttagccaaccataactagctacaaactttggctatggacattgtactttccttttactgcttcagacagatttttcacctttgcttgaagctaggcaacttttgttttagaattaattctccatcctcattattaacacatttccatttcatagagatttcctgtatgttgttctttatccacggtgatgctttttccactgttaactctttttttatttttattttttgagacagagtctcactctgtcgcccaggctggagtgcagtggcacaatctcagctcactgcaacctttgcctcccaggttcaagtgattcttgtgcctcagcctcccaatcagctgggattacaggtgcatgccaccacacccagctaatttttgtatttttattagaggcagggtttcaccatgttggccaggctggtcttgaactcctgacctcaagtgatctgcctgcctcagcctcctgaagtgctgggattataggcatgaggcrttgcccccagcctcactgttaactcttcaatagttctgtagagctctacaaaggagtagtgttactgtgaggataacaaattatctagagatgctgatgaaagggtttattgccgtgattgctttgccttatctcttgccaacaatttctatagcaacatttaattaaaactgaacaaattcctgtcatgtgaagagataatcactgtcacagattccacatttaggaaccatagagtatcaatacatttcttatatacttctttacttcttttttttgagacagggttttgctgtgtcatccaggctggagtgcagtggcaacatcatggctcactacagccttgatcccctgggcttaggcaatcttcccacctcagcttcctgagtagctgggaccacgggagtgcaccaacacacctggctatgagccactgtacctggcctctttttttttttttttggacacatggtcttgctctgttgcccaggctggagtgcagtggcatgctcatagctcactgcagccttgaactcctgggcttaagccatctttctacctcagtctcccaaggagctgggactacaggtgcaggctaccatgcccagctaacacaattttttttttttttagagatggagtctatttatctgtttatccattttccagctgagggacagttgagttgtttgcagtttttgacaattaaacgtgaagtgttatataaacatttgtaaatgtgttttttgtgatgnnnnnnnnnnnnnnnnnnnnttgtgtgtgaatatacagtttcacatttagttggtaaatacctgaaaatggatttgctgggtcacttggtaagtatatgtttataagaaactatcggccgggcgcggtggctcacgcctgtaatcccagcactttgggaggccgaggcgggcggatcacgaggtcaggagatcgagaccatcccggctaaaacggtgaaaccccgtctctactaaaaatacaaaaaattagccgggcgtagtggcaggcgcctgtagtcccagctacttgggaggctgaggcaggagaatggcgtgaacccgggaggcggagcttgcagtgagccgagatcccgccactgcactccagcctgggcgacagagcgagactccgtctcaaaaaaaaaaaaaaaaaaaaaagaaactatcaaatttttccaaaatgactacactattttgtatttcaaccagcaatgcataataatttcagttgtgccttatcctcaccaatacttggtattgtcaatttaattttagcctttctaataggtgtgaagtggcatctcattgtggttttaatttgtatttccctaacgacaaagatgttgagaatcttttcatgtgcttatttgcacatgagagagctgtatatcttctttgatgaaatatctgctcaaatcttttgcccatttttaatggttgkttgttttcacattgttgagtcattatttattttgatgttcaaattagtccagtttttctagtgggatccccttcaaggtagcttctgtctccttttgacaagtcctcatcattctttgaggaattccttgctatctggcacaacagataatgcagatggatttgtaccagccagaaatcagccatctmtctaaggatccctaatttcctttagtagaaaatcatatttagaaattaagatctgggctctaggtgtgtccactgatttggggggagtcattgttccaaggccctcttagtggacagagctaggtacatagacatatgtatatacatacacatttactgtgagtttatttctatttctacctatggttactgaaatctacaaagatacctctaattgtgaatccaacacccaggtttggcctagtttactattctcttctttaacagtaagaaatttagctgtatgttattccatgtataatttaatatttgtacttatttgattaattattttatatatatctaaactcctrttactgctactatgatttcccttttttaaaaaagatatatttgtcatgttttaacattaaggttttgttagcttcataaaacaagttgagcagtggtctctctttatttcctgaaaaagtttaataagttggtgttatttgttccttgaatattaatggaattcactggtgaagccatctgtctcaagagctttattctggggaaagttttggataattttttttttttttttttgagactgagttttgctcttgttgcccaggctggagtgcaatggtgcgatctcggctcacggcaacctccgcctcctgggttcaagtgattctcctgcctcagcctcctgagtagctgggattacaggcgtgcaccaccacgcccggctaattttgtatttttagtagagaaggtgtttctccatgttggtcaggctggtcttgaactcccgacctcaggtgatccgcctgccttggcctcccaaagtgctgggattacaggtgtgagccaccgcgcccagcctgatttcagtttcttttttttttttttttgagacagaatcttgatctgtcgcccaggctggagtgcaatggctcgatctcggctcactgcaagctctgcctcccaggttcatgccatcctcctgcctcagcctcccaagtagctgggactacaggcgcccgccactatgcccggctaatttttttgtatttttagtagagatggggtttcaccgtgttagccaggatggtcttgatctcctgatctcgtgatccgcccgtctcggcctcccaaagtgctgggagtgtgaaccactgcgcccggcctctcaatttctttaaaatatacagtgctattcagattttctgtttcttcttgtgtctcttttggtaggttgtattttttaatccttttgttcgtgtcatacaatttttaaaatttgttggcatgacgttgttcatagcattctcttcttgtccttttgttttgtttttgcttttgagacggagtcttgctctgtcacccagactggagtacagtggcacaatctcaactcgctgcaacctctacctcctgggattaagcgattctcctgcctcagcctcccgagttactgggattacaggcatgagccactacactcggctaatttttgtatttttagtagagacggggtttcaccatgttggccaggctggtctcaaacttctaacctccagtgatacacccacctcagcctcccgaagtgctgggattacaggcgtgagccactgcacccggcctcttattgtccttttaatatctgtaaggactgtgatgattattccttatttatttttactttattatgttcactttctttttcttgatcagtatagttaggagtttgtcaattttgttgtgtttttcaacaaaatcaagcctttgrcattgttaatttcctctgttatctgtcagttccctattttattgatgtctcctcttagttttccccttttacttactttgagtttattctctcaatttttctaggttcttaaggaaacccatcacttggtcacttagttttttgttttttgttttgttttgttttgtaatgtaagcatgtaaagctacacattttcctctaagcactgctttaccttcatcccacagcttttgatatgttgtattttcatttctatgcttactgaaatctacaaagatacctttaattctaatccaacatcacagagtttggtgtagtttgctatcctcttctttgagagtgagaaaattagctgtatgttattctatgtataatttaatatatttacttatttgattaattattttgtatatatctaacttcctattactgctactataatttcctttttttaaaaaagatatctttgtcatgttttaacattaaggctagtccaggctgggcgcagtggctcacgcctgtaatcccagcactttgggaggctgaggtgggcagatcacaaggtcaggagatcgagaccttactggctagctaacatggtgaaaccccatctctactaaaaatacaaaaaaattagctgggcgtggtggcaggcgcctgtagtcccagctactcgggaggctgaggcaggagattgatgtgaacctgggaggcagagcttgcagtgagccaagatggtgccactgcactccagcctgggtgacagatcaagactccatcttaaaaaaaaaaaaaaaagaaaggttagtccaaacgttttctaatttcccttgtaatttcttctctcacctatgaattatttagaaatgttgtttaatagccaggtatttgaggtttccctagatatcttattactgattaatttgtaatttaattccattgtagtcagagaatacactcagtgtgatcttgatttttttagattcaatgagacatgttttatggtctacggtctatcttggtgattgacttcattcccttgaaaaaatgtatattctttgttgttggattaattgttctataaatgtgaaattagatcaaggtggttaatagtacagtattcttcaggtcatctatgctcttaattttttttgtttaggtctatcagttcttgaaagagtgctgttaaaatcttttattatgttgtagaattgcctatttctctcttatatctgtttgttttaatttaatttaattaattaatttatttcaagacagagtctcgctttgttgcccacgctggtcttgacctcctgaactcaagtgatccacccacatcggcctcccaaagtgctgggattacaggcatgagccaccatacctggcctgtatctatttatttttgcttcatgtattttattattatttttttagaaatggggtctcactctgttgcccaggctggagtgcagcggcatgatcatagctcactgcaaccttgaattcctaggatcaagcgatcttcccccatcaacctcctgagtaactaagactacaggcacagctcaccacacccagctaattttttcttttttgttttgagagatggggtcttgctctgatgttgtggctggccttgctgtgttgctcaaactcctgacccaaactcctgacctcctcctgagcctcttgagtagctgggattacaggagtgagccaccatgcctggctgctttatgtattttaaatctctattattaggtatttgcacataattgtcttgtctttctgatacattgtaccttttctcattatgaaatgcctctctttatctctgtagtggtctgtgctttgaagtctattttatctgatattaaaatagccattccaaacttcttatacgtatgtttgcatagtaaatcttgttgatttcatttactttcaccctatctgttttttatatttatatttaaagtgtttctttcacagacagcatataaataggatttttcctttgtatacattctgtcagtctttgccttttaattggaatgtgtattygtttattatttctgctaccttagagatgtggtagtccccccttatctatagttttgctttctgcactttcagttacctatggtcaactgtggtctgaaaatgttagtggaaagttccagaaataaacagttcttaagttttaaattgcacaccattttgaatagcctgatgaaatcttgagctgtctggctctgttctgctcaggacatgaattgtcccattgtcccgtgtatccatgtatgctacctacccttttattgcttagtagctgtctaggctttcagattaaaaaaaacacaatactgtatatttagggcttggtactatctgaggtttcaggcatccgctgggggccttggaacatatccctcatggatcggggsgactacttaacacactaaattaatatctatttattttctcacagtttctgggtcaggagctagggcacagctgcttctctgaatgagtctcacaggtggaaatcaaggtgtctgcagggctgcattattttctggaggcattggggagaaaccatttycaggttcacttgggttgttgggctaatttagttccatatggttgtagggcagaagtccctatttccttgctggctaacagctgggggttgttctcaccttctagatgccactcacattccttggctcatggcccacttcctctgccttcaaaaccagcaacagtggtcaaatctctcttacacttgaatctctctgaccactccttctgccacatctctgacttactctgatgctaagagctcacatgattacactcggcccacgaagataatctatcctaattagtaacatttaacagctaattagtaacaattaacagctaattagtaacatttattccatgcacaaagtcccttcatatcggtactgaaattagtttgattaactagctagggacaggaatcttaagggcatagctttacaatcctgctgatcacagaatgtttagaccattaacatttaatgtgataattgatatttttgaatctagtcccatctttttattatttgttttctgtttgctcctctgtttttcctttccagttttcttttgtttttgaatagtttcagtattttttcggcaatatctttttatattttttttagtgattgctcgaggaattacaatatacatcactaatttttcgtagtctacattgtaccccttgaaataaaaagtrcgaattgcccatccatttctccatcatccaggaaagacgttggttttgaggttgacatacctataaaggacagtaactaccatggcttccaycgctttggcaaaacctcagatgtgtggtcttctggccaaatgtctgcaatttcatattgttggagcctttattgtatccctgggggttgcagctgtctgtaagattgctgtggctgaaccaagaaagaagacatatgcagatttctacagaaattatgattccgtgaaagatttggaggagatggggaaggctggtatctttcagaatacaaagtgattttggaatgcaaaggatttctttgggttgaattacctagaagtttgtcacttacctgtgttcctgagctatgaaacatgaatatgtggtctaagaaatagtttctcttgataaataattaacaacaaaaaaagtaggaacattgctaacatattcccttcttcccagtttgcactttaagttagaacttcatatgtactacatttacatatctccagaaccccaatacgttatatgttttgttttaaacagtcataaatagtttaaacaatttatgagaaaaagttgtcttttatatttacctagctctttaccatttctgtcggtctctcttcttccctagattttcctctggtattattttccttcagcctgaaaatcttcttgttagcatttcttgcagagcaggtctgacggtgacaaatgttcttagtttttcttcatttgagaatgactttattttactttaattcttgaagtatattttattggatatggaatttgggttgacatatttttgtttttgtttttcctcccagcactataaagatgggattcttctgtcttctgatctctgtaatttctggtgggaaattctcaggcatttgaattgtttccctatatgtaatgtttcattttcctctagctgctttcaagatttaatttttatcttttcttttcattagcttaaatatgatgtatctagacatagttttctttgagtctgtcctgtttggggtttgccagccttcttgaatctttaaacttatatattttaccagatttggggagttgttggtcatgttttttgaaatttttttttctgccataatctctcacctctccttctgagagtctaatgatatgtatggtagaccatttagtattttctcataggttcccgagactctgttcactttttcttaatcatttttctttctgttcttcagattgggccacttctattcatctatcctcaagttctctgactttttactttatcatcttcattctgctattaagtccatccagtgagattttaaaatttcagatactgtgctttttagtcccaaaatatacatttggttcccttttatagcatctgtttctctgctaagaattcctatcccttcattcatttcaagtatgttttcctttacttcatgtagcagagttataagggctgcttcaaagtctttatatgatggttccaacaggtttctgtttttgtatttttgtaataagtagaagagatgggctgtagtgggcttacactgccttggcagatcagaagtatcttttaacatatgcataaactaagatcaaagaataacatccactcagcagtcatgtttgggactaaagaaaaggaaaagaacaatgtccccttacttcattcttttccatgtaggcaacttgagctatgaatagttaattataaacatctaatatttgaacaaatagaattgaaattttggggaagtggaacttttgcaattactgagaacctatgatgctctattattaatttataggtatcaggacctcccctgtcagatgattcaggggctgatttgcctcaaatggaacaccagcactgagaaccattttggttctgaactgggtaggtgtgatttcccatacttaaagctgtgcagcctttcacaggtactattttgtggcttgctgaataccaatttttcagctgaaaccgtctccagtgattgattccatgagaacttctgatagagaaagagttgtgccacttagaaaaccagaagtagtatttatctctgagatgaaatcccttttcgcagagcgtacatctcttgctcttaaactaatctcctgcattttattggatatagtaatgtgaatttagggtgacaagtgctcaagaaagatatatacctatctcccttatcagtcatttgccctgtgggcctgtaaagcaagattgattgattataatgatgcctcggttaatgttctgaaagatgcatccttaggtgatttcactgttatgctaacatcacagtttacttacacaaacctagatgatataacctactatactcctaggctatatggtatagcctattcctcctaggctacaagcctgyacagcatgttactgtactgaatactgtaagcaattgtaacacaatagtaaatattcatatatcaaaacatagaaaaggtaatgcattgcactatgatgttactagctacaatgtcactaggcaataagaattttcagcttcatgataatctatgggactaccattgtatatgcagctcattgttgacctaaacattgttatacagtgcatgattatacttggcaatatttttcccaataaagagagatcagtgctataccaaattattgacttccttttaaatataacttttttagtattaaaaaagccaaggctgggcgcggtggctcacgcctgtaatcccagcactttgggaggctgaggcgggcggatcacgaggtcaggagatcgagaccatcctggctaacacggtgaaaccccgtctctactaaaaatacaaaaaattagccgggcgtggtagcgggcgcctgtagtcccagctactcgggaggctgaggcaggagaatggcgtgaacccgggaggcggagcttgcagtgagccgagatcgcgccactgcactccagcctgggcgacagagcgagactccgtctcaaaaaaaaagaaaaaaaaaaaaaagccaaaacaaaaatcagacattttttttgagatgggatcttactgtattgtccaggctggagtgcagtggcgtgatctcggctcactgcaatctctgcctcctaggctgaagcgatcctcccaccccagcctcctgagtagctggggccacacgtgtgtgccacaaagcccggctaattttttgtatttttggtagagatggggtttcaccatgttgcccagggtggcctcaaactcctgagctcaaatgatctgcccgtcttggcctccctaagtgctggaattagaggtgtgagccaccatgtctggccaatcagaccattttgaatgataatttatttgctcaagcaagtcattcaatgtttaatatctcattatgtaaaatattatgatgataaattcccacattctcacaactgtatttatttatttttttgagacggtgtcttgctctgtctcccaggctggagtgcagtggcacaatctcagcttactgcaacctccaagtgatcctcatgcctcagcctcctgagtagctgggatcacaggtgtgtgccaccacgcccagctaatttttgtatatttagtagagatggggtttcactatgttggctaggctggtcttgaactcctgacctcaggtgatctgcccaccttggcctcacaaagtgctgggattacagtcatgagtcaccatgcccagcccctaactgtattattggaattaatctgttaacctttacaaagcattttgagcatctgtgacatcaaaggtgaatgtactgtgaagtgaacaaagcttaagttttgatctttcatttgcacaggtcctttcaaggccgtgggagagtctttgcaatgcattcatttgagttaattcatgttgagcaatgaacaactaattcatacaaaccgtgtaaactacagggtctgcaaaacttggatgcattttgtcaaaattagtcattatttgcataraaggagatgtgtgttacacatgatagtttttcttttttttgagacggagtttcgctcttgttgcccaggctggagtgcaatggcgtgatctctgctcactgcaacctccacctcccgggttcaagtgattctcctgcctcagcctcctgagtagctgggattacaagcatgggccaccatgccgggctaatttttttgtatttttagtagagatggggtttctccatgttggtcaggctggtcttgaactcccaacctcaggtgatctgcccgcctcggcctcccaaagtgttgggattacaggcgtgagccactgcacccagccatacgcaagatagttttgattggtaattattctaaagattgtcttaaaaatttgcttttgatacatctaattgaaatctaaggttttcttaaactacatagtacccaccaatgttatcaatatatacgatgtgagaaagcaagtgagatagaaattaatttttagaaagattttttgtaaaatagttggtggtatatcctcctgtgcttttagatgatgctcttgcacttgagatgacatcttcttgcagcaagagtgctgatatcccaagaggagagattcatggttttgatcatttccttctgaactgcctgcattttctgaggaaggccttctagaagaaggaaagacaaagacttccaaatgtttcaaaggaagattgaacaaatggccctccccaactgttatcccattacctttcacgtccaccgatgctatttcaagacatatccagtggaataacagtgatatggttcttgttacatgaatgtgtatttactgttaggagattgtatattttaagttaccatgattaaaagtgtgtaaaaaagggggacagagagaaatactataaaaggccatgttactcatgcattgaactttgtgtgttttctgtataaatgtgtacatttatttaggagtgggtttcttgggggtaggtgataaaaattaggatcagttgaagaaaattgaagaaactaggatcagtaagagaaactgtttgctttacctgaatttaactatgaaaacacacttaacaatcttacacgtttctagatattaagtgaatatgtaactcctgtccatgggtagatgtgtatctttgacttctgtaattatttttgatattctatcagtgtattatgagactctggcctccctgcagatcttctaagaaccacactaatgcaagcgtgacagagaaacctctttcgaatgacttactacaactctggcattggttagttccatgtattgtaagattctggtgctaatgctccatacagaattgatcaggactgattactcttctgtggaccaattgctattgaactacccagctgaagagggtttggggagagaacgttcattattatggactccacttttgtcccctggtagtttaagggtgatactagaatccagagaagttcctgtctccttgtggcctcaaacactcaggccgtctcaaaagcttttcaccaaggtgcaaaatcatttacctgcattccacacatcttttccaatgcatggatccaaaactttttaggtgggaggaataaactaagttggctacaggttcttgatttctgggtttctacacatgctctgcatttatcattttagagaatggttgtttagggaaccagaatttgtgagtttttttttttttttttgccttaaccaattaatagtgtgttgctttttttccaaagccattgactagaacttagctgaagaatttaactagaacttttctttattactctgaggagcttaatactgaaattctgaccttggatatttaagcctcaaaagagtaggacattcaagaggaggcaaataaggggtttcaatgtacaagtctataggtggtggttaaattaaaattggtcttgatttaaaagctctacttttaatctgtgaccagctgtttgacaacattagtatggataacatgctgaaaaaactagggtatcagcattaataggctgcatattaaaaagttactactttatttttactttgaaaaacactgccaatagattctgcagcatggcaaacaggtaatacttaaagccaaatggcgcttcggcttatttcaatactatttttatgtaaagatcagtgtgagaatatcagctcaatggttgaggttctaggatcaattgccttgcagtttttatactagcttttgatatcttttgcctattaaaacactttgtgaactttagaattaaggaactaaaaaatatttaccataagtccaagttatgacttgaggatcatatctgattagaactgtggcagaactactagaaaaagattctgcaaattggtttcagtgattcttgttgatgtaatcaacaagattacataatcaacaataatagatattgaaccaaaatgatcctttttttaagtttaaggttatttagtttctcttgcaaggatatgatttagtcacacactaatagggaatatgtgtatgtactggtggggagcagtgggcttgctgcatgtatgtatgttttaaaattaataaatattatcttactgggctccatagatggtttaaatttagatttatttaattaagaggctataaataatatatacactactgtatggtatttaacaaataagttttaaatctgttaattcttctggaaaactttggatgtagggatggcaagctaattttcttgtatagctggtgatataagcagcatggtcataaaataacatttcttataaagactaactggtaatagttgtgacagaacctggttttcctgactgagaatcccttgcttgcttagaatatctgacttcccattgaaatggaacatagaaaatgtgttttcttatgtgactctcattattggttcctttatcttagttgtgctacaatataaggctggacctgtaatacactatgtatcagactagactgaaaaatgtgatcgatttgttttctaagtcctcctctatataactgaaccatggtcaggggattagagaagcaacagagcactgctcctaaggctttaggctagtcttagtgaattggactgaatggatttttctctgttgttttttgcattaagtgtttttgcactagaagagggtgcttaacactcctctatctatatgaataaaaaattatgttctcacattgttttctcaagggtcttattttttctcttgacagcttcagacatgaaataactagaaaatgtaattaatgtacagcatatttttttcttaacatgccctctgagaagtaagtaccttatgttatcactcgtgggtaacttgtgatttagagctttgtgtttatagatatttgtggatatctgatgttgaatatattctgagaaattttctttaaaaccaaaacccatccacgagacagcacttttctttgttttcagtgaaaatttagttttgcccattgcacattcttaatttctatattctctactttggcactcagggccatctcctgtagaagtgaagtttctggtaacattttggaaaatgtattgtcgattaatatgaacatataagaaaggttcagggaaatgaaaacaacatatctcaattcagcatgttttcctatccctaagctagggtaggttctcctatcagtctggagaacaggctttcatatcagtttacctccatccagctatcccacctgctctagacctggaaagtgatcttcattaatcttgctgctaggatttaaaagtatcccctgaccacccccaccccccaccacaaaataatgttttaattggtcacttccctccttaacctgttttattattttattttattattattattttttatagagacggggtctcactatgttgcccaggctggtctttaactcctgtgcccaaacgatcctccttccttggcctcccaaagtgctagaattacaggcaagagccaccatacctggcttcctcaacctgtttttagttgtcttccttggcttctcactcttttgtttacatgtatacctatctcccccgatttttttttcccctttaactagaaaagccatttattgaaaggagttaagttgctcctcaacccaccagaagagtcagggttagattctgaaggcacacaggcaagaacaatacccagtgtcactgcctcactaaattttcagtgtctataaagatggggaaccttatttatctatttttgctctacaccatctagcacagtaataaccctatgaaagtaggaatgttattcatgttttataggcaagataataggcttagaaaacttaaggaattgactcagtgtcactcaataaatgatagagccatgagtgttgaaataaatatatgattatgattatttagagctggaattaatttttaaaatctgtttagataatataacattgagagcttagactcctggagctacatgcttcctcatttacttctagaggagaagagaaggagtttccccagccattaaacaacacttcactgtcattgagcctaatttggatactgctcatccctgaatcaatcacagtagctaggtgaatgacaagcactgatgggcttgaaccttgggcctctgttaaattcccttccttgaattaataatgggatcaaagggaaaccggattatactgattggcttaggccaattgcagcccacccatggaaccacatggcttccacaaagcagggcaggcacagaatggacattggaaaaacgatcacagtgctaaccagagatggacatttttgaagctgcagaagcgatgctttattttagatttggattgattttaccaaattgtccctcaaaaagactgtactaatttatattcttaccaacagtatatgagaaaattttctcactttagatattaatagtttccattttggccagatagatgggtgaaacttatcttgctttggtttacattttcttgattactactgaggttacacatattctgatatattttatatatatatatgtcatttgaattcctactgtgaataaaaaatattaaggtctttaaaaaaggtaaggcagattttagtttaagtattggaggcttccctctgtagttggttttcctatatctgacaacaagggagaaaccagattcagataataaggtttggctcaaaacatattgtggataaaaaatgattttttagaaatgcaacccagccagaagaatgcttttttttttttttttttttttttttttttttttttttgagacggagtctcccgctgttgcccaggctggagtgaagtggagcgatcttggctcactgcaacctccgcctcccaggttcaagaaattctcctgcctcagcctcccgagtagttgggattacaggcatacaccaccacgcctggctaatttttgtatttttagtagagatggggtttctccatgttggccgagttggtcgcaaactcctgacctcaggtgatccgcacacctcggtctctcaaagtgctgggattacaggcttgagccaccgcgccagaccagaatatattttaaaattacacttgttttaagtacgataggtcccctttcttcttctgggttttgggaggaaataagtcaatgagagattaacacgtctccctcctggggcagagggatggagaagccagttctgcttggatggacaggaattatttaaggaaagttatgaaagatctgagctctgggattgcgccgttgacctcacatctatttcactaggatgacaccttattcccttggctctgttgaggactgcctggtgctgccaagccgtgatccgggaggtggcagtaaagcccctcttactgcaagccatagctttcccaagggcaaaaatactaaaatctgtgacgaattttacctgaggggtattatctgtttctttttgtccatgcaatcaataaatggtcttctttttccattttaaagagcagtgttaaggagcgctcaaactatttgaactacaggcgtggccagggagaactgtaagacaggccatcagacggcactgctggtggaggggcgccccctggtgggtgaacattgttagttaaacactagtagtgcaggttcctaggtgtttaggaagcagaagagatccaatgcacttgacctgctcagtctctgcgattatgtcagggcctccctaatgtcagcaggtggccggtaaactcagaggtcagcaaggcagaactagtggctagaggggggtctaggctggagagagcatgggggtggtggggaagagctgtggacttcactgagaatcccgaacaagaaaaacaagttggagaattatgaaagtaaatttgcctcacaaaatgaaatgttggcaggtgagtaaaggcagagtggaaggaaaaatttcacttccaaggatgccagcctaataagggttctgaacatctttggaattaattggaaacatggttttcaattgtgatatctgtgtaagtggcaaaatgtaagtcaatcttcataatgcttggaaacttgaagataagtctgcactgccactggctttctttcttgattatgtttggagtacagcatagggagtttgcatggtgcaaccccagacacatttccaacctttatagcagttggttaatatgtgtatttagccgtcagtgcactcaaattctgaatctgaaaaagtgcagggcataatgttgtttcgggaaaataagccatgtattttgtgtctaaaatttaaacccttgaaacacttctcaacgtgttgatttgaaaaacagaatcaccaaagaaaaatgcaaagggactgtagaaaaggagaaatgtattgcca

SEQ ID NO: 95191 - DNA, 21228 bp, Homo sapiens
ttgaggtcaggagttcgagaccagcttggtcaacatggtgaaaccctgtctctactaaatatacaaaaattagctaggtgtggtggcccacacctataatcccagatacttgggaggctaaggcaggagaatcacttgaacctgggaggcggaggttgcagtgagctgagattgcactactgcaccctagcctgggtgacagagtgagactatgtcttaaaaaaaaaagaaaaaagaaaagaaggaaggaaagaaagaaagaaagaaagaaagaaagaaagaaagaaagaaagaaagaaagaaaagaaaacaagccagaaagcccaggtaaagcaaacagcacagtgtaaacaccctagacctcccttaggagtgggtttatgcaacactttctgtcccctaccctgacccccatctcccccggggggtgagaatctggcagactctcaacttctggctgggtcttacatttctgggctcagatccaaagcaagagctggggataagacttgtttttgaccaaggcttctaaagtttgccatttcccctttactcttggttcctagccttttttcaattacttttctttgggagccttccttttctctttacctctcttacacattaatgggaggtgatgaaaaagcacaaacacttagctgcctgtttcctgtaatgaggcttaattctataacaataagcctctggtaatcaagtgataccccccaacataatagctttcaaatattcagtgtaggcaataagcctgcatgttattaacttactagatttaagatgtaacagaaaggtcctcccactaaaggctactcaagaaaaaactcaaagcactcaagctttgggggagtttgtcattctcacaaaattccacaagagggcactaggttcacaccaccccggccaagcttctgattctccaaccscagtaaacaagtctccggagaacgggtttaaaagaagtggaagaggagaacggacaggaaaaatccagaagcagactaagaattgcccaagcatccagaaaacataccctagggctgtttgtttcctgttaaaatttggcgagtcaatgtgaaataaacagggatccaaattaactaatgaggtgggaggggagggaggaagggctgtggatcccattgaggatttctttgggaatggtaccaactaaagcacatactctgatctaaataattttttgatcagaatgctaaattctctaaattttttaattagcttcaataatgttccaatcaatctacagaacaacgatctgtacagtgtaaattgagaataaaggacaaaatgtatctaaaaaaacccgattcacaaaacaatgaaactggaggcagattatcagatgtgaaaaatgatctccaaagagtccttcaaagagaatctttcctatggtgttgtttttttctgctaatctagttattcacaaagaaaatatatattgagtgtctgctatacagaagtcactgggtaagcatacccaggattgagaggtaaatggttgctccctgtcctctgcacctccctcagtgaggactgtaggaatttcagtattttagagatggtggccccggaacagatcacccacagaccaaagcgactaaaggaaagggaacagaaaaagaacagcaccttgaaagctcattaagctctaaaatactaacctaacatgacttcatcaagttactatgagttatctaagcctcagttcctcatctttaagatagaatgatgtgaagatctaattctagaattgtatggctttaattttctcaataggacattttccccaggttgttaactaagatgaacttgattcttcccaactttccacgtagtttcctgctagagacatgattcagggtagagctcaaacagacccaaaccttccatcataacacgcagttggggaaatgaagtgttccttgtatttgactgatttcagcacgcatcctacaaaactcaaatcaggctacagatatggctgagacgtgaatttccaatttcctgtcttgaactgaagaatatcaaacaatcaaaaactgtaaagaacaattcctccattcttagtgctagttattgaactgaagtataatgtaaatgtagtctttccttctctaattgtataaagtgaaatttgaaagcttggccaactacagcttttccctaaattatggtttaagaataatgctatcaacttccagagctatttcttttcttcttcatttttattattattattttgatttggtttaagattctactatggtccattcttttggaaagaactgatgttggtttattacataataataatttttaaaagaatattttacaattctgggttgggtttccagggtgttccccaaccctgagtctcaattgtatctctttaacatgatttaaaggtctcactgaatgcctattgaaatcattcatacacagggaaaactccatttcctaaacagaaaaggtttggtcaatgtgagccctaccctaaattttgtgtctaatgtgtataaggcaaccacacaggccctgggaaggcactccagatccccaggtaaaggacttcatacttgcagagtgagaatggatcctttaaaagacagagaaagggccgggcacagtggctcacgcctgtaatcgcagcactttgggaggccgaggcaggcggatcacaaggtcaggagttcaagacaagtctggccaatatggtgaaacctcgtctctactaaaaataccaaaaaattagctgggtgtggtggcacacgcctgtaatcccagctcctcgggaggctgaggcaggagaattgcttgaacccgggaggcagaggttacagtgagtggaggttgcagtgagccgagattgcgccmctgcatccagcctgagcaacagagtaagactccgtctcaaaaaaaaaaaaaaaaaaaaaaaaaaaaagagaaaagttgtttcctaatagagataagatttgggagtagagcaaaatcctaatacaaagcttttatttcaggcagcagaacaacattgaagaaatacttttaatctcaggctatttctgcagatttggaacaaaatctttccctgtaattgctctcccactccacccaccccttggacatggcaattctactctaagagagaaaaatatgacttcaaagcacatgcaatggaaccccttgtcagcactgatatggtgtgtaccaagaaacagaaaagttcatgggttcaagcattctaatgctctttttatggtgggggtgaagaatgggggygggtggcaatttagggaagaaggggaaggagaagaaagggcagcagacacagcaaagtcaaactggatgaaacaggctgttttacttttaacttctctaaaagtacagtctgggtttctgcgggtgaaccagttaagggttttcttctgcttttacttctcgcctatgctcaagcctccctggtcagttcttggactcatctgygccctaatttcatcattttaagtaaatgtggggctggccaaggaggacaaggcctcttgttcactcctgaaagagtcagtggtcatgtattatgttcctaacccttacaaagcgtgcccctggtcacatgaatggatcaaagcaaatccatttccattcttggaaaagcagctcaaagcacatgttctcttgatggtgctgctgtcacttctgtgtggttaacaaatatcatttattgaacactcaccgtggacactactgggggatatgacaatgaataaactgctcaatgaggtcaagacatctaggaagggaagcaggcactcaaatggcagaaataccataagcctgcagaaccgcactcacgccttaccattccgttctctgttatgtttgtcatccccacctcaggggctggtggtgtgtgcagcagaggctctggcttatggttcggtagtttggtatctggaaatgattaataacatcttttaaaataaaaatatcacttttctcctcctttgctccccttcctcgaccatttaaactcaaacctttacagaaagagatgaagacagctcactgtgttaccaaggttaagtccagtttgatataatgaatggtaaagcattacactgagtcagaaaagttgtattcaaaagtcgctatggggaaagaaagaatccaatcacctcagattatagaacttggcctatgataattataattgctgttttctaaacatttacgatgcaccaaggactactcaatctcttctgcatgtgctatcacaattaatccttttatgaggtaaaaatgattatccctcttttattatagacaaagaaacaggcttcatgtggctaagtgatttggccaacacaaagctggtatgaagggaaagcccagatttgaacctaggtttacctgacttgcagccgtgcctttagccaccacaatgtaatgcttcaaggggcagcactgaaatttaacaaggaatttgtaaggcaccttacccaatccaaaatgtcaccagtctgaaacatcccaaaaaaccctgtttgagatgaatgctgcatctgtcatgtaaaagcactacagtgttatacactcttaaaggaaagggatgttgaccaaagaagccaagttatgtgtgtgtggtygcaggcaacatttcttttccacatttgcggtacaaaacataaccagaacaaacttcttcccttcctcttccaaaggcactggaagcataaattcttgctctttaaactgaaagaagcaataaaatctggacaccatcaggtagatttcaggcactaaaaatagaatgatcgagtaatagtacggatagcagtatctacctacctacctacctacctacctatgttgtgtctctaggtacatttcaatattgtgttcacatacacattttcccaaccatcacggcaagctgagaggagaggtatgtattcccattttccagattaacaagaagccgcacttgataaagcaaaatcagggagaattcgttaaaggaatttcttgacaatccctggacttcaaagggggcaagtgaacacctcgatttcctttcagctgctccgggggcagtttgcacacagaatttcaaatctagtgggcggctccacaggtcattttcgatgaccactttattttgcagatgaggaaacttgggccctgaaagacctgcctagggtctggccagcagtataagacaggtctccagacttagtttctaccgccctccagaatcctctctgtaaaattagataaacagcacgttgatttcaaatgtgaaatggcagagttctgtttatttccccagacccaagagagccggagcgggcggctcttccaggccttgggaaccccggcctgtccccaggcccgcgcggcacccgccctagcccaggcccgcccaaggttccctcgggtcccgcgccccgcgctccctctcaagctaacccctgcccgcaggaagcggggctcggaggctccctcgcaacaaaaggctaaattcggtttccctggttccgcatttccccagggagctctcctcgtaaaactattccccgtgaaggcggcagggcagaggtccagggcgggctttgctgggagcctcgggaccccgggttgggggccgtggggcggcacctggcgagctggcgggtgggcggcgagccgaggcttcccggcctggcggcaactcgcccctctgccctcagccctcccggctccgctcccttcccccacgccgccctgcccctcccccacgcccctttctctttctttctttctttcccagttcgcttgcccccaccccagcggcgcccgccgggctcctcgcccaatggccgcggggcccgggaccgcatcagctgatcggcccgggctcctggccgctgggagccaatcagggcaccgggggcggccccgggccgcggataaagggtgcggggctgctggcggcyctgcagagtcgagagtgggagaagagcggagcgtgtgagcagtactgcggcctcctctcckctcctaacctcgctctcgcggcctasctttacccgcccgcctgctcggcgaccaggtaagcccccggacggcccggtgtcacgcaagcgaggcgcgccgcccctgctaccccgcgaggcgcgccgcccagcctcttttttcggctgcctgcccctccagtcccagccctacgctgcggcctctccggcccatgcctgagatccggcatgagtgctcctcccgcgtgcttccgccgcyggtggcttggacccgtcggggctggcgctggtggggcgcgcccttggccaggctctgggaagggcggggtgagttgttttgatcttcttttcactacttgcggccgaagcgccgcccctggaggccgttgggccggcctgcgccctggggctcgcagtggtttgtttgcgctgtggatggagtggcggtgcggtcccctgtggagcgcaaacaaggcgcttggttggcgcgggcgcctggctgccttcctcgtggtggggccttcggagcaatcgtcctggttctggcgatggttgagacgcctcgattgcggcgtrtaacggtgagcgttgtttgggcggccggctcccgcctcggggtcccgggggccttccaatgtgaccgaacaatggagagcccgggcctcggmgcagtcagtggagaagccggkccgggcggaggcagcagcagcgcgcagtccctmcggcctgcgcccccaccctcccccggaccccccaacccctcggcggcagggtatggccacctccgtgaggccctgagattcggacgggggcccgaggggcagggcgcccactttagggacatttcagtgggaaggggctgctctcaaagtggataattataactccctcgggggcgggaagcggggatcctcccccagccgcaagtccacgaagaaagcaacgaatgaaaattatgaagacaacgaraagtcagactcctccgggtcgcgctccagctgcttcggcttcgtcgcctactctgtgaactccggggagagatctcgagtcaagattaagaccttaacccaccaacctgcctgttcggacaccccccgggccggccgctgtctgtccccttctccatcgccctctcccagaaagctccggtgcttggaccagctagagtctgagaaagaggagaggcgcgaacgccactccaaaaagagaaggkttaaagagggcaaccctaacgatacgcttgactttctgtggctggggtgagtgagggggcagggaggacgaccccggagttggtgggagctgcagaaackgctgaaaacttcagaatccatttcccccacgtaaacttggcaccgcagcagcagcagttgatagagtggcactaggctgctggcatgcaactcggctcacggaaaagagcaagagatccgaaactgaggcttaggacaaagtgtgcatgatattggtggtgtaacatgttggagaggacagccgagaaattgggttgtaggttttttttttttgttttccgacagagtctctatctgttacccaggttggagtgcagtggtgcaatctcccggctcactgcaacctctgcctctggggttcaggcgattctcctgtgtcagcctcccgagtagctgggattacaggcgtgcacaaccacgcccggctaatttttgtatttttagtagagacgggagtttcatcgtgttggccaggctggtctcgaactttgtacctcaggtgatctgcccgcttcggtgggttgtagcttttagcgggagctaaagggttctgggatggaggtgggaagtaggatttggccggctgagtcttctagaggcaatattggggtgttggtcttccccaaggggaagggtggtgaggctgagggagaagcagttatgttttcagctgggcaaacatggacggttgccygtagaaactttgccactgtacttcagaacgttgccctagtcgttggaggagaacaatgtgttccctttctagccaccctggtccacggagggaggagggagagagagaatgtttcctcttcggctgttgtggcttgagagtttctcttctttcggaggttttgtggtagtggctggcagttattagtatgcctcatggcttttaaatttccagatctttttgatttagaagtggaaatttcctaattacttgaagtcttgtagaattccataatgttgtgattcttgcccactatcttaagtgagactttgcatgagacctatggaaattatggcagcattccccttagaatctggcttgaatcagcttttgtgtaggaaactgctagccttctaaatatattgtaaccttgtttcatcctcaaatctaaatgtgtaatgagttttcttttggtggggaggggcggtgggtttgagttaagaccacagctaggatgaaaggcaaagagaaaaacaaactgtggaagccaagcctgttctgtggctggattttacttatattggaagaagttctatgttttgtaaatttgtgtattggttttgatttgtttcctctgatagtttagtatttggatagtttagtgttaacctcagctacactgaaggaatagaccttagtcctcacaagtataagttctagcttggaagcctgggttctgcagtagctgtggaacttaagcctstgagctcagggatgcagaggcattgagttactaccaagggcctgatcttttctttagcaggcatctgtgttaattgtttcaaaaggtggtgatcagttttacagcctattataaaggagatttttgcctactataaaactaatccccctgaaagagtgagtaaacataactttttgtgtgttgacttccacaagggaaggagttggcacttacactctgacttttgattcagtcgtccttcttgagccatttttgcaggggatcagtttggagtgggcgttaacaatgttattctttttttcttctccagaacaccttccaccatgaccacctcagcaagttcccacttaaataaaggcatcaagcaggtgtacatgtccctgcctcagggtgagaaagtccaggccatgtatatctggatcgatggtactggagaaggactgcgctgcaagacccggaccctggacagtgagcccaagtgtgtggaaggtgagacagcaatgtggagtggagcacatgctgggtgggatctgcagaggggtgggcagcagcctttgactcagcctctggattaggcctctttcttctgtttgtaaaggttttctaaggcagggcttttcagactttattcaktcaacattargctcctacactgcctcaaagcagagcgacgatggaaccctttatttcaatggaattgtgcacgtaggccagtgtattgaagaaaaactaagtctggtttatggagagttggcatggggcttagaggttgccgacctggacatccccacttagctggctctaaggcaccctcagaaaaccactgctctaacctgagaatgccatctagtttacaaactcttagaaaactgtgtttaatactcatatcactggcttctagatgtgaagcaaatgctctacaatggtttttaaataggactaatttttagttgatgccacttttggaaattcttaaactaattgcrtatccctctaggagctacagttagattatagttgtgaccttcatttttcagtctagaacaagccatagtcttccctcttctggaaaggggccagaggaaagtatcatatcctacctagtttagggtagtttacttttcctttttgagtaagtgaatgatcataatacaaagcctatattgtgtacttgctatgtggcagatgatagtgcacagacactgaagatacaaagtgagagtctcgtctctgccttcagagaactcagtcagctagagagaccaagcagccttcaaaacagtgggaaaggtggataggtgataagggagcatcctagagtaagtcatcctgctagtcgtctgttccctcatctataaaataaggacataacttgccagaatacactgggggcataagaaggatgcaacacattacctaatggaagaatcagaatccttcactatctcaatattttaagtgattgataggatggtagtgataacagaatgcttcagcttgtctcctggaagacatttgggaagggagtatctgatatatttcttttaaggaattggtacaatggtcttacttggaactcaaataggaagggctataagatcaggtacaggtgccagggtatacatattaatgatggcatttataccttaatgaattcctggaaaagagatatttagagatgggaaggtgagtgaagggctggctgtatttgcattgcttggaaagctcctgtatgttttaaatgtaattttccctctttttgccccagagttgcctgagtggaatttcgatggctcyagtactttacagtctgagggttccaacagtgacatgtatctcgtgcctgctgccatgtttcgggaccccttccgtaaggaccctaacaagctggtgttatgtgaagttttcaagtacaatcgaaggcctgcaggtgtgttatagcacagctrtggatacccctcctcaatctgtgaatgctgtgaaggggagggagaagacattctgaaatcagcattgggaagactaggcaatttcagcactattttaagaatctgagtgattcttttccctgaacttctgctttgaggaagagataatatggcccatctttctatggkcttctctgttggttgcataaaatagcattggatttgtccagatctgtttgccggtcttggagtccccagtaacagccttcctgcctggaatgtaggccaggacaaatgtaaaccaatggacaaatgtttctcaaaaattatagaatggctccaagtgcctgagaaatgaagaataaatctgacaaccagaagcagctgtcttgtgaatagagggttaagtgcctggcatttggtgcttgggaggtggccagaatgcagataaggtgaaagttgccctgttctaaatccactcccatgtgacttggttgtaactgagtttagttaaaactgaagtctttcagagtcttcctacagatgtacaattaacagcttctctcatttttctgactcggtgatcccaagaaggcctatactgggtcagttcataccatagtgcacacctcagttgtatagaatccaaggactattctcccatcagcatcggtattcagcatctatgtctttagatccctgatggcgtattattgactcttttttctagagaccaatttgaggcacacctgtaaacggataatggacatggtgagcaaccagcacccctggtttggcatggagcaggagtataccctcatggggacagatgggcacccctttggttggccttccaacggcttcccagggccccagggtaagtctccttgggttagaggtgaaattcccagaagtgtctaactgtgcaggaatrccccttcccagggrtgggaatgactttcagaatcaagaagcaaaataatacagtaaaggcgaaacagccctcacatcaccaaagtccaaaaatggatatgaatatataaagtaaggttttagggggaacgtttggccccactgaagctgtggtgaagaggaactcccctattgcccctcccctgccccgcacctgcagatgaaggcaaggatagtgattcaagagggcaaggcttaagggccttctgatctctgactttgggattctctggatttcttgactcttagygttttgtcctgatgcttctgtaggtccatattactgtggtgtgggagcagacagagcctatggcagggacatcgtggaggcccattaccgggcctgcttgtatgctggagtcaagattgcggggactaatgccgaggtcatgcctgcccaggtaagtatagctccaatccatcaatgaagaagggtaggtaggtgyacataggacttttgctagtaagggctgctgatacaccactcactaacccaaaacstaagaacgggttggagtacaggtgagaagagaacaggtttaggagattctgagttggagtgagcagttagctttgttttaatggccaagcttctcgtt[450 bp omitted]ataatttatataatatatattagtcatatatcattatataaatatatatcgatatatatatttgtgacatatgtcatggtgacagggaaaagttgacaaattcatgcatttgaaaatcttttagaactaaattagtaacaatacaggcatgtggataagcttaatgcttatgagggggagaaagtttcaaatgattagtcttttcaacaaacagtaactttgtactgcttgtcgggcactgttctcaccactgagacacacaggtaagaagatgcagccactgccctcatgaagtatttgttctactggtatcatattttggtgcacttcattcttggctccatacctggagacaaggttggactgccatcttttctgtttactctaggtacatcgaggaggccattgaraaactaagcaagcggcaccagtaccacatccgtgcctatgatcccaagggaggcctggacaatgcccgacgtctaactggattccatgaaacctccaacatcaacgacttttctgctggtgtagccaatcgtagcgccagcatacgcattccccggactgttggccaggagaagaagggttactttgaagatcgtcgcccctctgccaactgcgaccccttttcggtgacagaagccctcatccgcacgtgtcttctcaatgaaaccggcgatgagcccttccagtacaaaaattaagtggactagacctccagctgttgagcccctcctagttcttcatcccactccaactcttccccctctcccagttgtcccgattgtaactcaaagggtggaatatcaaggtcgtttttttcattccatgtgcccagttaatcttgctttctttgtttggctgggatagaggggtcaagttattaatttcttcacacctaccctcctttttttccctatcactgaagctttttagtgcattagtggggaggagggtggggagacataaccactgcttccatttaatggggtgcacctgtccaataggcgtagctatccggacagagcacgtttgcagaagggggwctcttcttccaggtagctgaaaggggaagacctgacgtactctggttaggttaggacttgccctcgtggtggaaacttttcttaaaaagttataaccaacttttctattaaaagtgggaattaggagagaaggtaggggttgggaatcagagagaatggctttggtctcttgcttgtgggactagcctggcttgggactaaatgccctgctctgaacacgaagcttagtataaactgatggatatccctaccttgaaagaagaaaaggttcttactgcttggtccttgatttatcacacaaagcagaatagtatttttatatttaaatgtaaagacaaaaaactatatgtatggttttgtggattatgtgtgttttgctaaaggaaaaaaccatccaggtcacggggcaccaaatttgagacaaatagtcggattagaaataaagcatctcattttgagtagagagcaagggaagtgrttcttagatggtgatctgggattaggccctcaagacccttttgggtttctgccctgcccaccctctggagaaggtgggcactggattagttaacagacracrcgttactagcagtcacttgatctccgtggctttggtttaaaagacacacttgtccacataggtttagagataagagttggctggtcaacttgagcatgttactgacagagggggtattggggttattttctggtaggaatagcatgtcactaaagcaggccttttgatattaaattttttaaaaagcaaaattatagaagtttagattttaatcaaatttgtagggtttctaggtaatttttacagaattgcttgtttgcttcaactgtctcctacctctgctcttggaggagatggggacagggctggagtcaaaacacttgtaattttgtatcttgatgtctttgttaagactgctgaagaattattttttttcttttataataaggaataaaccccmcctttattccttcatttcatctaccattttytggttcttgtgttggctgtggcaggccagctgtggttttyttttgccatgacaacttytaattgccatgtacagtatgttcaaagtcaaataactcctcattgtaaacaaactgtgtaactgcccaaagcagcacttataaatcagcctaacataagatctctctgatgtgtttgtgattctttcaaatccctatgtgccattatatttctttatttcctaaaacaggcaaaataagctcaagtttatgtactctgagtttttaaaacactggagtgatgttgctgaccagccgtttcctgtacctctctaagttgggtatttgggacttaagggattaagtttttcacctagacttagttacacacaatcttggcatttcctagcctagaggtttgtagcagggtacaagccccactcctcccccttcctttgctcccctgagtttggttttggcttaccataacattgttttgaccattcctagcctaatacaatagcctaacataatgtaagattaactggctttacgatttctattctctgctctcagtgattcatttaagtaacaaatattagctaccctgctaccctggttgaagccttccaaggctggctatgccctaggcatgggctcatccttgggtgtatcttgccttgcaggaagaccagtggaccgattgtgattctcaaaagctctgtgttgtcacctgtgcccttgccccttgctcttatcttggtccgtgtatctgggagttcttccaccttatcctggccaattcctaccttcgttcattcctcatgaggttgggtaaaagctccctccggctcccatgatgctgtgcatatacctagcaaaaagcaattattggacacattggagtgcaatattattaatagcattaatactactaataatgtgggcaatagtgattgtttttaaaaggcagtatactcttaccagtgcgaggtagctggggcctgtgatagtttttagagataagttcttcaggcaactgtgtattttacactagtcaagtaatcctagatatccgtggtttttcttaagaaagttggctcgtaatatgatttaatattcaaagtagagtcatctacctattagcttgctggcgtggtcctagtttatgcctgtttcagcatgattgttgagtaccctgtttcatccttagcattttcttgattttgttgttaaatgatgtatacccttatttccattgaatctgtgcttccacccccccaactgaagttgtcttccctttgcttagccacccttacaccctcttggatggtgtatcctacagtgtaagcactaaactgaagaggcagtgacctgagcactttggattttgttcattgtaatcaattccatgacaaaatgattgcatgagaaggaattttaaattcataggatcagaatttaggtgaaaacaaccagcatatttgtttcttcaccctctcacctagaattagctttgacctacaggtcacagtgcaatccccttgtatttctaaggtgttttttatagttcatttgcagacaatgggttatgtgataacttttatcagtgatagattaaacagaataatgaccaagctttcaaccttaaggagtcaggccagtatttacaaaaggaggtctccatgaactccttaaatatgagttcccctaatatcatcttgccaggtactaaataacaactgatagcacaagctatagggaatttgaaagaattccatggatgggtgttgtctagggccttttgttgtttttgagacggggtctgactctcacccaggctggagtatagtgtggcgcaatcttggctcactgcaacttctgcctcccagattcaagcgattctcctgcctcagcctcccaagtagctgagactacaggtgtgcaccaccatgctcagctaatttttgtatttttagtacagatggggtttcaccatgttggccaggctggtcttgaactcctgatctcccaaagtgaggtcttgaactggtcttgaactcctccacctcccaaagtgctgggattacaggcgtgagccactgcaccyggcctagggccatgtaaaaagccagatctgtgctgctgtctgtgtagaagggtagacaagtggatgagaagttcctgaactattcttggcccttttaccactaagtgaaagtaacttgctgccccaaagaaagatgtctcatcattcgacaggactttctagttgaacttcatgaaagcaagagatcctgtttttcttgctcaccactgtatcttgagacctgttgtagtgcctgcaatacttatttaataagttatttttaagtatcagttttgtgagctttaactctatgaggtctttgttgtttgactgtattttaactctggccatgacagcaagacaaagttccatttttattgagcttaaaaagaatcaaggccaggtgaagtggcttacgcctgtgatcccaacactttgtgaggctgcagcaggaggatctcttgagcccaggagtttgagaccgttctaggcaatgtagtgaggtccagactccacaaaataatttttttttaaattgcacgcctgtagtctcagctatcaggaggctgagatgggaggatgacttgagcccaggaaattgaagctgcagtgaattgtgattgcaccactgcactccagcctgggtgacagatcaagaccttgcctaaacaaaacaaaacaaacaaaaccccaaaaaacaaattgaaaatgttgattctttttactacaaacattatggcagcactaaaaacttcgtgggagtgtactgtggaaaatagtgtacttaattaattctcattgtaatcaggctaccaagagccttgtgttgctttaagagttataactgccaggcacagtggctcatgcctataatcccagcaccttgagaggccgaggcaggtggatcacctgagatcgggagtttgagaccagccgggccaatatggtgaaacaagctgtgtctctactaaatacaaaaaattagccgggcgtggtggcacatgcctgtaatcccagctgcttgggagactgagacaggagaattgcttgaacctggaaggcggaggttgcagtgagctgagattgcaacattgtactccagcctgggcaacaagagggaaactccatctcaaaaaaaaaaaaaaagttgtaactgaggctgggcatggtggctcatacctgtaatcccagcactttgaaaagccgaggcaggtagatcacttgagctcagaagttcgagactagcctgggcaacatgacaaaaccccatctctacaaaaaataggaaaaattagctgggcgtggtggcatgcacctgtagtcctagctacctgggaggctgaggtgggaagattacttgaagctgcagtgagccatggttgtgccactgccctccagcctgggcaacaaagtgagaccctgtctcaaaaaaacaaaaaaaaattataactgatgtaaactggcagtttaggctgggtgtggtggctcaagcctgtaatcttagcactttgggaggccaaggcaggtggatcacctgagttcaggagttcgagaccagcgtggccaacatggtgaaaccttgtctctattaaaaataccaaaattagcaagatgtggtggtgggtgcctataattccagctactcaggaggctgaggcaggaggatcgctggagccagggaggcagaggttacagtaagcaaagatcactccacttcactccagcctgggcaaaagagtgagacatatcaaaaaataaacaaataaataaataaataagtggcagttcatcatttaactccaaagactttgcgtacatttctactgaaaacaatctgagcwgattagaaccctgccattttatagcctttagctcgatctccgaccgttcatttaaaaaaattctacttcaggccgggcatggtggctcaagcctgtaatcccatcactgtaggaggccaaagtgggcagatcacttaaggtcaggagtttgagaccagcctggccaccatggtgaaaccccatctctactaaaaatacaaaaattagccgggcttggtggtgagcacctgtaatcccaccctgccgagtggcaggctgaggcaggagaatcgcttgagcccaagagccggaggttgcagtgagccaagcttgcaccattgcactccagcctaggcaacagagtgtgactccatctcaagaaaaaaaaaattctatttcattttacaatatgcagatatatgtccatacacatgcataatataaatgtataccatatttgtgagaatatgcatatatgtacacattagatacacaatacaagcacaatacatatgtattttgcccaagatacagcattttgtaaaggagacaggaatttagtaatatatgttccagaaacagtacacaagagaattcgccgagatgagaaagttgtcactaggaatggggagtggtaagacgtagaaggtataattgttcttaaagttctactgccaactctttccaattaattacccactctgccatgctttatggacaggaggttgtcggacactgtcaattaataaatatttgagcatgatacactgcttggagctcctctaatataggagagtgatatcctagtgcatgttacagagggagtgtccacacagttcctattgtcatttgatgagttacttttcaggggccttgtacctgagcaagttgtcctctttttgatggatttcagattgagttacctgcattgtcttgagattgcagcgtgtttcctccactgtacggcgtagtcagcagatctattagttaaactccagtgggccctcagtcactaaatctatcctctgtgttgaaggctttctgcatttgcctttcaataaaggtttagaataactccttctctgtgactctgttttactcctctattgacagtaaattgaatcagcatttaagatgtgaaaaaattaataatcaaatgaaatgggggtcaaataggcactagtttggtgtgttggggaaagcatatgaatgaggggtggtcaagtgaatggtcaagtctcctttatgaccctccttttatagctaaaggttgtcactggcagcaccaaaaggaaggggactcctgggcccattgctatgtatcccagtttattctcaaatgattttgtgagctgttttggtaactgtttaaataaggctacagaatgaaatgtagtatcacattgtgggaggagagggaaaaggattccttttttcgttttttggaagaagtgaacacttgcctggactctgggaaggaacctgtgatctaattagctaaatttagagagacagtacagtaagagaatgcacttttccagagcttcctttgcaagagaggatccatctcttcaaacaatctaccaccaggctcattcctaggtgggcctaagatccagaaactaccaatctattaacatttttatataaatactgctatggcatagcacttagccaaggaagccttcaataaatgtttgttgtttacattatcagagaaaggtcactactatgtcactggctaaagaaagtaggtagaaggctggggtgtgaggcctattaatcatagtattaatcataggtattaaaggtttgtgtatgagctgcctcactcctgcagtaaattccaaattacttagttcagaaatatcctcctcttcctgatgccaaatgcagggcctttggggtggtcatctgaaatgctatgtcctggaagctgctgagtttccaggttcttcccttctcttggaagaggatggttgggaatatacttagattatctgtgtcattaagtgattcactcctccaggaattgacaccattctttacaaaatcagcctgagataagctatggcatccccaaaattccttccaaatttggaattttatgctgtgaaccatcacacccaatattgaagttaagcagtttttggttaaatgtgctaccttagagggtaaaagagctcctccaacttatgactggttatttgtcatcaaggttcacagctgaattcagtgttggagaagttggaaaaagatgaacaagctgttttgttttgttttgagacagagtattgctctgtcgcccaggctgcagtgcagtgtcgtgatctcggctcactgtaatctctgcctcctgggttcaagggattctcctgccttagctttccaagtagctgggattacaggtatgcaccatcacactcagctaatttttgcatttttagtagagacggggttttaccatgttggccaggctggtcttgatctcctgacctcaggtgatctgctcacctcagcctcccaaaatgctgggattacaggtgtgagccaacatgcctggccatattttaacacagcatttgggtgtcatggaggggt

SEQ ID NO: 95192 - DNA, 71343 bp, Homo sapiens
cagctgctcccagatccccagtcacatagtccttcaccagttccatgatgctagaactcccacacctcactcctgaacccaagcaggatttcccttccctataaccattaattccccaacagtgaatgagggccgtggaattttgtttccctattgttaacagagttttttctcaacagcaactagctaaatttctcagggtagaatgatgaatgcacctgcaacacgacccctcttaacacctcacttgaccctctgtgcaggtgctcctgccgctcttgattagagtgctgaggttctgacactcctccctgtgccacacaaatgcccagtgattcatttataactgacacccaagccttcactattcactgttgcaaagaaaattttggacctctgagagttataacctttccccatttttctttctgctaataaattctggagagcaataaggataacagtaagacatccatcatcttgtggggtttacgagcagctggcatgacattctcagccaatataactgcaagctgactttaatcacagtctgttgatctcagctttcagaaatattgccttgatatatcattctattctttctctaagctgaatgcatgaaggaaggctttctgagtttcaccatctaaacaccagggaggagggtcagaggaatgcagtgaactcttatttcatttgcaaaggtaactggaaaacacttggatcttgaaagtccttgagccttgaaaaaagacaatttaagctaaagtctggggacattaaagtagttgcaaatttgagcaaactctgtgccaaacaattgctggatttcactgctctttaataacattcatcaaatatttccacattttctaagacaacccttgggttaccactaaggcttgtcattttttctaattaatggtaatctaagtttgtgaatcttcctaaaaatttcactatttttcagttttgcaaacataaaactcagctgtcttaaacaccatctatgatccttatagcttttgattacatgacgggatggctttgaaatggtgagcttctgtcccctggatctgacaaaacaagcaatcctatttcatttgcatttggcaagtgcttagaccagtggcctccatatattttgcacatgctccaagccaatagaaaaatgttaagcatgctccctctatgctaggctgtggtaacgaagagacccaaatgtgtataatgactgaaatacccagaagtttatctcttgctgataaaattgcatgaagtgaatgctcctggtaagttggcagtcccctcccagcaatgtttcagggatgaagtctccgtctatctcaggcctccgacattcccagggcctgttccttttctgcatgtaagccagcagaaggggaaagagtgtaaaagaagcatgactgcttctcaaaagccttggtccaaaactgacatttataacttccattcacctcccgttgggaataactagagaactggtcacacccacatgcaagcaatctggaaaaagttgccttgggctgggcagcagcttgccagctaaaactgtatattctgaaatgaagaacagattttggtgaacagctgtttgtctgccacattctcagtttattcattccttcattcagtcattcttatttatttataaatgatatacatgtgtgtgtatatatatacaaaactctgtaataatatgcatattgtaaggcatatacagaaatataaattataaaggatgagaaaaacaagattaaatagaagttttgtttttcctgcagcccattgcatcatctgtgcctcccatggtcaggattcaccccctagattcactactctagactccaagaggtcctggaaattaggaagtgcccttctagagaagcattttaagaagtaaaagatactgccctactgctagcctttcccctcttcttgtagatggcacccaggtccacaaagctgctcaagccccaaatctggaaatcatcctcagttcctcactgcccattacctccatatccagtttccagccagtcctgcctgcttgccttcccaaccagatccagaatccctgcttatcactccaccttcatgactctcaccctacccccagcaccagcatcttttctctggacactgtaagagcctcttgtccttacaatccattcttcatgggaccgccattgtgatctttcaaacatataaagatgatcaggttattgccctgcaaactctccaatgggctgatacctcaaatacgatcagcctcctcattgaagcttacaaggcacagtaaacattctacaaatgtttcttgaatattgttaaatatatacacacagggggaaacgtctgaaaaaataattaccaaactgcggttatgtttactgttaaatcgttcaatggcaacttttataattaagaaaaaagttacttatattttgtaaagaaggagagggagagaaggctaataagaaaagggcatctgtttccaggtaaactctactctaaagaccagttattattatttttgttactattttcctctcctaattcaagcagatttttacttacttgtcttgcaaaaggtttgcagcaagaaagagaacaaaaaagatactttttacctcatggctttctttttttcaaagagcaaaacccattgaggagaatagggcctgctgacaggaaagtgcctcagatggaaggtgagcaagggatttccttctagaaaaagaaaagccttaggttatggggaagagagatctaaggtgccttggaagaaaggtcatgtgcagccttgggaagctgggcacctggattctgggcccagggctcccagttttataggtttcagggttccaagagccaaagggaaagtgaaagaccacagcagtctcagtggaatcaatgtagataattgtgcaatacaatatgttggccctgcgtaagacccagatcttggcacacgttcacagggcatgagggagatcagcccaaaatggcagagactaaatttcctgccagctcaaaaggctgggtgtccagagccaaaatgaagttgatttataaaagcaaaaaaaaagttatatttcttgaatgccttcatttgtgtactaagacttataaccactatcatcttatacaaaaatgtgcaaaggatacatcactttcataaatgagtactgattcaatgtcattcctacaatattgtcactcttactcacatgtattacgtgcatttcagtatgctttcctagggcaaaaagtggaggggaaagggtggatcaatgacagtgctagtgttgccacagagaatgcatctcatgcaagcatatcagctggtacatgtttcagcgggcaaacatctaagaaccagttctctatgtctgttccattctgacttaattacagtttgtaattacagtttgttatttgcattcctaaccaggcctacttcagaaccttggacatagggaaatgacatggcacagtggttgagagcacaggttcttagctaagactgtctgggatggaaactaagctctgccagttatgtgacatggagcaagtttcctaatccccctgttttcttatctggggataatgttactcttacttcagggggttagtgaggagtagttgcgttcattttaaggtgtttagcacagtgcctgtcacattgtaggctttctgttaaacgttaactgttattactagattttattatagtaagcacttagaaaatgctgaatgaatgaatgaatgaatgaatgattgtcttaccctctggtccatcaagagcagaagattatacaagaaaatgaccagattattctctatttaggtgctgttccagaccaaattttgccacaccttgtttttgctgttaagacacatatattcaggccaagcacagtggctcacacctgtaatcccaacactttgggaggccaaggcgggcagatcacctgaggtcaggagttcgagaccagcctggccaacatggcaaaaccccatctctactaaaaaaatacaaaaattagctgggcgtggtgatgcacgtctgtaatcccagctactcagaaggttgaggcaggagaatcacttgaacctgggaagtgcaggttgcagtgagccaagatcgcatgccactgtactccagcctgagcaacagagcgagactccatctcaaaaaaaaaaagacacatacattcaggtacttctcacataccctgaggcattagcaaggtgctacatggagtcatgtctactgtcccacttggtgaccaatagtcaacattagcaaaaactttgaccataatgaagaatataggttatggttatacccaaaaaaaattattctggaaatgctgttttctgtggcactcaatctttcacttttggcctcaggtagcattagaataagtcaattctgggaatcatggaaaatcaataaatttgttgtctttcttctggggatatatttaaaataaccctcagcctttgggaggctgaggtgggtggatcacaaggtcacgagttcaagaccagcctggccaacatagtgaaaccctgtctctaataaaaatacaaaaaataagctgggcatggtggcagacgcctgtaatcccagctactcaggaggctgaggcaggagaattgcttgaacccgggaggcggaggttgcagtgagccgggatcgcgccactgcactccagccttggccaaagtgcaagactccatgtcaaaaacaaacaaacaaaaaaaaaaacaaataaaataaccctcagccaacaactcaacaggatgaccagctggacagcagccatttgaaaacgctccaatttcaagaaattgtgttgataaatcattttccaaatattctccagaaaaactcctatgatgaaagaaaaatgaagcatgtatttatcatcagtccctctatgttgccttcccactgaaattcagaacaaaagccacaaacatgccatattttctcagatctttatacagttccctgagcatggaacgtcctccacacctcccatttcacccagccccttaatcccagtgagtcatagttgtatagtgcagagattagtagttgaattcaaatcccagctccatatttcccagactgagtgacaatgggcaaagttatttaacttccctgttaatcagtttcctatagggatgatggttacaccaaccttgtggggctttggaaaaaaataaatagcttaatattcggaaaatgcatagaatagggcacttctggcacagagtgagcattacataagttgtgtcattattgtctttcaagtcctagcaccagtttcacagaaacctgaaggtttgttcattcccctgggcagggttatgcacctccttctccatgcttgtactcgtctctactgtaatatgtatcacattcagttataaaggttagtgtgtatgtctcccttgccactactcagaactataggaaatacaaaggcagtcattttaccttttttttttttcaggtagggtctcactctgtcgcgcaggctggagtgcagttgtgtgatcttagctcactgcaacctccacctcctaggttcaagcgattctcctgcctcagcctcctgagtagctgagactacaggcgcatgccaccacgcctggctaatttttgtatttttagtagagatggggtttcaccgtgttggccaagctggtctggaactcctgacctcggatgacctgcccacctcggcctcccacagtgctgggattacaggcatgagccaccacacccagcccatcttacctttagagttttcaagccttacaacagagctgtgaacatagcagatgcacaacaaatatttggttaatgtatgaaatcattaattaaatgtcatttaaacttttcaagcttctcatgaagtcagtattttcccctccttgtatgaaactgtcgagcaatggctatttctgtggctgcttctaaagccaaacaaggtaaggttttcagttatctcagagactgtacaataatcactggtatcataaaaattcattattatccctgttaatagagtggataaatatccttgctgggacagcagtgtcttggcccagcatgtgtcatctatagagtggactcttagagtttccttaggcagctctccagcagtgcatccctccagcattgctgggatatgggacatgtcgcagctcccagaagagatctcccagtggctagtcacggtcaatctgcaatcagagaagggttttggcaagaaagtgatccaaggagacactgaaaatagcaagttcaytgaaggccaagggaacatccccttgtgaaagtaagaaaggatgataaaataagaagcttactggcagtgaaaagaaaacatcctgtctgagttgaattgcaggagggggagtcagggaaggytccagccaccttggaaaggcagcatggagcagcagggaagccaccagatttggaatctgaacaatcaagtctcagttcttcatttgatgagcgcactttctcctctttaaaatggagacccagcctgatgtggtggctcatgcctgtaatcccagcactttgggaggctgagccgggcagatcacctgaggtcgggagttcaagaccagcctgaccaacatggagaaaacccgtctctactaaaaatacaaaattagccaggtgtggtggcacatgcctgtaatcccagctactcgggaggctgaggcaggagaatcacttgaacctgggaggcagaggttgcagtgagccaagatcacgccattgcactccagtgtgggcaacaagagcgaaactccatctcaaaaaaaaaaataataaaataaaataaaataaaatggagactgaaacaaagaaaactgtgaagcacactatgaatgtaaaaatttatcctgtgttgttagaaaggccccttcacacagtaattcacagaaagggttcccactctgaacaaggtctttccatcttctccacttgagggctgaaagggatgtctctgcctccttttgatttaaattagcaggttcttaagaagtgagggtgggcaacagaattggaggctttcatgagacaaaacttactaggaatttgcttaggaatctgcttttgggaggcactatgtaaacccacacagtgtgacttacagcctatgaggaactttcttatgttaggctcaagtgttaaaaatgcaaaccgcctgtggtgcactgctggagctgctatccccacctagcaagagctgactgcacacgtctcttcccamctccttgaaattggccctggtagaagtgtttacctcatggtaattgacaaatgctacaaatcagggtgtcttttcttctctgtctccaggagcttgcttatgagcacacctctgactgaggtccacaggactcaagattcctccagccatcactctccactacaaatgccacaaaaatgaaaatttgaccatatacataagtactagatgggaaacactgaaaagatacaccatgaggagggagaaaaaacaaaaagccaaaaaatcttagtatatcaactgcacattcctaccacacggagatctgacaatgaagtatcttgagggtttttggggktttttttgttttttaaactaagaataactgtratatgccagagaattttgaatcagccttatctgtagtctcaaatgaatatattcaaaagtcatattatagcagaaatgcaaatatcttgattgcatattgaggataatataatggtggaacaactagcttgtcaaataggtgatcgggatggaataaaaatgcattcttggttgtcttctatcccaatgagttaaagtaatattgcacttataacttttcaatacattatggtcatattgtttcctcatgcgtattttatttgttctttttatcgtttaaatggattgttccttttcttctggaactccaaacattatgctaggttttcaaggctggtgcttgtgataggggaagagaataatgcctgtgtgtgtaaggtgcttgatgtttctcagaggcctttcctatatgcaatcctcacttaatcgttatacacacccccaaagcaaggcatacccattttcagacaaggaagaagacactcacatgataagaagagctactggaatctggaccctgctgtcattattgttcctggacattagatgttgactgttatagccatcgataatgctgccactagaatgatggtcgaattgtctctacttctttgcatcactcttacagtcataaaactcaaaacaagaacatctgcttaaccgggcttaggtctcctgtacgtacactaactggcgagatttcaagtgaaccggcagcttgtattttttgggcttctgctgtgaaatgaaaatccttcatctaacaagacaaaaaatggtacattctccaaacacaggaggaagtttaaattcagaagagtagatattattattactattatagtaagcatctattctacccatgggagcctatcatcttttgagtcttttctctatatttggagacatatccaaattatgagttgttatataggattcacaatgcaaatttccagctgcccttgcagctaggattcagggacatgaattacttggtgtcaatcaaggacaccatatcattataagattttgattcaaggccagctgcagtggctcatgcctgtaatcccagcactttgggaggccgaggcaggcagaaaacttgagttcaggagtttgaggccagcctrgccaacatggtgaaaccctgtctccactaaaaatacaaaaagtagccagggatgrtggcaggcgcctgtaatcccagctactcgggaggctgaggcaggagaattgcttgaatctgggaggcagaggttgcagtgagctgagattgtgccactgcagtccagcgtgggcaacagagtgagactcaagaataaaaataaaaaataaaataaataaaaaataaaatgacaccaatttatttttaaaaatgtttttgattcagaaggaagcaataagaagaaaaaggctctgcagaaaaaggaccttgaatctttgcaaatttgatggtgaaggggatgcagaggtatctggtatttttttgtggtggctgtttcccagggtttacaatagggtattttggagataaaagcaatagctgtggaacagcagcatttttccattaaatctgctgtttagtttgggatattattcctcaaggcttattctcaagcccagttttccagttcactcaacagtcccgtgatccacccaatatttttaaataaaacgcttttctattgattcaacaagaatcagcgtctgttgtttggagccaagaactttgattaatacagttatatttcctataaatgtggaaacttatgtcttaaaggttaaattgctcaagatgacaaagtcagtcaatgacagggcaaagatttgtacctggactgtcataatctcaagcccatattctgatgcaaaaagagtataccataaggtcataaaactaatgagttgtgcttgagttgttttaaagttagtataaattatagaaagatctagtctaacctaaagctctgaataacaaagtatcaagtggagtccacaacccaaatcttttgctatgtaatctaatgtgctttctatgacacctctcatcatcataatcctatcacattttgctttatgtattttgaaactaatttttaagtgcatttgtgttcaagaatattatacagagaagagattaccattatttcttgcatcccacacctctctgtattcaattttcaacttactgaagtacatcttttaataattctttcagccagggtctattttgaattatttatcagaaaatgcctttatttttgcctcattcttgaatgatgtgtgttttctggatagtatctttaaaagatgggcatgtatgtcccttctgccttccttgcaaactaccctgctcctgcacctgcctgggatgcagacctgagggacacagctaaagtagccatgtgggatcctaaaatagaagccgcaaattgagagtaacagagccactctatcagcccttgacatctggactgttacatgggaaagaaataaatttctatctcttttaaggctctatattttggggtctatcctttttaaaaaaaacaatgtctactatgtcttagcagttgtatccctgcttgctttgctctctcctttccttatgccttcctcaatatagatgtgtacggtgccctggtacacactcccaacccctaccttcacttttatttctgggtcctaaccaaaatccacagagtgccttgactgctatgtgacctggccagttgcagttttttcccagcggattttaaccctaagcagggccttgaacattcccaggtattgttaaaggtatctaggcttactagaaagaaactggtcctgaacctgagccaaattccttaaaccttcatataaactccataccctgacccccttgctgctgacatacctaagtagaacatccctttcctctcgctgttcatgggaaggattgctgcagcccactctgtacacaagttcccctgataaatgctttggactggtcaccttagcatttagtgctcctttctttggaatcccaatgagccctatctcaggatggtttggggcactctcttgtgagaactccccagcactgcttttggggtgactccagccaccacttgggtagaacaaaacaatacatgtgtgaatacataaatgcacgtgacctcattcttacttcaatttctcctctttatgtcatatttttctatctcattatttctctgtgctgcattttgggtgattgccttagttmtttctttcagtttacttgttttcttcagaagtctaatctgctatttaacatgtccctttgagttgttaatgtcaacaaatatattcttaatctctacactttctatttggttcttttacaaataagcctggtcttttctaatgacaaaatagtcttctgttttattccttcctttatgtctctgacatttaagagatacttgcattaggccaaatgtttatagtcccccccgaaaaaaaaaaaatcatatgttgaaatcctaatccccaacatgatggcattggaggtggagcctttggtagattcgtgtctttataaaagagagcccagcgcgctccctcacccttttggccataagagtacatagcaagaagactgtcctctatgaaccaggaagagtgccctcatcagaaaccaaatctgtgggccacttgatcttgswcttccagcctccagaactgtgagaaatawatgtctgttgtttgtaagccacccagtctgcggtattgtgtcatagcagcccaaacacatcaagacaatacttatttcatagtctcattcagagtttttaaattaacccagttcttggattgtgatttctctatttattttatcttcaggtttcccttcagggtgattcattttgttcttaattttgtattaagagttcatctttagcagagcttgttatctgaccatacacctgtgtacctaaatcgtagaaacagcccaacatggcactttgtttctggtgaaattctaaggattcaattgtcctggaccagatttcatggtaatttcttagaatgagatttctgtatctcccaaatcctacatctactcatggtaaatgcctgggaaacacatttttcccacccacagccatagaccaactacaagtttccttcctcctcttcataacaattgtcagtattttccatagtcccttcctcacagatgaggcaccccttctcctaggctccagagattattgacaagactctgtcacaggattaccacataaaatacaggaagcccagttaaatttgaattccagataaacaaccttttttttttttaccataaatatgttcctttcaacttgtagaacatacttaccctaaaaaatgattcattgtttatctgaaattcaaatttaaccagccatcttgtattttaatttgctaaatccgacaattctagtcatagtgtcctgcctaaacttggcctgaggtcccatgtcctatctccagatgggcctccacacccaagaccccagatcctggracctatgtgccgttctagcaacatcagccacagttattactctggctctgagttttcttttcacattgagaactagaagatttcccttacttttttcaatgctggttgtaatggacgggtgtggtggctcacgcctgtaatccctgcaatttgggaagcaaggtgggcagatctcttgacctcaggagtttgagaccagcctgggcaacatggtgaaaccccatctctaccaaaaatacaaaaaattagccaggcatggtggcatgcacctgtggccccacctatttgggaggctgaggtgggaagattgcttgagcctaggaggcaaaggttgcggtgagctgagattgcaccactgcactccagcctgagtgacacagtgagacttcatcttaaataaaaaaaaataaaaaacaaacaaacaaacaaacatggttgtatattttaaattgctgccacatattatctagattttctatgtgacagtggtggagggaaggtttccccatgtcagctagtctgccatgttgtcagaaatattttaattacttcacatctgccctcatcctccacgtgagcattgtactatgccatgaaaaaaaaaaatgaagcacagagtggcgaattcacccaagttagttggagacaagggaatgtccaggaacaagtcctcctgacttgtacttcagggatgccgcccagctcattctttctacaggacgggttctccaaagaaagrcaaacagctcccagttttggctaaggttggacttcccaaaaacmtgggtattcaaggattttctttatattttttgggcacaggaaggaagtaaaattctgacttgctacgttttaccgggccaagtcaaagatgaaaggctagatgatgaggttaaaatagaaaattattaactaaaaagggttgaaacgtctattttaagaccttaaattagtcaaaacctagggaatggaagacatagagtcataggatgagaaaataatgtggttttgkattgaaatgtttcagagaaaggccccttttaaaacagttctaaataaagttcttggaacagaagaaaactattttgttttcactttagacatggaaaatcccctggaccagaaattccaaaatcctctctgcatattttctgatttttttcaataattccacatcctctacatggtttccaggcagagcctaatttggccttgaccctgcatgcaccaaagatctcaaattcaagcctttgacataatgtcacaatgaagttttactttctgttcttatatactgtgtattaaggtatcagtttgttcaaggtaaacatttaaaatcatcacagtttttgaaactctgtttcagcacatctacacttatttctacatttttcttatttttatttttagtattctagacatcttaaaaattaatccatgccctgggctttccacccactctggcaggctctgctgctaaaaattcacgttgtataagccttaaagagtgtgtgtccctcccaaacagctcccacatgaatatgagtttaagaaaagaaggtatacattttgctaatagaaatcatttataattcaaaagaaaaaggaataatacttctcgtgtttgtctctggtcccagaacttacttgtcccacaagacctttggctctaatcacctcctaggattactccctctaggtctacgccactcaaagaaaaatcacgagatggcagtctaaattatgactatcccaactttcaaagcaacttaaatcagagaaccgtagaattttaatatatgtcttattacaaaataaaccatgtaacttggaaaacatttggaaatttcgcaaaagcataaagaaatggaaatcacgtatcaactcaccactcaaacatgtttctgtgaataaaacatgttttatgcataaaacacattttaacaaaatgtaatcatactcttcaagttttcaaatttgcttttttcacttatctatatattgtgaacatttcccacaacattacatatttttctacagtaccactttagtgactatacattccattttataaatatgtgtttatttcatcagtcctctctttggsggcatttagattgttcccagtttctcctaactctgtgataattatcattgtagtaaagttattcttgcagttggctattattattatgtccttaggataaattcccagaagtgaaactgattggttgaacaatatgcacattgtcaaaattttaggcacacattgccaagttaccttgtaaaaggttcatcaatcccaccagtagtgtatcagagtacctatttactatcagctttgaggaattttgtataaactaagtgatcatcaataatgcaaaagtatttttcatttatgaaaaggatttacaacatggctcctttaaacagtgagcttcctggtacatttaaaayattattcaatttaaaatatgattttaagtttctgtagaaattttctataacaaaactaataaagaaaataaaatatttctctatttgattttttttaatggagaatgctacctttcaaaggactctttctctttctgtgttcatccagcctgagaagagataccacagttcagcaccattattctgctcataatccatcttctatttcatattccatttcccgtcatgcactggataaacacggcagcactgacatgatgagaagccttccctgaagactgcagcccacactcatctatcccttcactgaactcctattatacttattgtctgtaccacacaattagcactttattatatactgtcttgttctctaattgtctgtaccacacaatttagcactttattacattctgtcagattctgtaattgtgtcatttatttttatcatatctctccaactagattacaagcaccagggtgtcagggacgctgtctggtcctgctttgccattccacatggcaccaaacactgtgccaggcacaacaaggtaggccttcaatacatgctggtgagtttatgggttgatggtgggtgagtgggttgggagatttgttcactgactttctggtgggctttaagtaggctgagttatctggaaggcagagtaggaaatattaattgataaggtactgggtaacagaagattcaggcaccatggtcattccacccactgtccatctgtccaacctgctttgttgcctagtaagtcatttggttctctccacttaaatttttctgtatatagtcacacataacttacaacagggayacattctgaaaaacacgtcattaggcagtttcattgttgtgtgaccatcatagagtgtgcctacaaaaatgtagacactgtagcctactgcacatctgggctatatggtatatagcctgttgctcctaggctacaaacctgtatagcatgctaccgtactgaatactgtgggtgattataacacaatggtatttgtttatctaaacatagaaaaggtatagtaaaaatacaatacaaaagatttaaaatagtacacttgcatagaatacttacaatgaatggagattgcaggactgaaagttgctctgggtgagtcagtgagtgagtggtgagtgaatgtgaaggcctataacaatactgtacaccactgcagaccttataaacattgtacacgtaggctgtacttcataattttagaaaatatttcaacaatgataaacttagctaacygtaacttttttcctttatgaacttttaaatctttaaaaactttttgactcctttgaaatagcacttcacttacaaacattgtatagtcatacaaaaatattttctttctttatatccttattctataagcatttttgtattttatttatttatttatttattttactttttaaatatttttgttaaaaactaagtcacaaatacacaccttggcctaggcctgcacaggttaggatcatcaatatcactgtcttcctcttccacatcttgtcccactggaaggtcttcagcggcaataacacacatgcagctgtcatttcctatgatgacaatgcttcttctggaatacctgtgaaaggacctgtctgaggtgcttttacagttaagttttaaaaatataagtagaagcagtaccctctaaaataacaattaaaagtatagtaaacacataaggaacacttgtttattatcattatgaagtattatgtactgtacataattgtatgtactatactttcataaggctggcagtgtggtaggtttgtttacaccagcatcaccacacccacgggagtgtgctatgtgacaacagctacgttactaggcaatggggattttccaagtccattataattttacaggaccactaccatatatacggcccactattgaccaaaacgtccttatggggtgcataactgttaagcagaacagggaaacaagaacaagtgaccagacaataccgttttaaaaatcaccggaaaccacatttttcctctgatgattttacactataactttctctaattggggaggcactgctgtgtacaggaaagaagtcatgctttggaattagagagactccttaccagctgtgtgatgttcaacaaattgtttaacacctctccccctctctctgcttcctcatttctgaaattattgtgattatgattatttgtgatattgccactgagtgtctgtaagcctgctggagtattcttatttttcccaatttctgtaactatcatgcctttaaggaagtgttaagtattattattaccataattaatacctctgtttgtttcacacactacttgaagagtttctgcctaggctgtgattaatgggtttgcttctcagtatgtgtagagaataaagtcagacagacttacataagtcatcttttttcctgattgaagtcatttacatattgtggtctatcacatgacatcagattatgtatagtaaataataagagaagaaatgcccaatattcagcatcaacaaatttgtgcctcaatctgtcacgttcacttctgctataaaaacttaggtgaatcaagcattgagttaattatatttctctgaatttggaatgatacaaataaaatgtcctgtccctgtgtgtcatctgctttcccctgtctaatcagtatgttttgccatgttctatccttttgtgtttttgaccttgtttttttcaactggcaggtacacaataaaatgttaactagtcacctggccgttcaacatgttattgtttcaaaacaaggtcaatgaaacctcccccaaaagtgctgttctaaccctgggtcttctctaaccctgagggtccaaggagtctagagagctatgagtggctgctctataagaaagtgggtcctctttaagaagagcttctctccctctgcatgtgttgcctgaatatccttttggcaaagatgggctgtttctttctgcatatttatgctaattgggctgtgttcatttattctttcaaaaatatttatcaaggtcagctgtgtaacagacargggactgcatgctggagatacaaaaatgaacaccacacggttaggagctcgcattcaaggaagccacagtctaacaggggaagcagacacgtctgcagacaattgccacacagtgagataagcattaacagaatatgcatggccaggctatcagcttgagcccagtagtgaccaccacaaagagtcaacttggtctggtaaatctaagggagcagttgacctggctgtaggtgctgaatagcctgaagggaagaggactgctggaaaatggtctcgtggtatcttagggtggagaaaggagagtgggaaaggacagccttgggatgggtatggggtgactttggttccctgtatttgctccatagactcatgcttgacctctacagagacagaatctgcaggtagagagggaaggggctcaagtgagacaatgaacacttgtcatgctcttttggggcctaggtgaaaaaatgtgaggcaaagtggaagagaagaggcttctctccacaacttaggaacagtgtggttgatggccttggggcacaggaagaaagcaactttgactgagaagagacactgccccccagtggcctcgtggcaggggggtcaacaagaagctcaaagtggaagcacaggcaagagaggaagcacattgcagggatcacttatatcgtgcctcccactaataatgggaagttggaagggagcagtgtgtctgcattaggcaggtggagtctcaagccaatgccatgtgagtattaccactaatataataactattctcattagggctggtgtgtataggaaacctaattctccatatgcacaaaagttgtgggaacaccaaaaaaaaagcacttattttctgatcacaagattaagcagagtgatgcctatactggttaataatggaattgaggtctggtaggtggaaagacaagaggcccaagataagtaataaaaggagactcagacacagtgttggggttgggggcaactgagagatgatgagagggagttcagccaggccttcccttcccctcaaacagaggggcttaagaagcttaaggagagctctcagtggaggagtcagcaaaacggaactaaaggaaatggccctgaggctggagacaggctggaggcaaataactagacagaaatgtccgcaaacaaattctaaaaataagacttatctcctaagctaaacaaaatgaaaatctacctatgtgcacataaatagaattcaaacaaaaaataacctttcaaacagcactaaagggcacattgaaaaataagtccctcctgcctcagccccctcaggaagcagttggtggctgcctggcatggtcttggagtgctgccccccagagtcttgaccgtcattacagggtgaaagcataaatgttaggggaactccaggatccctagagctctaaaaccagcatccatccctgtgtgtcagtgctgaaccagttgttaaatattttgaacatcactggtatccttctagaaatatgtgcacatatacaagtatatccctacaacacctcttttttccttttcatacaaatggaagaactgaataaaaagcattccacattttgcctttttttgtgcctacttggtctatctttaaatgcatgaatatacatcgtatgtttttctttcagaaataacagaatttaggttacagagataacagaatacctaaaactgagatatggagcacaggagtaacacgagagactttggaataacctcttggagcttttcattaggcaccagtgaaccaggccaatggcgactggggaaaccactctgaaagatggaatctgagtgtgctagtccaggctaacagcgccctgcaggcttgggcaaaagggaaaaggagggacaagatcagtcacatttgcccaggagggatctaagcttcctagagccctgactcttagtgcctaaatacagcagttaccgagaatcaaaccagcctcgggtggcaccaagttaaatttcaaatttcacactctgaactttttccagggagtttttccttcattcaaaagagatataaagtgaagttcttcgtaaaagacctaaaatttatttctcctaattgtcccatttttacctcaaatgctgaaggaaacatagagttttattcatgagagagaaaatacttataaactaaacttgaactggattttacagtatattctacacattgaaaagtcaagagcactaggtgtactcttcttacaggtatgtttatttaaaaaacccaaagaaccaaccgggcatggtggctcacgcctataatcccagcaccttgggaggccgaggtgggaggatcacgacgaggtcaggagattgagaccatcttggccaacatggtaaaatcccatctctactaacatacaaaaaaaattagctgggcatggtggtggtgccctcctgtagtcccagctacttgggaggctgaggtagggaaatcacttgaacccgggaggtggaggttgcagtgagcggagatcacgccactgcactcagcaagattatgtcaaaaacaaaacaaacaaaaacaaaaacaaaaccagtatgggacaggaggcaagtgttaattttccatrtctcatttctgtttctatacaacatattttcattattttaatataaatgagagagaggcagagattgaagaagaacrtttaaaactgagggagtaaactgcacaggaagagtacacagaatgggagcagaaaactattatctaatacttttgttgttccctgatgtccccagaaattttcagtctagaaagagtcataaaggagcaatttctgctgatagactgtcacctagcggtgggtttttaccttattcataatataagtggctgctgagctttggaatgtttttagaaaacatgctcattactccttaagatctccggggaaccttttacaatactgtcacaagcagaatgtaactcacttttgtgcttcccaaaggtctaatgtccttgtcggcaatagctaaaacaggttgcacatccttcaaaaggaagttttgcctctgtaattatttgaatattgtcaaagaagccctgtaggcaaaattaagattcgtaactttctcttctgtttacaactcatagcaccctcagtgttctccttgctaatggtcaaactaggcccatattttctaaagttttctccatttttaggtggtgacaaaagagtgtatgtaacccactggccacattggcctagagatacgattcaggacaaggaagtcacaaactcagcaacaagacaatgttccctagatttaatctatgccaggaatccatcctgcttggtcacaaagaggcattacagtcctctttgtccagtccttactctctgtgtgataccagccctcttggccaggagggttcctactgttgccttaaccctagtcaacagggaggcaccctgctcccatcagtgataaagtctacgttcaggcgacagagccagcacatagctctctgttatcaacatccattctgcatgccatactatttcaaccatttatgcagtattggcactatatgtgtcacatgaaacagaacagatagaccacatccacaccaagaagttgtgatcagaagggaaagcactgggtgttatgaggagaggttgtcacctacattgggaagatctgagtgaggtcccttttaggaaggttgcatctgagtagaagtcagccagatgaaaagcatccttgtcacaatggaaaagataaataaaatgtggtatagccatacaatggacataaaaaggaatgaaatactaactcaatccacaatatgaataaatcttgaaaatgttatgtatgctaaatgaaagaagccagacacaaaagaccacatagcatggctgggtgaagtggctcatgcctgtaatcccacactttgggaggtcaaggcaggcaatctcttgggctcaggggtctgagaccagcctgggtaacatagtgagaccttgtatctacaaaaaataaatagaaaattagccagatgcagcacacgattatagtcccagctacttaggaggttgaggtgggaggatagcttgagcctgggaggtcaaaggtacagtgagctgtggtcatgtcactgcactctagcctaggtaacagagtgagagcccgtctcaaaacacacacacacacacacacacacaccatataattccatttatatgaaatgtccagaatgggcaaatctatagaaatagattagtggcggccaggcacagtggctcacgcctgtaatcctaacactttgggaggctgaggtgggcggatcacctgaggttgggagtttgagaccagcctgaccaacatggagataccccgcctctactaaaaatacaaaattagcctggcatggtggcgcatgcctgtaatcccagctactccagaggctgaggcaggagaatcacctgggagccagaggttgtggtgagccaagattgcatcattgcactccagcctgggcaaccaaaaaaaaaagtaagaagaaagaaagaaatagattggtggctgcttatggctgggggtggggagggggaaatagaaaaatgagtgactactaatggctagggttttattggagggagtgatgaaaatgttctaaaatggtgacacaagttgcacaattctgtgaatagactaaactactgaactattatacacttaaatgaattgtatcatagtgaaatatatgtcaataaagtcgttacttaaaaatctggagtcacagatcttaggtttaagaatgccaaatatggaagtatatctcttgtgttcaactcatttttttccttctagctctttctccttaagaacccagtaagcattcactaaagggctaagccaaaagacagctgagcatggccgcactatgctgccccctcctgggatcccaaaggatcttctgaacccaagcttatgcacaggacttttcccttctcaagagatgtccctctcctagttagcactcacgctcagaagataaaccctaaaggacaagggtttttgtctcagggccagcaatcagttcaacttctattcgtggcctgttcccttctctgaagacctctggactctgatgaaaaaataaaccctaccttttccatcagccccattgacacacccatacaagccagaatttccagaagtgactctcatacccrgttacgcrttcttcacagtgaatggaacagactcttgtccacctgtggacagaccttttactggaacacaatgggtaacaacacttcaagatccaacttaggtctccttccttcataagtgttccgcaatttagcagtgtttcagttgttgaaaacccattttctcttttcaggttagtatagccttaccagaagataaggggaaactttctgggggaccacccctcacccacagtcagttcaggagcctgtgatgggggcatcacctccagctccaaggatagaacatatgactgttctgaccaagttcattgcaccatatctcccaagctctttcccctgcaccagtgggtttcaaatttgaattgtagcaaacaaaatctgatacaaaaccctgacatacatttgttttaaacaaagaagagttgatggtagtaatatttctaaatctcaccctcttggcctgcacttggatagacactatgtcctgcactgtgggaaaaacaaaggaataggacatgatgcctgccttgaacaccttgcagtggagttgggggcaagaaacaaaagcaagaaaattaatgattaaataatactacataataatagaagaaatctcacagagactgccgcttatcagaagggggttagaggcctgcagttcagcactgagccttttgytgcctctcttcttctaagccctactcattgtctgatatttagcttggctgtgaccttccccagtaagacgtttctggaacaccctcctgcctcttcacacacacacacacacacacacacacacacaccacccccttcagcccagattagagctcagtgttcctgtaatatctctgtacagtctatcactgcatttaccatattttaaaacaacgtctccccaacacttcacagtataggctctgagtttcataacggcacagagtggatactgtaagaatgcagtgagactctccctactccatgctcctttcttccatcttttgttccacagatgtcagccctacatcagtctgcaggctgctcctgtctgctccaaatccctcccccagtaagtttcttgcacatctaatcccatcttagcatctgcttcttggtagacactaacaaattattataaggaattactttgcactaccatatttatacaaaaagtagttagttcatgcatttagaatattggtttgttggttgacaatgttaagcctaatgacctataccttttgggtactgacatacttaattttgcacttattaaactgtgactttccaaaaaaaaaaaaaactttcattgtaccattaggatataatattcttgttaatattacaaaaaccaaaccaaaacaaaaaccatgctgcagccttaggagaacttgcttcatgtaactaagggtttttctttttcttttctttttgtatttttttttcctgtaggataacatagtgttaaaagcacaagcttctggactacttgaaatcaaaccacagcttaaccagctctatggcttttggcaaattacttcaactctttaaacctgtttctgatctgtaaaatggaatgatccttgctcatctgtaatatatacatttataaaacaggacccaccaatgggattattttatgaattaaatgttaaaacagctagaacggtgcaggctgagtaagcactgaacacagtacttattagctattatctctggtgctctgtgcaacgaaagaactattagaatacatttaaaagcactttgcaaactagaaagccctttgaacaatttagtttctctaaatgtaataataagcatcagccatcgccttttatggaaaattgaggtggaatcacatcagcaagagaaaactgaggacttgtctctggctctgttcctgatttattcacacagtacatgatcctagaataagactcctgatactcctgaaagtagaggcggttgggttaaaaataattttccctttcaaaactctttcaaatgttctccaaaagaagccaggaaagctcccgtatgagtagataattcactttaaaattcgctcatctctctttaacacgagagtctgcagggctggtgcagcggcgtcaacccgaagagacctgaacgccgatgggcagttgggattctccgtacgcctcggaaacagcagcccaaacctcacaacgcagaaccacgagatagtggggattgcagagccctgcgcaagagaaggaaaattaagacgcagcggagcccaggaggtgcccgcacgcgggaaggactggcgtgcagacgaggcagggggaggtttgcactcggcgtggcgcgggtgagccgcgtgctctcgggcacccggccgccagttcggatgcttccgatcctcggggagccggggcgctgcgccggagtcacttcagcccatgttgttcaggtgacacccggggaagagcagactccagtgtgcaaaacgtttcggggtttccgggccagcggttccgggcgcgcctcgcgggcggcggcgcagaactacaacccccaggctccctggcgtggcggcacgtgggccckagccgggcggccgcggatataaagcgcggcggcggctgccgggcggagcggctgcacggacaagagcggaggcctgggtgagcgcggcccgcgacggcacgggctaggacagacggacgcagacggcccgacgacctgggcgttcgggcggaggggcgctggggcctgactcgcgggtgggtgagacgttgacggacccggaggaaagagggaaggcagatacgctgggaaacggatctggggaaggtgtgaatgcgaaaagtgtagggacagacgggggcagaagaacttactcccccggattgtttgcagacagcatatctgccgggtctccaaaggtcctttcctcaaaatagagttagcaattgagcagaagagagcttaaagttaaacctgatacatccccccttcacttgaggagaaattggtggttttctgcttttttaaaaatccctatttgtatctcctcttctccgagtacctgtccctcaagatattctctgcccagaggtacattctgccctcactttctgtctcttaaaaaaacaactttgccatttaaaaaagaatttgacttaggcagctttaattctttgcactgagtgttcttatctgtggatggaggtataagatttcaagagtaataccccctcccaatgtttcagtaataatctaaattcacattaagccttaggctggagaacatttgagctattcgctttagctacgagctctgaaaacttcaaagcataacattcccaagtttatctaaaacttgaatcttaaaaataatgataattatctgttatgcttcaaagcataacattcccaagtttattaaaaacttgaatcttaaaaatactgatcattctctgttaaagtcttttgttgttgttgttgttgttgttgttgttgttgttgttgttgtttttgagacggagtctcgctcttgtcgcccaggccggactgcagtggcgctatctcggctcactgcaagctccacctcccaggttcacgccattctcctgcctcagcctcccgagtagctgggactacaggctcccgccaccacrcccggctaattttgtatttttagtagagacggggtttggccatgttggccaggctggtctcgaactcctgacctcaggtgatccgcccrcctcggcctcccaaagtgctgggattacaggcttgagccacsgcgcccggccaaagtcgtttttatcccatttcttcctgtaggcgtttcaaagtttgcaaaggyagcaaacttttacgtagtgtagttatctgtgcaaagaaattttccaagctgccattgcccccagatggcagacagtctaggagaggagccaaaaccaccctgcttaataactctgatgtaaggtttttaatgaaaagccactgtttgggggaattctgaggtttaagaaattattttcggctggggtatcaggaaatcycctggtttttaaaatgagaggttttttggtttttgtttgtttttgtttttaagctatacctgctggaatggataaagtgagctttaaaagttgatcagaccgaagagattgaagtgagagaaccacaggaacaaaggcaagcagacagacagtgaaaggtagataggaggaacagcaaacagtttgttcagctgggcaagtatagtgcaggcacgaagatttcaatagagacccagaccccagggagctggttctttagcctactggcattttctaaacaggacaaagacaagaccagaaatgctggtgttactggaagattaatctgacagctggtgtggattgaagaagagaagagggattaggacagtgattcctaacccctatcctacactcccaacggccccttgttttgaatttttgaactaatcaaactacatttgtggtaattagttttatttctttccattaaagacatataaaactgccaatttgagcttctgatgattctaagaacatcagtgttaccktccttagtatcaaataaatgcaggcaaaagcacaagactacggagttttatttagcctgaacagcctagtagtgttggatttaggaggtgtttaatgctgactcaagctctcaggactcttatcacttgaaccttcttgggccctgtggacctggggttttgcctatttgtctagataagaggtaacgaagggaaaaattataaaggcgaaaggaggaatagcaggggaagaagataacagaattgaaatgacttagtccctaaatagacaagagtagtgagtgttggaaaggaggcactagcagagcagagatgactgggaagatgatgctggtaagggcatgatagtattttctactgtcctatacacatcaggcaagacttcatggagagcactgaacacgtactcactatgtgcctagcattgttgttaatcactttacatgaattagttcatttaattctctcaaccctatgaaatataattactattatcctcatttacagaaggggaaactgaagcagaaagaggttacttaatgggctcaaggtcacctacctggtaagtggtggagccaggatgcagatccatgagrtctgactccagagctggccctctcacccctctacagtaaggaacaaaggagatggcaggtccctttgggcatgttaagttgagatgtttgtgggagtgctaggtgaagatatacagcaggcatagcatcaatctcctttgatacttaaacatccctccagtggggagatggcttaggttatgggcctttaaggctcagaggctaagtggcctgcttattgtactgagggtggtcacatgaagctcaaagagtgattagagccacatcttatgatttattatcttgtgttttcccatgggccaggttattggattcatctttctaaacttccaatctgcttttagtctcatgtttgaactaggaaatacagagcaaagctacatgcaggacttggtcttgattttaggagcaactcttgctgagaacatgtctgtttgcaaggaaagtatcgtgttgtctttctactgaaaacagtcagtgtttctcaagggcttacctgagccaagactcttggggaagaaaaatagaagatatggtctctgtacttcagaagtttattctcctatttgggaagataagatgaacaattagaagagcaaacaaaacaagatagcttataactaagtactacattatgtgggttagatttaagtatagtgggcattgcatttttgaatgtgccagtaatgtcagaactatagcataacccttcttgttggtcacctacagacatcactttatttgctacaagaccactatcttttgtagaattgtcatcaaatactatctgattatattttattttcattttcaattgttagacattaaatttgtggtctgaaattgcatttgtggctttttatgtcttatagctcaaaaaacaataatgcttctagaactagcaaatgtcagagctgtgagttgaaccaggtggtctgcctatggaactgaggctgttaaccagtctgctctgttgcttcttgtggcccatccagagtcttttacactgattatgggcaggtacactctctgccagatggtgagagatcctttggccccaaatgagtggtgtgagttggactcttccagcagtgcgctacccatctgtggaagccatcatccagtcacagtctgaacacctcgttcagtcacccacatattcttcgctcttgaattgaacacctggtgtcaagcagagggctcactgcagagagcaaaggcaaatgaaacatccctgtcctgggagcctgctgtagtggggaagagggaggtgaatatgcagtctacatggttaactagaactaggaaaactggacaaaactgggcaaaattaggatataaaaagataggtaaatctgaaggtagttatgtaaatcatgatgaaaccttaagacaggcttgttttaggtgagattctaagaatgaagacaatggaaagagaaaatgtccccttttatgaccatatttcagtttaagtaatagtacagttgacccttgaattacgttgatttgaagtgtgcaggtccatttacacagatttttttcaaccaaatacggatagaaaatcagtatttgcaggatgcagaattctcatatgccaggcttggggctgactgtgtgacttgagtaggcatggattttggtatacacgaaggtcctggaactgatcttctgtgtatactgaggcatgactataattcactgtatgttttacttacctgagttaggttcaagctctttcttgggtctgctgctgttaacctctatcctttgaggtgttagattgcttccatcatctgtatagctaaaatgggagactgtccacgtagtattttctcaagtctaccctctcctgtcttaaagtttcctcctcaatagaattaagcactaaaattttaccatcttgtacttgctctgtgtgtttgtgtacttgtaagcacattttacagttctaaactagaaatggactttgcctgggagttttatcattgacattccttgaagaaagagakaaattacattgtatgttttccagacctaccagcagctcaatggccttcccaaagaagaaacttcagggtcttgtggctgcaaccatcacgccaatgactgagaatgggtaactatcatttggggccttgaggggatcwgttctcattcaaccaaaaaggagagaagttctttgtaacaacagtcacttaagaccctgcacctctgtagaactgttgccaaaaggcagcttctgtctgtcatccctctgcactgtctctgatccccaagtctgaggaggcattatatctctgaccccaaagtcagagaagcactatatcaccttgcagaaagggagaaggtgagaaatggcagcttgcctttctcccrgtgtctgtagcaccacagagcaaattctccttkgatttcaccacagccttggcctttctaaacagggccagtagcawtggatgagaatcccattttagcataattggatatcaagcactgacctaggccctctcaggatgctgtctctggacgtcagcatgattccacttcaggctgttcatagacttgataaaaatgtcctaccctgaggaaagtgggaggttatctgcaagatggactcttttttcctgtttacagcctcatttcaacattgacwagatgttgggcagcgggggaagggaagtaacaacagtccgttgttgactaatcattaccccaagcaagtattttgacctccagatgaatacagtggcagtccttctgctaaaaaatcagataacaaaaaggccctgtgacatagggagccatgcactgtgtataactcctccttgaacatcacccctgacaaaagagagttcatccacctcctggatctatatgtttttgacctgtcagaggagtcaggctgccaaaaagttagaatgctggcttatttaagcttctcctttctttctatgtaatattataataataatcatacctacataatgaattataagcattaaatgagataattcatacaacagtgcttrgcacagggtcaatacgcacttaggtcaaaaagtttgaactgcctttatgtcataaggcagaggcaaaaggaagatgtatttagtacaccttttacaagggactttctttttggtcttctgttgctgaatttataaacgttcatcttacccttttaaaggagatgaaatttctcatgtcttttagtattctccttcaaagttggccattttgcagttctaccttagagactctccaatgagtccaagacttctggcttctaagatccatgaaaaatcacgtccttactaggtctaaataagattcttgctgatacggcatttagattactcagctggttaataataattttttttctgttacttcccctttccacaagttttaagaaagactggcatcagctgtttctcaatgcatcagtcacttgttcgcagatcaaacagaagacatgtgattgcatgaatcggcaggatttacttcctgttacagagtgagatcctttctgtaatctcctaacactgcatctggtccatactactttaaccttttaataagacccctcttatcctggaagtggcttcttaaaacagtcttgtttgttcatcakggacccacggacaatgtcagtgtgttcttcctccctgttttgccgttttcctggaaggccagatcccatgatagagataactaaaatgactttttctggatctttttccgtttcccaaaaatctgtggtcctgctgcatccattttactattttctcatcaattctgcgtttttcttctaggaaccttactttcctaaggtgtgaaatcaaaaaaaaaaaaaaaaaaaagaatgcattatgtgtaggctctttaagaaataaatagtgtaggtcagtgtatagcacagagtaggcatgtgagccatgttagttcccttttctcccaccacctgcttcatcaaacattcctgtaggtataaagtagctttggaacacccaccaagaacacgtaggctttaatgtacttacccacaagggaatctgcacttctggcatgtttctaagacatgagatggaaggaaggggcacatggaatctaatacctggaaatactgccaggtgacctgccattgtgggagttctcctaacctggcatgtacatatacatatcctccataattctgagtggctgaacaaggactatttccctatatccttttttcttctcaattccaatgaaagctcagtaacaattcagctttctgcatataagttgatgtcctggagtagggtagctggcagaaagaacatgggtaagtagatcttagtgaaatgatgtgagtcctggatcccaagctttgccactagttagctctccgaccctggggagatcttgtcaccttttgagagctctctcggccgggcacggtggctcatgcctgtgatcctagcactttgggaggccgaggtgggcggatcacaaggtcaagagatcgagaccatcctggtcaacatggtgaaaccgcctctctactaaaaatacaaaaattagcctggcgtggtggcgcacacctgtagttccagctacttaagaggctgaggcaggagaatcgcttgaacctgggatgcagaggttgcggtgagccaagatcattccactgcactctaccctgggcaacagagtgagaatatgtctcaaaaaaaaaaaaaaaaagctctttcatattctccaaaggaagttcaaccacattatctctatgaccctttccaactcttaagagtctgcagtcctctcatgtcattggggatattgtggggatcaccattaaataagaatgtataaagtacctataattccagtccatcgtccacactgtagctcagtgagcttcctagtaaataaatctgatcatgtcactctcctctttaggaatcttgactctcttttgtctaagccttgctacccatcatatggcccatggaccagttgctccaccaccatgggaacttggtagaaatgcacaagctcgggctgtatcatactacagatcagtcctgcattttaacagtgtcccagatgattctttagcgcattaaagtctgagatgagccggtctaaagattaaagcccagactccctgggatggcataggaagtcctcacagtttacctttcctgcttcatttctttgtcaccatacctcttctgcctttcatgccttcactcattctctttcctctgcctttttctaccaccatcttcttctttcttgctccacttgaacacttctactcatctatcaaaaccatccttagaaattcttccccaattctcttaaaaggagttagatgacccttctatagcaccctgtccatactcttcccctgtgatcccatagcaccctttttgtattgcatcagaattatttgtttattattacaataactttttgttacttgtctatgtcttccagcaggctttgagctgcttagccctgttcaatagatattgaatgccaataatatacaagaactgagaaattatcttatttatcttatatcttaagcatgtggcatagttgtggtagcttttgttattttatgagtgaatatactgcaggaattactagtgctgatagtcgagaaaaagggaaggaagcaaacactgattgatgctatgtcagtcatcatgcaggcattttcatttacatgttcccacttaatcttgacaacagctatgtgagggagccataggtatctctgtcctggcagttgaagaaacggagatcctaaaggctagcccagctgccccaagccacacagctagaaaggtaggatttctctacctatccaacccttgcctttttatacactagtaagtctaatgaaagacttgctttttttttttttttttttgagacaaagtctcgcagcaggcgggagtgcagtggcacaatctcgactcactgcaacatccccctcccaagctcaagtgattctcctgcctcagcctcccgggtagctgggattagaggtatgcaccaccctgcccggctaatttttgtgtttgtagtagagacggggtttcatcatgttggccaggctggtctcaaactcctgacctcaagtgatccgcccgtctcggcctcccaaggtgctgggattacaggcatgagcagctgcgccagccaagacttgctttccttatttgttctaagaactcactttttctttgggcaggctcacagtcattagaccagaaagtccatttcagatctaaaatgtcgagaaaaaagttgtgttttttccctcaaatgttcttggcatcaccctggggaatcttcacaataccctctggtaaaaacaaagctgttaccccagtgaggaaaggcctggcctgctagagtcagactggcatagattattgtctttttaacagtctttgggagacgaggggacccagactcccagaacagaacattttccacctccaacagggtgggcaggttagtccctgcctgcctccctgctgaaagaattttaaaataaccagtggctgttttgccaagagtgcatataactgctatctgattgaatgctgagagatatgtataaaaggcaaaagaaaatggaaaatcagattttctgatatgcatgccacatcatgtcaggtatgaaaatagcctgtcctgtggattctgtcttctcagatgaagtgaaagtctttcatggtggttcgtgcaccaggagaggaaacaaacagcaatagggatttctccctgaaaagccacttaggaaaaattctattacccttttaccgtaagagaagagttgtagagtctacctgcagtttcacaatccacccactctggacctcaatttgtggcaaaaagaacagaagactttcttccgcttatgtagtttgggcaaactaaatgtctaaaaacagacaattagaaaaaggaattagaacagacaattagaaaaagtaattatactcatccataaaatagaatgttgtttagccggtatagtaatggaccatctaaaaatgtgggaagatgttaaaattagaatgctgaatgaaaagtataaaactgtgtctaatacggccatatttatacaagaaaatataatgtgtatttgtgaatagaaaaatatcaaactaagaggaatcatctccagagatatcctgagtgggttttctttttttattgtatgtactttctaaagtaaactatatagctcctgtaattaaaaaaaaaagttaaataaaattagtggggcacagtggcacacatctgtagtcccagttacttgggaggctgaagtgggaggattacttgaattcaggagtttgaggccagcctagacaacatagcaagaccctgtctccaaaaaaaaaaaaaaaaaaaaagccccaaggcatgaatctaaacccaacgcaaagaatctgaatccccaggaattgaaattaagacattaaactgggtttaaatataaaaatgactacagcaagcatggaatttggttctgggtcactctcccctgatgtgcccagttgttagatgtgttcttggggctcatgaaagaagagaaggtgctgtgcagcctattcaagtgaattgacttctgtcaactcacttctgtgagcactgagctccaaatgcccagtgggtgggcagaagaataatccaatctcattgtttccattctctctagtgacttcctggtaaccgatcatggttaatggcctctggtgatgaaaatagacctaggtaccatcagagtagggtgggaaaacaagtgaagggacaggctgggcatgatggctcacacctgtaattccagcactttgggaggccgaggcaggcagattgcttgagcccaggagttcgagaccagcctgggcaacctggtaaaaccctgtctctacaaaaaatacaaaaattagctgggcgttgtggcacacacctgtagtcctagctactggggaggcagaggccagaggatcacttgagcctgggagattgaggctgtagtgagccgtgattgtgccactgtattccagcctgggtgacagagcaagaccctgtctcaaaaaaaaaaaaaaaaaaaaaaaaacggacagaatcctcaaggagaattattttcgccctaaccctgccttttgggtacctatgtaacaaatgtggtagcagccctggatgatttcacccccacttgtgcctggagctgctgagcatcccagcccaaggctgcaaacttgcacctgcagagtcaggcagggatctgaaatgcctgagggacctgggggcatccagtcctctaaagtagggcctactgctgctttttctaatttccagctgtatggaaatgtagccctggcttttttttttttttttttttttgaaaccgagtctcgctctgtcacccaggctggagtgcagtggtgctatcttggctcactgcaacctccacctcccgggttcaagcaatcctgcctcagcatccctattacaggctgagattacaagtgcccaccaatacgcctggctcatttttgcatttttagtagagacgggatttcaccatgttggccagcctggtctcaaactcttgacctcaagtgacccacccacctcagcctcccaaagtgctgagattacaggcatgagccaccatgcccagcagccctgacattgttagatttttctggcttttcaaatactcatttttttaaagaaaaaatacaatatcgtcaaagtcaaacatatttagagttagccccttttcaacctagatctctctaaagaggtctggtagttccaaaaggacttaagtccaagaacattttctggatgatgaccactgcccccaaaattctgccattagtgtcattcttgtaggttaggggcattttataagaagcagcaacctactttctcctttcttgaagggacagataatgcaaaacccattagacctctaaccctgagtgaaattgtcagctgaatagcctgcctcccagcaaggcctgagggagagaggtgagggtaggtcgaagcactatccactgaggccatcaaaactgtgaagttcatggagaaaaaaggagcttctagtttcacatactggcctagacctgcctaagggtgcagccaactccctaaaaagaggatgatactagaataggacagagcaaacagtatctctcaagaatgttggaggggtcgggctcagtggctcacacttgtaatcgcaacactttgggaggctaaggcaggaggatcgcttgaccccaggagttcgagaccagtctgggcaacatagtgaggtctcatctctacccaaaattttcaagttagctgcacctgtggtcctagctacttgggaggctgaggcaagagaatcacttgagcccaggaggtcaaggcttgcagtgagccacgattacaccactgcactccagcctgggcgacagagtgagaccttgtctccaaaaaaacaaaaaaatgttggagggaaggaggacatagggttttgtcctatttatccaatgtcttctttccagcctccctagctgtcatttatcagtcctcttctgagcccccatacaattactttttgcctcagtcataaccttcattatattttgctattttaatcacgtatactatcttctttaattaatgtaatagtgaaatttcaaaatattatgcaagcgtggtgctaacctgcttgtaaaggcagagcttgtggtgatttcatcattgtaagttcccacatcaccactcctttgcccagcctttgctgaacacctgggctgttccaggtgcagacagaggtcaggagggagcagtgttaggatatggaggcatgtgccataatgagggagttcgctccccttataggctttataattgcattaacacaccttttcccaagtggcaggctcaggcctgctatcttttctctgagcttgttataggcatgattgcctgtgcattctttgcatttaatagctttccttttaaactcagagtcagctgttctctatctttcctcattttgttcttatgccttttgacatgtacattttgatgcctttgtttcctagatgcatcagatttttttttttgtttttgttgtttaaggaattaccataggtaaaggtgaaaagaatgttaataaggccaaacttcaattaggattctctggccctacagacaaaagtgcggtggcagccagctagcactctgtgttcttggcagggtaaccatgggcacagtgtaaccatttaatgcaggcttgctgcaccattttcctttgaatttcactcttcattgcccatcattcccctcctgcattttgattgaggacaggttgcctaatacaacttgtgaggagtcagtttttagattttgaaatcaatatgattttaagagatcttaaccttaagcatcagatccttacaaggttagtgtgcctcaaattgccaagtgcatgcagatcacacggcgatcttgttaaaattcagattctaactgggccggactgtgtggggcttgggattccatgtgtctaataaagtcccccagatgctgatgctgctgttccgcctttgagaggcaaagtgatgacaaagttcccttctaactgctaaccttgttcaatgtaaaaccagcaaatacagatgggtttaagactccatgtttgtcccaaatattaagtgctaaaattcttataatattaagattgacttttcctatcctgtgagcctaagaaatgaatgtttccatcctctgtaatgacttcctaataattgatcatggataatggcctccagcgatgaaaatagacctaagtaccctaagagtagggtgggaaaacgcaagaagggacaggccaggcatgatggctcatacttgtaatcccagtacttgggatcaaatggcaaatgttaagttctcatttaaccatgtctgcaaccatcaatcttcccctaaaagggcaaaagatgtgtggccatatggactttaaagagagagcgttgggcaaaagatagttcgttaactactttttaaatactgcttgtcatgaggtgtaaatataaagcctctgttgataactaacagtgttttgctcacagaagtgaggcatacatggctgagtgaagaaatcaccagattcagggggggaaaaaaaccccaggcattatttacagcaggctaagaatttcacaaattgagtggatttttaataactattagcaagagggagcagtttatatacctgagcatttgttgaataataatctgaaaaagactaamtatgcctttttttccacatgtcttctagagaaatcaacttttcagtaattggtcagtatgtggattatcttgtgaaagaacagggagtgaagaacatttttggtaagtcaactctggggatgtcgctgcatgtctccagctcagtctttagaaggtatatcttacctggttaccagccaagaggtcacacagtcatggtgtcacaggttatgatggagcctggctaagctaactaaaatttgtgaatttgtaggcccaccaatcttagacctacaaagcacctcaagagattacctcatttgatagtgtgccaacacttaaggtattattttttatccccatttggagatgaaaatatatgactcagatatactmtaggttgccccaggccattcagccaagaagtggtagagtaacaaccaaaccctcttaagtaacaactaaacactcttctctcttttgtttatttatttattgagatggagtcttgctctatctccccctgggctggaatgcagtggcaccatcagctcactgcaacctctacctcccgggttcaagcaattctcctgcctcagcctcctgggtagccggactataggcgcacaccaccacacctggctaatttttgtatttttagtagagacagggtcttgccatattggacaggctggtctcgaactcctgacctcaggtgatctgcctgccccagcctcccaaaattctgggattacaggcgtgagccaccgcgcccagcctcttctctctcttaagaatgggctttattctgtcttcccctggcctttcaaattgtgaatggaagaaagactctaagtgtagcacacaaagaaatcacaggactagtagttatccccttttatttcatagaagtgaaagtttaaaaaattagatcttgaacattttaagcctgacagctatacttacctgcgattgagctgtcccttgcttagtgttctgggctctcggacccttggatgcatttttattctgagaacactacaccttggtcctgacctactgctctaccaacaggagcccctccagagccagaggtacctggtaataataatcagagcagattaaaacttgtgtggaaaaagtgtcctgggccacaggtcaaaactgagacctgattacaaaaccactcaatgtccctctacagcgctaagccatagtggagaaggcagattcttactcaacaaagggcagcagatctcccctgggtatgaggaaaaagcaggaatatccctatgaccagagtatacttgaagtcaagacctcaaagaagtggttaaaaatactttccgacttccctcccctgcctccccaacctcccttcttccaacccagtgctgagtgcttagagattcagagtgccaccatatgcatgagacctcagtaatgtatcctactgccataggcatctttctgtgatccattaagaaatgattgtagtaggccgggtgtggtggctcacaccagtaatcccagcactttgggaggctgaggcgggcagatcacctgaggtcaggagttcaagaccagcctgcccaacatggcaaaaccccatctctactaaaaatacaaaaacttagctgggcatggtggtgggtccctgtaatcccagttactcaggaggctgaggcaggagaatcacttgaacctgggaggcagaggttgcagtgagccaagatggcgccactgccctccagcctgggcgacaagagcaaaattctgtctcaaaaaaatgaaataaaatagaaatgattgtagtagaaggaaaagaggaaagatgatgagttttggaatcacacaactctggattcaaacttaaattattttctgtttcagactttatctttttatctgtaaatgagaaaaataatttctactttgctgggttgttgtgagagtaagtggatatgtaagagyacttggtataagaaatattaatatcctttgtgcttatttatgaaatatttatctaaaaaacgagttgtcctagagcactaccatcatgtcaaactgtaaatggagatagtttgagatctgtagtatacaaaagcacccgcatgagtaactcccacttatttgacatcctggtactagatagtgttgatttccctgccattcaagcccagatataaaactgggtagtgtgtttggagattgacgtaaaatgtgggcagtcatctctgtctttatttaaaatatttcctgactgtcccyaatatcaaggtcagatttataattacaagtcacaattaaccttcccactgcctttgacaaggtgaaagtggaaaaaagatggagtctgaagtgaaaatggaaacatggcattttcccctcctgaccatcctcagtgcagtggtttctgaccctgcactttcagactcggggttggagaagcagaggtgctccttggtcctgctgacttactctttgtttgaacagtgaatggcacaacaggagaaggcctgtccctgagcgtctcagagcgtcgccaggttgcagaggagtgggtgacaaaagggaaggacaagtgagtggctgcatgaggataaaaatgccctttggcaacagctgtattcagtgagcctcttccccagaggatacgccctccctgcttcctggtcagagccggggcttgaggtcagctggtgggaagatgagcagggcccccgggatcctggcttcttggagaagagccccctccctttctgtgcagaagggcagccaaactgctagacacacctgccacccagaggttccgctgggaaactgcttcttacctgtctacaaggccagtcccctcacagttacccgtctttgggctgaaaggtaagaggggagggtggtgacggactctgctggtcacttggctcttccactgagcaactcacaccccttcccttcttgggatgagcgcctgatgcttgtattggcccacttctcctgacaggtctctgtgcatccaactcaatgtgctcttttatggtgcttcctcttgcgctgttggaggactttctgtagcccataaacttccatgcagtgataaatttttgtaacacccaattcatgccatggttgaacaaacaggatagtatcagttccatagcacttccagtttaactaagtttgtttttttgtttttgtttttgtttttcttgagacggagtcttgctctgtcgcccaggctggagtgcagcgcgatctcagctcgctgcaacctctgcctccggggttcaagcaattcccctgcctcagcctcccgagtagctgggactacaggcgcatgtcaccacacctggctaattttttgtatttttaatagagatggggtttcactgtgttagtcaggatggtcttgatctcctgatttcgtgatccaccggtcttggcctcccaaagtgttgggattacaggtgtaagccaccacacccggccaactaagttttattgatttgtctgttacagtgttatatgttatgtactgtgctaggcaccagcagtataaagtaagggctctgccttcaggttgctgaccatccggtaggggtgttagatcatgaaaactaacaccccaacccttctgatgaatgtataaaaaaaaagggagtaattgacgttgtcttaggtggaggtaaaagattggaggtaagttccaagtgagcagaggttgtcagtgtgaagcccatgatgaccttgggaatccttaatggcttcagggcagctccagtactctgaaattatgtgccaaatttgagtgcatatccacagaagcattctctggtgagtcatcagctttcagttaatttcgtgagatctagggtccaaaaatattaaggaccatgggcagagtgtgaaaacaggagggctaagggcacacattaagaacagtactggccgggcatggtggctcatgcctgtaatcccagcactttgggaggccaaggcgggcggatcacgaggtcaggagatcgagaccatcctggctaacaggatgaaaccccgtctctactaaaaatacaaaaaaaaaaaaaaaaaaaaattagccaggcatggtggcgggctcctgtagtcccagctactcaggaggctgaggcaggagaatggcgtgaacctgggaggtggagcttgcaatgagccaagatcgcgccactgcactccagcctgagtgacagagtgagactccatctcaaaaaaaaaaaaaaaaaaagaacagtaccaaaaatgagggacagggaagtaggcagagacagaaagccctcagagggtaggaggccagttgggagtgagtcctgtcactgcagccagggaagagaatgatttcagagactgtcagtgtagcaggggccatagagcccgactgcctgagttagaggcccagctctgcttattagctctgggaactcaggcacatcacctaacttctgtgtgcttcatccctaaaatagaagtaataatcatatctcacttatgaggttgtagtgaggattagaaaagtgcctggcaggcacagttcacataacacattcacgctaatgtaagaattcattgtaactatttagatgcagtaaatgctatgttcattataacgtttgttataataactattagatgccatgaaagtcagcacacgaaagactgagaagaccactaggtttgacacatcataggaagtcactgatgacctctgaaagagcagggccagtcaggttattgtagagaagccagactgcagttgagttatagaatgcagcagacatctgcaagtgggagcggtgagtgcagctgatcctcacaaaaagttttctggcaaagggaaggagagatggagtcatacattaggaaggaaggaataggcaagattgaaagaagggtagttttgttaagtggaaaaatgttgagcgtgtttctgtgctgaaaggacactgccatggaagaagagattaaagatacagaaaagactggtaaaccttggctgggtgcagtggctcatgcctgtaatcccagtactttgggagaccaaggcaggcagattgcttaagcccaggagatcaggaccagcctggacaacatacagagaccctgtctctataaaaaataaaaataataattagccgggcatagtggtatgcccctgtggtcccagccacttgggaggctgaggcaggaggatcacttgagcccggggtgacagaggttgcagtgagccaaaatcacactactgtagtccagcctgggtgaaagagcaaaaccctgtcttaaaaaaaaaaaaaaaaaaaagtggtgaattgatacctttgatggaaggtcttggatagggggatttggctaggggtttgacatacagatgttcctccactgatgacagcattacatcctgatggattgatcagaaattcattcaacttacaatttacattgggttttaaagacataaccctgtcataagtcagggagtgtaatgatgctttcaccccattttaaggtcaaaccatcataagttggggaccatccgcacaacccaaagtagacrgagtagctttagaagacagctgaaggcctggcacagtggctcacacctgtaatcccagcactttgggaggccaaggtaggcagatcacctgaggtcagaagtttgagaccaacctggccaacctgacaaaaccccgtctctactaaaaatacaaaaaaatagccggacatggtggcaggtacctgtaatcccagctaagcaggaggctaaggcaggagaatcacttgtaccctggaggtggaggttgcagtgagctgagattgcaccactgcactctagcctgggcgacagagtgagactccatcttaaaaaaaaaaaaaaaaaagttgagaagctaggaggaaagcaaatggtgatatagccccacacacaggtggagagaaggaaggataagggagtctgtgtgtgaaagcttcttcatctttggtctctgggactctaggacatctgcccagaacaaggagttgggtagaatttagaacttgacaggaatagtcaagatttggagtagccactccagagaaatgagtcatgacagccagaaggctcgttggagcctcctcctggattgggagattactaggaaatgtgtattttaaatttccaacagtggtagctgtgcctagcagcccaggagaaagaggaagagcaaatggatgattggcttcacctaaaccaagagaaaggggtagtgaagggaggggtcgtgcaataaaactgctggtgagagttcaacaggtcagtcagccctcctttctccattcagaagtcttctattatcctttaaaaatacaaacctgatcatgtcacttctcagctaggtcctgttttacctaagacatagctagccaagaacccctggaggactctgtgattgggcctaaacaggaatgtggtgtctctgtctcatgagggcatgtgttattcaaggtccttcagaagattcactgggaagactgcattcacagctgaacattattaatcccactttgagatgaccagtctcactgtggcctctctctccccagatgggaacatggtatacccccaaaaatgaacatcggggtatcagaacaaatatcgccttttggccaaattctgaggagatttgcaaaataggaaattgctttttatagtgaattcacttctcacaggactagttcctggttttactctttgaggaaactctttatttttctctccaaccaaaaatatcccagtatcatacctatcttcatttatgtgataccaccaaatacagcatctaaaacaatgcttaaccaaaataagtactcatgtattgattaatcaattattgcttttcaagttctgcttggttgaaccttaaattctattccctagacattttttaaaatccctaatgattctttatctttactgttttctgtagttttgcagcattaaaaggctctattcttttttctctttttttcctcccaaacttgttttttttttctttaagtctctattcttaaggcttaacagtaataactgctaatatttattaagcatttactgtgtcatgtaccatgctgtgttttacctgcatgaactcacataatccttacaatagccctgtgagacaggtaatgttattatctgaattattccaggaaattgaggtgtaaaggtgttaagtgcctttctgaggagttcacagctggttcataacagtcaggattcaagctcaagactctaactctgggatataagttcttaacagctatgttgtaccacctctcaattagatttcttccctagtgcttgattcaccattggcatcttgattttttttaaatttacatttgatctaagtcaacaattagccagtgccagatatatgcaaagcacttttacataaatatgtgcaatatcatttacttacaaaaatcatatgtaatatctgacacataaattgattctaaacatgattaaactaggtcatttctttccattagaatttattatttatttttatttttaattattttttgagacatggtcttgctctgttgcccagcctggggtgcagtggtgtgatcttggctcactgcagcttccacctcctgggttcaagctattctcccatctcagcccccaagtagctgggactacaggcacacaccaccacacttggctaattttttgtattttgggtagagacagggttttgccatgttgcccaggctggtcttgaactcctgagctcacgcaatctgcccacctcagcctcccaaactgctgggattatagatatgagccactgcacctaacctataattgatttttaaattttgtgtgttttatcacaacttagaagtgttttttgtaagcatgtatataagacgaatttctacagactccaatttaagataatgggctcggactaaattatctttgtgatcctctgcctctaacttaatgagagatgaatcccatttctgtacacatttaacgattttcagcatatatttctgctgttggtaacatgaaacctccatgatactgtataaacataccaccttcccattggctctaaatgaartcattgcagaaatggctgtattcctacagaaaggaagaaatgaataccattttaaccttgcctttaaatacctcctttgggggctgaatattctctgctgtgaaatcagaatcatcctaggcacagtcaaatcacaaccaacctctcagtaacatgacaagactttgatatcaatgacctaggttaaaaagatcaccataagcccctttaagtagattaaatatattgctatagaacttaataagtgagattaataaggcatcagttaactgctaaaatcagcacaaaccaggatagtgcagcccttctgcatgcctctaaactctaagcgatgcagcaktgttttttcttttgcaggctggatcaggtgataattcacgtaggagcactgagcttgaaggagtcacaggaactggtatgtatgcagttccatctgggagagaccattcaaggggcctccatttttatgccgcagttaaaatcagtactatatttgctatgtagtagatggtgtgcctgaagaaataaggtgtgggatctcaggggcttactgcatagaagcaggcattgagccataaagaaaaggttgtagctccaggtgatgatgactgtaggataggagatggaagcaccttcstccaaggagagtaaggatggatgcagctgtagctgagtttgcaggtaaggagcagaactgagccaatttcagttttctctgggaagtagaaggcagtgccatctgcagggcacagagggacaaaggatagagtaaaggcttgaagaatggcaaatgtgaattctgcattggagaaaggagggagctaaaacacaaaaggattgcttggtggtgctgaagaccaacttaagttgtaagttataaatttgtcataccacccttcagcaccgttgtggaattttttttttctgggtacactctttagccagaatataggaacaagaacagagacaattggattgctcccactttagagattagcaggttaagtggagcagaggcaagagaggaaggggttaaagttcctggcagaaaagcaggtggtgtggtgattctgaggcctgggtgaattggttaagaaaagaaggcacacactttgggaggccgaggcaggcagatcacgaggtcaggagtttgagaccagcctgaccaatatggtgaaaccttgtctctactaaaaatacaaaaattagccaggcatggtggtgggcgcctataatcccagctactcaggaggctgaggcaggagaattgcttgaacccaggaggcggaggttgcagtgagccaagatcgtgtcactgcactccagtctgggcaacagagtgagactccatctcaaaaaaaaaaaaaaaaagcacaaagatgtttaaaattgtttatcagaaggccctgtacctggactgctataaattaaccaagtttccagaacttagatattctacctctaaagattacaatgactttttctggcccagcttcttcttaatgggttttgtttgattgttttggctatttagatttagaaatgggatgtataatatatttgcaaaaaattgcaacttagtgctttaggcaagatgcaaaggaatatctatcattagccataataagtgtggaatcagaatttagagacttgatttattcctcttacatttgatttgcttctcttacaaaaggtttttcaactaaggcagtgtggtgtagggtatatttttcttttttctctcttttcaattgctgcttttccaatgtataatacaaattttaaaatattatcatgtaatgacatgaatgacagtatcatccattggactgaacacccgaatagtatagaggtaatcttggaatgaataatcctctggaatagggataatctcctggtataggggtagtcttgccaaagagataataacatcggtatctgcttagccataactctttattggatgatgcttgaatggacactgccatcaactctcttaggtgtttcctctttccttgctttcagctaaggttaatctactctttttctaaacagagtagtaagcaaatgatttaaatatgtcacattctgatcctgtgttaatgaaattattcccagtgccttaattgggctatatcccagtcttctccttttaactattctagtttacttctgcagaaagataatcacatctattagatatagatattacaagtcaaagtctcagaaggaaggcccttttccctttttagatagtggggcacgttctgaaacaacaagtatctactggttccttgctatgtgcccagcaccatgattgacctggactcaagggtaagcaagatctgagccctgccctgagggacttacactctagttggaggacagtcaccatacacaactgccttagaacctggtaggtttaggtactttatttgaaatagatacatagtgttataagggtccagcaagaggaaatgttacttttttctggaggaatttgagaaaatatcagaaacatggtgcagagtatcttctgtgatgtatataatcttttccttttcagcatgtctcaactgcattcccaatctaatacaaattttacaatatgactgtcttgtcattggacagaaaagacagtatcatcaatgggctgaacagaacagaaattacatgagcagatatctcgattaactgttataacttatcaaaatgaaccacttacgtctccttagcaaggttttttgtactramaaaatatgaagtataagattaagtgcacagctcaccttcatcggggagctctactttgcgacctgggattttcctggcaatgacattcattaaatttggttaattttcccactttccagtggtacatcagttagcaaatttgaagagcttgttactgatcttagtatctaagctataggtgactatagtaaatcacttgctccaatatggtcttctttcttcctttaaaggcccaacatgcagcagaaataggagctgatggcatcgctgtcattgcaccgttcttcctcaagccrtggaccaaaggtaagtagataggtctgaatgcatggcayctcacatggtccacttcttcttgcctccattcaaaatggttayatttaatttgtgaaagtaaagcactatagattggaggcttgaagtcgcaatggtacagtggttctctgaaatatttgctctccctggatccataaaagagactgcattaaagtacttcagttcttttgcccagtaattgatctgattgggtcatccactgagcctggttgatctgtagatgcctgtttgggtcaagtgtctgctcctagaccagtgagttgcatagggtgtcagtcacatggcaaagcatgggaccatttttcttagaagaatataagtgatgggcattttgagactacacatcctattcaaggttgagtgaatgatgaattttaagagatttcacagaaatattcattgccttctagaataccaaagtattgctttctctttctctactgtcttctctgcagaaactatttatggtgtctaagtataccaagtctttttaatcctttttgattagcaaaaaaagaagtataaattttagaaggataaaaacagacattatttgcctacatgattaaataaatccgtaattaaatgcagaataggtctaaatcatcatgaaatatcagctattattgatacatagaaaatagttcatttaggtaagcaatttaatatttataaattgcgagtttaaaatgaacatttttaaagttttaaaaattttttaaattattttttagagatgaggtcttgctctgttgcccaggctggagtacagtggcatgatcatagctcactgcagcctcaaactcctgggctcaagcaacactcctccattggcctcccaagtagctgggacttacaggcgcatgccaccatgccaagctaatttttaaaaaaattttatagggacaggatgttggtatgttgcccaggatgatcttgaattcttggccttgatcctcctgcctcagcctcccaaagtactgggattacaggcatgagccactgtgtccagcccaacatttaaaaattttttcacatggctttacaaatttttacgtgaatatgtttcctaaaaggaaaaataatgaatatatgcataataatttgtcagaaatattatcatagacttgaatacacatcgtaacagtattaagtacataaaattctcctattacccagtggcatccaaagcaggaggagtgctgctggacctatcatctgcagtagtgttgcaggcgaagctcacatgagatgatgcaggaaaccccacttactcagcaaaccagagtgtgctctcttttgatgtatctggatttctccccaaagggaaaagtaccaaattttgctggaattcttgcaaaatgtgccactactgctataatttccctcttgaagcagatattgtttatctttttgttacaggattttctcaattaaaatcttattattatcctatagtagtctctgttgtttactgttcacacttagcctttttggggtaagacgacaagagtctcacatgatggacttgtttttcatgatcatctcttaatatatgggaaggttttcatcaattttttaatagagtttagtatggtaggagaataatcgtcttactttgggctttctacagaaaggaaaataaaacttgaaggaagtgagttgcaaaaacattgcagtagcagtagcagggatagtaaaagtggttgagaatttgaggcttctgagaaacatggttgtgtttcatcagatgattctcttttttaccaggaaagccactgttttacacctgttcacaccatgactgttcctactgttctttcagatatcctgattaatttyctaaaggaagtggctgctgccgcccctgccctgccattttattactatcacattcctgccttgacaggggtaaagagtaagtactgcttctgttgatctttctttccttccaactctcacatcttaccctattatgctaagaaactccactccatcccaccctaccccatgccccaaaagcacaccaccactgactgggcagttccagttgtttctaaatgtcactctaaagtcccagcccttatcaatcattcacactgccgtataatggaagttgttaggtatgaaaggaaatttgatctctgggcacttgtagcacatacctttcatctctatcacacacacaccccttcttcttattgagaagacatgagtctgtaagcctcactaggacaggagtgtatctaccttgaacctgttgtattcttagtgcctgtagcacataggaaagtcctctgatctcttctgacttctcttctagcttttcttttattattactgtatttctccgagagaagagttttacaattagctgaaatttcttagattatttttaaaatcccactcttttctaaattccataagaggaaaaatggaggctgtactttataaacattctgaggaaaaaaacgaaacaaaactgcttttcctattctctactctcatacttagcaaactcaacgcaaaacattttacctctggccaccaaaatgtgtgtgggcatttctccccaccaacaaccaattcttcatcagagacgaactgggtgtcctctaattggattcagttctgacactgtctactggagttagcactggatcccacaggttaagggcttagtcccacaggactgcccccacttcagtgccagtctcaagtcccaggttgtggcctgtacttcccaccagctggctataaatcagggttccaattacctcctccttgggttcaattaatgtgctacagcagtttacagaactcaaacactttacttactattgcccatttgttacaaaggaaacagataaacaaccagagaagaagagatgcatagggtaagatatgtgagaaggggcatggagtttcacgccctctctgaacaagccatcctccaggcaccttcacgtattcagcaacccagaagccctgtccttttaagtttctatggagacttcattatataggcatgattgagtacctcattggccatgggtgatcagctcartctttagcccggctttcctccccagaggccaagggtgtgactgaaagttccacccctctaagtacatggttggttcccctggcaaccagccctcatcctgaggcaatctaggtgatctagccatcagtgaacttcatagcatacagaaatatacatatcactttgaagattccaagggatttaggagatttgtgtcagatgcttctatctctcaggaaattacaaaggtcttgggagctctgtgtcaggaatcagggtcaaagaccaagtattagaataaaatattctcctagcacccctgtctacaaggttttgggtactttgtctcaggaaccagggactgagaccaaatatatatttacacttcacaaatatccatctactgccttcaaggaatgggaagtttagcattataattggacaagcacataggagctgctagtcagggaccagtgattatgcctagtctgcagtcagttctggctgacagcagcrtgtggcagctcactgcagatgcrtgacactatatgagatgttatttcctagagatgtgcagattaatgaggcacttattattttgagcagttcgtgctgaggagttgttggatgggattctggataagatccccaccttccaagggctgaaattcagtgatacagatctcttagacttcgggcaatgtgttgatcagaatcgccagcaacagtttgctttcctttttggggtggatgaggtaagtcaccccctagcatgttgcagcaggtcagttccctccaaaacaatttgtgtagctatatagtagcatctcttctctttctcttttttatamaagtgaatattttttgtttctgattagcaaytgttgagtgctctggtgatgggagcaactggagcagtgggcaggtaagcatgactcatttttcccagtggttataaagtcccccataaaggcattcatcaccaaagtagctgtatttcttgcatgtgtatcctttctaatagaagtttcctttcttttccacattcttccagtgaaagggaattaaatactgcttagctgtttgttagaaattcagtcattggactgggcatggtggctcagcctgtaatcccagcactttgggaggccaaggtgggcagatcacttgaggtcaggagttcaaaaccagcctggccaacatggtgaaaccccatctctactaaaaatgtaaagaaatgggccgggcacagtggctcacgcctgtaatcccaacactttgggaggccaaggcgggtggatcacgagatcagcagtttgagaccagcttggtgaaaccctgtctctactaaaaatacaaaaattagctgggcatggtggcgggcgcctgtaatcccagctacttgggaggctgaggcaggagaatcgcttgaaaccggaaggcggaggttgcagtgagctgagatcgcaccactgcactctagcccgggcaacaagagtgaaactccatctcaaaaaaaaaaaaaaattagccaggcgtggtggcaggcacctgtaatcccagctactcgggaggctgaggcatgagaatcacctgaacccaggagacagaggtggcagtgagccaagatcaagccactgtactccagcctgggtgacagagtgagactccatctcaaaaaaaaaaagaaaaagaaaaagaaaaattcagtcattgtttagaagcatctgttgcagttacgggtgagacacatgaccacatgaattgagcacatgcacagggcctacaccttagcaggagctgacccttagtgctatagactctggtgaccagtgtctcaaggatggactcacactttgtgagttctatctttgtcagaacttatttggttacaagtaacagaaacccatttgaactagcttatgtacaagaagatatgttattataaaatactgggaaatcacatagaacctaagaggaggatgtacaaccaggcctcagagaagatgaaagccaagaactgcagaatctcaatagccaaggcagattatcttctatatgtggttttttggagagactcacctccacatctttctgcacatctctttatttctcttctctctctctgtatccagatgggctttctctgctttagcatgcacatggccagtcatggctgcccaagcgtggcatctcgggacatcattagatagcactacctaggcaagtgtccatgtcaggtccaaccagaagcatgtggcccaatgcctacttagcaaaagacaggcaattcaattagcatgtccactgcacatgttaacctgattcataagaatatgcttccaagcagattgaatgaaatttttgcattaactgaaaggtaccaggggagcaaaataacatttataacatgtcttggtgagcctggctgtgaggaagagtgactgagttgaataatataaatggcttgttcaccaagccaagatggcctatgacagccattgtaacttcaggggtatttctactgaggaaatttgaatgtgtatttgttgaccatatgtattaattcattctcacatcgctataaagaaatatctgagaaatttataagaaaagaagtttaattggctcacagttctgcaggctgtacaggaagcatggcagcgtgtgcttggcttctgaaggaaactttcaatcatggcggaaggctaagcaggcacatcttacatggccagagcaggagggagaggaagtgaggtgccacacgcttttaaataactggatctcacgagaactcactatcgcgacaacagcacaaaggaggatgtgttaaaccatgagaaactgcccctgtaatccaatcacctcccaccagccccacctccagcactggggattacatttcaacctgagatttaggcagggacatagatccaaaccatatcaccattaaacctttttccgcctggaaattctttcttttttggctcctgctttttgtcctccatactaggcattttaattctgtcaacataatctataagcaaagtacatttggttagacttcgtttctccctagttataatcacctttctgtctaaccagggatacacctaagaccattgggattcaaatgttagtattctgaaactcctcagacattgttcttccttgctctattgccacaagataacatgagcttcacattcctggaatcccttgctgttgaccccagttctatatatacaagtccaacaacatttctgttagtggtacatcaagataaatactttttctgataccgacttactatgagagaagccatttgaatttaaagaacttggggaaatatccttattatgagtttctataaccttctaccttgctggtttctctaagaattcagtgacttatttaagatatttatctttataggtagagttggagagttttttaagtccacaaaaatattttgtcagatcaaattctcaccttcatttttgttgaattgttatagaagacaacatgaagcaatggaaagctttcatggaaaccctgaagcccttctttaatcaaaataaaaaccaggcctaccttgcagggttttacaaggattagacatgatttatgtcaagcacctataatataataggcacttagtaaatgatccctcattttattatcatcattattaatattactatctagaaactagtctttaagtaatatacacattagcaaggaatataggtaatttattgggatttgcccctattttcatggtgctccatccacccagtttttcagcataaggcttttaggactcacctcagatgctaccttttatccacagttcttgtctagcattgcacctgtgtgtaccctagggcaagagctggcctcagtcgcttcctaacaaatacacctccatcttttttatcttttttctgattttcttcctttatccccttttgcctgtcttccttctctgcagtactgctcagtattgctggaaaactcagaactgaagacagtcttgtcccctaatagattaggattcaaaaacagactttaggaggactaggtgtattttttcccttttaaacagcagagggatttgaagatctggacctttcctgttgagttattgaacctgcagtatttgttattgtcttgccagtacctataactacctgggaaaaaagacaaaccagatgttggaggcttttgaacaaaaggacttctctttagccctgaactatcaggtaaaygttttcttctcttcccataaatcacagccttttttcttccccacttgaggattctttttcttctctctaccatgcctgccctcattaaaattgcccagccacttctttctttacctttcttctgttttgtactttttcttgtttaaaaccaaagctgtccccattgtctgtgttcccgacatgtctaatcaggacaggacccatacagggatggctcctctcttcctcctagaaaggatcttatttttactctatcttcaaagtacttttgtgactataataaaatggtcatagatttctgggaaaatgaccacaggctgtccccttgaggacatcacatcagagttatcacagaatatgaggaagctatgaagatggtaacctaaaatggggaaggcttcattcaaagtcagggcaggtcagtcttgtccaccctggaaatgtgctgagaactaggaacatccaccaggaaggaaataagagcctagtgggtgatccaaagtagatacaggatttgagacaggaaggaaaaaccagcagaagctgatatgttgcacggaagaccccagaggacatagtggctgctgtgaatgttccatggaggacagcctagccatcagggaaagaagagcctcagtgaagggtggaacagtctcaacaactggttgtcttttatttagagatagggtcttgctctgttgcccaggctggagtgcagcgatgtgatcatagctcactgcagccttgaatcctcctgggctcaagcagtcctcccgcctcagcctcctgagtagctgggactacaggcatgcgccaccatgcccagctaacatctggttctaacccatggttctaaagtgtaaatggaatgaattggaagaaagtagggtggatatgagagcaagacttttggggtctgagaggcgtgaggattttcaggatagtataagtggttgagaggagtatcccaagaaaataagtgggaatggaaagacagaagcaagattggagcaaatggttggtcctaataaagcttggctgtgggatctttctgaacaggacaggctgccatcagggtaatcagagattacagatcagaagtacaaagtatcctgggggttaaaggaagtgacctgcagccccaacccaaagacaacatgaagaagcagaatccagagtggtttattccctacccgtaggcctcaaagttgagccatcataaatctacttcctccttaaagtttaaataccatatgtaatattcgcctttgtcctcagaccaagtgaagctaagaacaggaacagggtagggatctaggaagctgtgccaaataaactaaacatcgacaagactttggtttagataagggtgagaagaatgaattgtgcagactctgccatctccttgcattgatggttctctccaccctgcccagtttcctagaaaaggttatttctgaaaattctaacctgttctgagcagaacatggaaatcatagatggagtagactgaagcagctataatgctgacccttccattcagtgacttctcttattggttaatctagtctccatcttttttcccctcttagtcccactctaaataaatcatcccattgaaaacaatgttggtaaggaacttagtttaccactctctgtttcaaataaatcatcccattgaaaacaatgttggtaaggaacttattttaccacattctctgtttcttcttaagaaagcacgtgtgagtgagtcttatttactcagtacataatttcagtaaaggtggtttctgctcttaaagagcttgtagtcaagtgaagaagcagacaaaaagttagggctaaatttatctcattcactttaatgtacttaagtgccatctgttatatttacatgagtgaaattacacatgtacaaagatattccttgcagctttgtttgtaacagcaaaagataaaaacagcccaaatattcatccataaggcaatggttaaatacattttattatgcaattgaattatatatagctcttaaaatgagatagctttatgtattctgacctggaaagatctacatgctatgttaaatggaaaaaagcagcaaaatataagatagtaaatgtaatgtgctatattgttcatggggtagaacatatatgtttgtaagtctctgggtattaaaattttattctacattttatttctagtatacagtcagttaaaacaaatatgttaagcattttgaaaaatacttttaaatataaaatgttattgaaaatgcatctcttaataagatgcatgaggttctaaggccgggcacggtggctcacgcctgtaatcccagcactttgggaggctgaggtgggcggatcatgaggtcaggagattgagaccatcatggctaacgtggcaaaaccccgtctctactaaaaatacaaaaaattagccgggcgtggtggcgggcgcctgtagtcccagctacttgggagggtgaggcaggagaatggcatgaacctgggaggcagagcttgcagtgaggcgagatcatgccaccgcactccagcctgggtgacagagcgagactctgtctcaaaaacataataataaaataaaaattaaaagatgcatgaggctcttttttaaaaaatcagtttgtctggaatccgtggatgaatattacttaatgctaggataagttgaggttcagcatcaatactatttttgtttttagagaagtaagtgctacaaaactgtgttcatgtaagttagataataatggaaggaattttgttatagcagtgtcacccagttctttgaacattttttgagtcatatgccaaaatcacagaatgctttaatgattttcagctgaaacctgagtagcagtgtagaaaggaaatcattgaaaaacctctgatttttgagaggacttattacctattaattagaagaatcactgtccctctctttatcaataccaatactgatattttgatttgtatcccaaggcagtgatatagaaggctgtctttattttttttcaaaagtagaaaagactgtgcaaggggaaacagaaaagaacaacctgcacctccatttcatgcagattcttatgctgatcaattttagaaaacagcacttatggaagttgaggatctagaaattgattcccataaatcttagccttagccatgtgctccttaggcatcctggaaggtgccccagagcttatatgcacctgagtttgaaaaccactgcactagctgataagtttacctatgtaagccagatggataaggggtgtgattcccatctttactctcttgtagaattccatcattgaagcttcttttctgcacgggcccattttgtaaagcctacatgtatgaaaagatcttaccttagcctggatggatcccagccatcttcacttggctatttttctccactctgacagaccttcagtaaatgaaggtgtgcagactttttagggtttctgtaatttgacttctacattatttacattgtttacacagttcaataatactaactatagatatgttgttcttttctagttttgtatccagagatttatcaactttgttgtcaaactaggtaagtgccacccatcttctgctttgtctgctgctggagactgtaaagaaaatggaataccatcactttctctgagggttcaacaagaacactttttaatggtctgttgcaagcagagttctgtttcccttattaaccctcggggccaaccatataaaactgtgaagtaaacctagttggaaaatctttggcaaccttctccattttagcacatgcctaccccattttccattctttctctcctaaaccatcagcactccctccctttacttgcttcagctcattaaaattctactactgcattgaggttgatttcagcctaagtgcttggaggaaggcagtctaaatacagattttactaaattgtgaatgactgacagctctcccaagagtatttacaatttaaacagagtttattaacacaagtaagcctaaatggatggaggtttggataatatgacaaagtaaaattggggagcagtcgtggggagaaatacagtgaatttgagtagagaaaccgctccagagtctcttaaatcttctataacaaatgacaaatgccactatccactcttctgcaagagattggcccttgggccaattgaatctgcgttaatgcaggaaaatttttaagtttatttttggtagacctccctgctccctgtcagagtcctgcataattctgacaactcctccctctcccccaagcacctcttctgtgttatgcccctcattcttgcagggttctcaacccactctcttactccttcaaggacgtttctgtttgtttttccactttcgtgatttttgcacatttgtgtgctgccagtgctatgaactacctattattgttccatttttctaagcaatggtttcacaaaattgtgggtttggtgtgataattattatgttcctaaaatacattaaaataggtattgaactgttaaaattttagacaaactaaaagcttgatgtgtgtagtagtccccccttatctcagggggatatgttccaagatgaccagtggatgcctgaaattgcagataatacgaaaccctatatatactatgttttttcctgtacatgcatacctatggtaaagtttaatttataaattaggcatagtaagagataaacagtaactaataataaaatagaacaattataacaatatactgcaataaaagttatataactatggtcagtctctctgtctgtctctcaaaataccttattatttttggactgcagttgaccacaggtaactgaaaccatggaaagtgaaactgcagacaagggagacctactgtatattcgatcatgctaatattttccctcccaatgctcagtttttactgcaactaagttaacttagcaaaagaaagttagttcttctatcttgaatctgaacgcaatagccagctaagaaaacaaattacagacattttagaagatggggattggggattatgatggataattattagttatgctttttacatattaacagtgtacctgatcttccatttgcctctccaatctgaaggctttgtctttctttagttctgaaaaaattctctgttatctgtaaagaatgttttgactacatttactcaaatctctcattctgaaagtctattagttgtattttggattttctcaatctgtatctcaattttaaaaaacatttaacatatctttctatgctgtattctggattatttccttagatctaccttgaaaatcactaattctttctttagctatgtttttactgtttgatttccctaaatatatatwtttttttcagtatttcttgttgttttatactctactgttctttacttctcttagcctatggcttctattccttcttttatctctgagaagtctctttcagaattttctgtcatctactctcaggatgtaagttttgtcatttttgaatgtgctggttctcctgctgctgcttttcctcatgggttttgtaatttttagctttgagctcatgttcagagactgttgttttctgggtaacccattgaacrttaggttgtaaggtgccctatcaagtgagtttacatttgcctctgctaggacactgtagttccaccagttctaaccagtctttcggttaattttttagtatagtacctatactaagtgtgtgacatacattgagatccaccattcacctttggctcaggcttgagatttctttcatgagatctgtttccatccacaagcctagtagaagtcaagctttcttctttatccccagaccagtgggctgggtttttttctattgctttttacagaaggctgrctaccagttttacataggtagtttaattccagcttctcaccatgcatagatctaaggcttcattttccattcccatcccagccgtataacaccagcatgaaaacagcagcgttgagtcataagccaccttaagtactgcatttcttagggacttcctaaataagcttaaactaaatttcatgctggcaataaagtcctacctcctttgatcaacaatagtatattcctaaatcagattatcctcaagggctgtttggcatcagcttctcctcacccttctgacctctttattcctgacacctttggcttctccttcttgggtttaagattaaccttgagtctttgttttcttttactgtgatcaacttttaaaattttccagcgttctgtgtttgaagcaggaagagggatttcgaatgattgctcatctgtcatattgactagaaatgttcccatcttttgttttaatcttaccctgttgtagtagttgctgttagcatatgatctccttctttgggatttttgtggagagatagacggtaccagtcatgtttcctcatttgtttttcccgtctaggttttggagtgtcacagaccaaagccatcatgactctggtctctgggattccaatgggcccaccccggcttccactgcagaaagcctccagggagtttactgatagtgctgaagctaaactgaagagcctggatttcctttctttcactgatttaaaggatggaaacttggaagctggtagctagtgcctctctatcaaatcagggtttgcaccttgagacayaatctaccttaaatagtgcatttttttctcagggaattttagatgaacttgaataaactctcctagcaaatgaaatctcacaataagcattgaggtaccttttgtgagccttaaaaagtcttattttgtgaaggggcaaaaactctaggagtcacaactctcagtcattcatttcacagatttttttgtggagaaatttctgtttatatggatgaaatggaatcaagaggaaaattgtaattgattaattccatctgtctttaggagctctcattatctcggtctctggttcctaatcctattttaaagttgtctaattttaaaccactataatatgtcttcattttaataaatattcatttggaatctaggaaaactctgagctactgcatttaggcaggcactttaataccaaactgtaacatgtctcaactgtatacaactcaaaatacaccagctcatttggctgctcagtctaactctagaatggatgcttttgaattcatttcgatgtcaccacttttcgctctttaaaaacactgggtcaggtgaggacttgtttcagttcctataactaagtaaagggcggctttctcataacaaaggaaaaagtcttccccaaagatgaatttaagtctccacttttttctatacagaaaactcaaaactcaaagtttcaaagaaccaaaggactcttcctctgggcaccacaaacttccccttcctccactgagaagactgtctctcccgcaggaccctgaattattgaaatcgaaggctgacttcctttctgcagtgagcccaggggctaatgttattatcctgtcacacttgcaactagtgacttttgtttagtgatagaagatttggggaggacccaaaggactcagaactttctctccatacctccttttactcttttctttctgtgtaatgtatcaacaactgtttaatctcccttctaacaaaccttgatataagctttctgatatcaaagtatattgacagttaacccttactgattttaaacttgactatccagtctgttaattacctaagattttgttttcatttcatctctaattgttttgatcattggcagagaaagagtatttgaaattcatatcagttttgctccttattttaatctctttgaattaaaaataaaactttttcaaaatggaaatttgaaattataagtagacttcaattatctttgctaatcctctctttaattagtcagctagttaaaagttgttatattcatatatcctcaaccctctttttgcctttgtagcttttaatttcctgaaagaagaaaatgagttgttcgtttttggttctgaggatgtgatatccgtacttactgatactaaagccaaatttaaattctaaaattaattcttgggtatccaataaacaaagaactatttttctatttttgcttttgtgaagtcaatgcttagaggatttttaagatggtgagtgagcttttgtgaacataaagagaaatatgattttaaaatgaccaggtctgagtttagctctgttaacatccagtagcttagaaatgaatatcatggccgggtgccgtggctcatgcctgtaataccagcactttgggaggccgaggcaggcagatcacgaggtcacgagatcgagaccagcctgaccaacatggtgaaacccatctctactaaaaatacaaaaattagctgggtgtagtggcgcacgcctgtagtcccagctactcaggaggctgaggcaggagaatcgcttgagcccgggaagcggaggttgcagtgagccaagatcgcaccactgcactctagcctggtgacggagcgagactctgtctcaaaaaaaaaaaaaaaaaaaaaaaaaagaagagaaaagaaatgaatatcatatagcagtaggctattaatagtgcacttaagtaaaattttggaatactatgaacttaccgttttgtttataatctattcctaaattgtttttaacattaaaactacagtaatggcatgtgaaatatttcattcaacacagtagtaaaagctgatttccaacctctttgtttcaagatagaaatctgagatcagtccactggggatggttggagggacaggagtgattttaggaattggttttacttaagatctctcttgccaggtgcggtggctcacgcctgtaatcccagcactttgggaggcctaggcgggtggatcatgaggtcaggagatcaagaccatcctggctaacacagtgaaaccccgactctactaaaaatacaaaaaattaaccgggcatggtggcgggcgcctgtagtccgggaggctgaggcaggagaatggcgtgaacccgggaagtggagcttgcagtgagccgagatcgcaccactgcactccagcctgggcaacagagcaagactccgtctcaaaaaaaaatagaacatctctcttgggtttattgaaagatgtaggaaaatgccatgggggtgaggtgcaagtagggttggggggcagtgggagtaatgtatattctttcctagaaagggtatttgccacaacttgagagaaatttcttctttctgatcacctgaagggcacggaaaatccaaactcttaggaggctgatgtctaaggctgggttgaggggctttgcagagtgactgcaacccaagtttaggtacccacctgggctcaccaaggctttttcatacagaggaaatggagtgggatctacaaacccatcaaatcaagtagaggaaacaacacatccaagccatttaaccatttccttatcacatgctgactcaaccctcagtttcctccagtggaagtaagagggaaacttggaaccaaaattatgcaaatagcagagctaagccccaggtagaggcagagcactacctcacactttgtttctggggctgagaaatggctatctgggtggacaaaaaaacccaaatcgtagtttctcctaagagtctccccttggtgactcttaggaaattgtttgatacataatacattttagcatgttaagttacacaactagaaggaaaaccctaaagcattttcttaagtcttaatcacacaattaataaatataatggaatggattcaacaaaatacatagagaactatatccagcaggatgtgttacctttatctggagacaagttacagagagtgttcaagttctattccagagggaccacctaaggagattatacatcaatcacacattcacttctgatatattttctctgatatattctgctagaatgcccttcatgaatatcagcatcccatgtttgaggcagatgttgggttaggccctataggcgcagaaattgtcacaaatgccagcctttggtgtgagagacaagccttctcatctatcagcaagcacacataacaaggttatctttgaggtcatggggaagtgggttcccacaagcgggcaagtgcatcagcatctcagtatggtctacagtccaagaccagtttgtaccattttaaggttatcctacctcaggtagaaggaggtgggataatgaccacatactacattcttgagaatcctcagactagggtgaaacaaagtgatccaccctcagcttgaatgagtggacacatttaaagcatgttagagtggcaaataatattcatagcctgtattagttcattctcatgctgctaataaagatgtatctgagactgggtaatttataaaggaaagaggtttaccattcagcatggctggggaggcctcaggaaactttacaatcatggaagaaggggaagcaaacacatccttcttcacatggtggcagcaaggagaagtgctgagcaaaaggcacccttgtaaaaccagcggctctcgtgagaactcactctcacgaaaacagcagcatgggagtaaccaccctcatgattcagttaactcccatcaggtccctcccatggcacatggggattatggaaactacaattcaagatgagatttgggtagggacacagccaaaccatatcacaggcctagctggtcttcaggttgcagttactatctgaactcccctgaatattggccaattagtactgtccttttcctaaggtaataacctcaatcaggtttgacttcccaatttgagcagaacttcagaatcattcagttaaaacactaagtatattctgccttttgctctttcatttgtctatatagaactgtacctatctgtatgtctttcaagatccttcaatatggccagaggaaagtggtgggagatggaggtgcagaagagggaccaatttccacaaggtagtgagagggggcttctctgggtccattagacttaatctgaagttagaatgttggaaagaaaccagtcaggtgaagagtagcagagggtgcattccaggtggtaggacccacatatttgacagttctgagccatgggagagtctggagtgtgaaaaactgaacagaagccaatgaatcagagctcagacaccagggagaaagagtaggaagtgattaatttaaagggactgcaaaggagccagttcttgtaaggtgttgtaagtcataggaacattaaactcacactgtttttctgtgctgtaactttaagtgctataaatttagagtgtaaaataactataggcccccctaaagactgaaaaattggtacagaaagaagaaagtttacaacaagccttcagtacattacagtttgtaaataaactgtctttattatttcaacttgttgatataaccttgtctctggaaaaattgatttttttggtctgaaattgtttagttttcttgggtttacagagaatgcatcatgattttccagttaaaatattattttcatttagtggcttttcacttagcagtagggttttcaggagtgaattaaacataataacgaggaaaaggtatatttctattcagtagcagataattctagtatctaaaacatttatatataattctgtcagttttctttttctgctggcactcaactcattggactttatttgttttttagagacagagacagggtctcactatgttggccaggttggttttgaactcctggcttcaagtgatcccacacttcaacctcccaaagtgttgggatcacccacatgagccacttataccctgccactcatcagaggtacttaagatcctcacccgttttatgattttttgaactcgagcttatgttcagtggaattttataggaattatttgaggtctggatagaagaatattccaccaaagagaatataattttaatccttctaagtgatttatctctgttgactaataaccgctttaaataattggcttgaggtttttttggatatcagaggaagtaagtctttttattctacctagcatctagtttttgatagacaagtttccttattatacccctcttctggttggtttggcttctcattgttgctattgttgttcacttttcactgaagatataaggctttctggtttatgtgtaggtctcctctcagcctctgcatgttgggcagtctcttttgtctcctttctcgtaagccccaatgcagcttttattaaaaggaagctcaagttcattaaaaatcagcagaccctttcagggtaggtgcttacgtcagggttctcttgcctctctggattcattcattcacttcatttatgtttacctctaaagcattttctttcttggcagcacagcaatacatttttttttttgtattcaacattttctgttatttttcaatggtaagtttatttagggcatctccatttttttcaagcttttggaatcttttgctttcaattactcttaaatacagcaaatttatattttgctacaggttccactctgagtcattttttcttaatagattattacatcccatttacctttattgaaaatctttctaaagtagtttgtagagggaaacattaatttgttcaggtaaataaatacagtaattctagtatccaataagaaattacaaattctagatatgtgaaactaattaacactggaaaaaagtaaaaccccataaccttatagaaatgtgttgttcttgtggtggctcatgcctgtaatcccagcaccttcagaagctgaggtgggaggatcagttgaggccaggtgtttgagactagcctgggcaacataacaagaccctgtctctacaaaaagaaaagaaagacatgtattagtctcagttaaagcttgtataaagcaagcaacaaaaatgctcaaatatacaaatgcatgggtaaataaagccctgaaccttaatgtgggaaccgtaaaagcaaatgtgaatatggcatttcaagactacataactgagaagcaagccaaactataaaataaattaattcctgtagaataaatacagagaaagcaaatgtaactgtaaaaatggagcaaaacatgttgcaaaatcctgtgaatgtgaatagattt

SEQ ID NO: 95193 - DNA, 60652 bp, Homo sapiens
gaaaccagtcaggtgaagagtagcagagggtgcattccaggtggtaggacccacatatttgacagttctgagccatgggagagtctggagtgtgaaaaactgaacagaagccaatgaatcagagctcagacaccagggagaaagagtaggaagtgattaatttaaagggactgcaaaggagccagttcttgtaaggtgttgtaagtcataggaacattaaactcacactgtttttctgtgctgtaactttaagtgctataaatttagagtgtaaaataactataggcccccctaaagactgaaaaattggtacagaaagaagaaagtttacaacaagccttcagtacattacagtttgtaaataaactgtctttattatttcaacttgttgatataaccttgtctctggaaaaattgatttttttggtctgaaattgtttagttttcttgggtttacagagaatgcatcatgattttccagttaaaatattattttcatttagtggcttttcacttagcagtagggttttcaggagtgaattaaacataataacgaggaaaaggtatatttctattcagtagcagataattctagtatctaaaacatttatatataattctgtcagttttctttttctgctggcactcaactcattggactttatttgttttttagagacagagacagggtctcactatgttggccaggttggttttgaactcctggcttcaagtgatcccacacttcaacctcccaaagtgttgggatcacccacatgagccacttataccctgccactcatcagaggtacttaagatcctcacccgttttatgattttttgaactcgagcttatgttcagtggaattttataggaattatttgaggtctggatagaagaatattccaccaaagagaatataattttaatccttctaagtgatttatctctgttgactaataaccgctttaaataattggcttgaggtttttttggatatcagaggaagtaagtctttttattctacctagcatctagtttttgatagacaagtttccttattatacccctcttctggttggtttggcttctcattgttgctattgttgttcacttttcactgaagatataaggctttctggtttatgtgtaggtctcctctcagcctctgcatgttgggcagtctcttttgtctcctttctcgtaagccccaatgcagcttttattaaaaggaagctcaagttcattaaaaatcagcagaccctttcagggtaggtgcttacgtcagggttctcttgcctctctggattcattcattcacttcatttatgtttacctctaaagcattttctttcttggcagcacagcaatacatttttttttttgtattcaacattttctgttatttttcaatggtaagtttatttagggcatctccatttttttcaagcttttggaatcttttgctttcaattactcttaaatacagcaaatttatattttgctacaggttccactctgagtcattttttcttaatagattattacatcccatttacctttattgaaaatctttctaaagtagtttgtagagggaaacattaatttgttcaggtaaataaatacagtaattctagtatccaataagaaattacaaattctagatatgtgaaactaattaacactggaaaaaagtaaaaccccataaccttatagaaatgtgttgttcttgtggtggctcatgcctgtaatcccagcaccttcagaagctgaggtgggaggatcagttgaggccaggtgtttgagactagcctgggcaacataacaagaccctgtctctacaaaaagaaaagaaagacatgtattagtctcagttaaagcttgtataaagcaagcaacaaaaatgctcaaatatacaaatgcatgggtaaataaagccctgaaccttaatgtgggaaccgtaaaagcaaatgtgaatatggcatttcaagactacataactgagaagcaagccaaactataaaataaattaattcctgtagaataaatacagagaaagcaaatgtaactgtaaaaatggagcaaaacatgttgcaaaatcctgtgaatgtgaatagatttctatatagccatagaacttgtagattaacaaatggttcaagaagaactggtacaatggagacagaaaaatgacttccaatgttacaactgcttatagaaaagataaatattcacttatgtacaacaagcaataaaaaaggaagacgtctaatagaaattggcttttgaatgaccgtaattattaacaagaaaataattttagaagtatcagataggttctattcttcattctcaaaatctagactaccatttctgctggaatccagattatatacttcatctgtgtcactcattgcattaagagtcatcagtcctttaaaccagcggtccccaacctatttggcaccagggacaggtttcgtggaagacaatttttccacggaccaggggcctgggagggatggtgtcaggatgaaaccgttccacctcagatcatcaggcattttctcataaggagcacgcaacctagatcccttgcatctgcagttcacaataaggttcacactcctataagaatctaatgctgctgctgctgtgacaggaagcggagctcaggcggtaatgcttgctcgcccttcgctcacttcctgctgtgcagccccattcctgacaggccatggacctgtaccggtctgcagcccaggagttggagaccccttcgttaagagatcaaccaactcttcaatatgtcaagatttatgtgggtaattatatcagaggagagaaggctctggtcttgtcctcttataagggcactaatcccaccatgggggctctactgtcatgacctcatctaaacccagttatatcctaaaagcgccatctccaaataccatcacattgaggattagggcttcagcataaaaatttgggggagatacaaatattcagtccatatcagcatatggatggtggttggaatatagaagaataagactctccaggtagagggtatatagagtgctaagaacagaacctgggtgtgacttgcaattggagtgcacacagaggaagagaagttgagtaggagtctagagggagtgatcagaaatatgagggcagaaccatgctcaaaggaactccaaagggcttaaatttgagcgacagaggtactcagagaacatttgcttttgggagtctcatcctggagaagatatctttgtatctcttatttcccaccaaactaagtgaactttcatcagttatttctagtcaaaaaggtaaatgtgaaatattaagtagtccagttgaagcagacctttcattatttgatcattgagtgacctatagcctcagttccaaattcttaagatagggacaaagttacctgttttataataaagcttaaaaaaaaattccctaccctgctctgtcccacttgacctctgaaatctcctagttggtcagctaccaggaacaggtaatggttgtgttgaaatcggcccactttccatacttttgggacatgttttaaggcttcatttgcaaatgttaagatcttagacagtgctagttgccaagagccacctacaaaggtaatgccagtcctcggacccaaatcccaggggactctaggtctcaggtgcagagcctaaattaagaaccaactcagtaacaaaattctccttaatccttggaagctaaagatccagctttgaaaaatgtatttccatgtaatatattgatacttttgttgtgctcattatatactataaaacacttgcaattcatttatgctagttgagtctctttatttatttacttattttgagatggagtctcactctgtcacccaggctggagtgcagtgggacgatctgagctcgctgcaacttctgcccctcctccctccaggttcaagcaattctcctgcctcagcctcccaagtagctaggattacaggcacacgccaccttgcccggctaatttttgtatttttagtacagacagggttttgccatgttggccaggctggtctcaaattcctgacctcaggtgatccacctgccttggcctcccaaagtgctgggattacaggcatgaaccaccacacctggtcttgttgaggattcttgcatctatgttcatcagggatactggcctatagattttttttcttgtgtccatatctagttttggtatcagggtaatgctgccctcacaggatgagtttgagaactggtatgagttcttctttaactgttcagtagaattcagcagtgaagccatcagggcctggacttttctttgatgggagactctatattactgatttaatctcattactcatagttggtcttttcaggttttctatttcttcttggtccaattttggtaagttgtatctgttcaggaatttatccatttccatttggtttccaatttgttggcatatagttgttcataatagtctctaatgatcctttgtatttctgtggtatcggtttaatgtcttctaggcccctgctgctttcaacaccctgaagggtacaaaaaaaaaaaaattaaggtctttccttcaatgattttattcttaattaaggagaacaatcacatgaagaaaataataagtaaatgataaactatgttgttctgattttaagaatgacagttttaaagggagtgatcactatcagctagaaggattaagaaaaacataaggaaagaggtgaaaaataaagatccatagatataatgagcccagataattgattagtctggattccctggaacaatcccagctggaaatgttttgtatcattaccttcatgggacgcactggagtttcaaaatttaacagtgactagtataataattaaggacacaattattccaaagacttggaacacaaaattactccaaagacttggaacacaaaaggttatccaatttaaacaaaagcaaccttgcagattttattcctaccttaaagtagtttgctgagcacttacagtaatgttccaggcacggcaaggagcgacctgcgttagccaggcagaatgcccgccttcactgagcttatttctttcatggtttttttttttttttttgagacggagtctcgctctctcgcccagaaaatggcgtgatctcggcccactgcaacctccgcctccgcccccgaccccggggttcaagcgattctcctgcctcagcctcccgagtagctgggattgcaggagcccgcccagccacccaagcagctgggattgcaggcgcccgcccccatgcccggctaatttttgtatttttttttttttttttagtagaaacggggtttcaccacgctggccaggctggtctcaaactcctgaccccaagtgattcgcccacctcggcctcccaaagtgctgggattacagtcaccacgcccggccagtttatttctttcaagagacactggcgttcagactatctgaatcaatccggtaactacgcccactgaacacctactacatgccaggtattgaactaagccgcccttcatatgccatctcatgtaattatctcaacaaccctaccaagttagcagcaaggtttccagttctgccttcgaagggaacctcctctcaccggagatccctatgacagaccctgcgaaatattttgctgcatcagaatgctacaggccgtcaactccctaacatgcgcaaaagcgggcagccgattatccagggtagtggattatccaggagagtggattatccagagtagcaggtctggcgcgatgcccgcccggctcagcccatctccctagcaacgaaacccttccgcgccgcgaggttgctgagccccgccccctccattggcgcgccctcgccatcccccgccctggcacgcgctctgcgcatgcgtacgctcgctggccccgccccctagcgccgcggtcggagccatttcgccgattcctccatgcgagttgctgtgcgtttctctgttgtctcggtagaaggccagagtcacacacggtcctaagagctgggcaccaggaagcgaaggctggtaagggagagacgttccggctaccatgcggggcggcggggtcgcgggcgggcggcgtggaccatggctccgcagccggctttgttgcgaagcgcgggcggcggcggcggctgggggtgggggaagggacgagccgcccgcgggtccccggattgcgggttgcgtgcgcgcctcgccgcgatgcgcttgcgccgtccgggcagcctgtggccccctcccctctcctccgcccagcgtttcccgctgctgcctctagcaggcaaagcgcgcttcctcctctggcctgcgtacgccggggcaccgcggcggctgagggaagggggtgcttcgcctgtggtggttgccgccggggcgccactggcctagggctcttcattcattcaagccacgaataactggcgccgtcgtgcaggccttgtgggtagaggaaaaaaaattgaagaatgtaaagggagagcgcctttggctagtatagcgaggtaaggcgtctcgaaggagggaggctttgagctgataacctcggccaacgcgaaggaaaagcagagcctgcagaagcggaagggattagttatcgcttaagggcagaaactgggcgggagctgaaagcaggccatgtgactggagtgtggcgagaaggccttcaaaggagaatgggttttagggtggcaagagtggaaacaaaaaccgtgtaggacaatatttcactagcccgggtgtgcagtagtggtggcaggagagatggggagaaacgaatggataggggacgtattttgaagcagaaatgcgtagtggtggaaggtagtagatctggagtcaggctacgttttctggaattcttgcgcctttttttttttttttttttttgcaagagtctcgctctgtcgccagactggagtgcagtggcgcgatggcggctcacagcaacgtcggtctcccgggttcaagtgattctcctgcctcagcctccggagtagctgggactacaggcgcgcgccaccacgcccagctaatttttgtatttttagtagagacggggtttcatcatgttggccaggatggtctcgatctctcgacctcgtgatccgcctgccttggcctaccaaagtgctgggattacaggcgtgagcctccgcgcccgcccgaattcttgctcttataattaggagctctgtcttcctgaagcaagatattctttgtctcagtttccccttctctaaagggatagtgatcttacctgtacaaggttactaaggattaagtaaaatagttccatttagatgatctattatggatattgtttgacacacattaagggttctacaagggatagctatggagaatcttaagggagtggacgactctcaacttgtgccaggagtaacttggtggatgtcgtaccgtttatggaaaccgaaatgtaggggtagggtgttggaacagatttgaggggaaatttaaaattctgttttgactgagatgccaagttagcatgcaaatgggtgagttagtgccacagttggatgaacttaattttggactttaaagagaaacgacgggcgggcgcggtggctgacgcctgtaatccagcacttcgggaggttgaggcgggccgatcaagaggtcaggagatcaagaccatcctggccaacacggtgaaaccccgtgtctactaaaaatacaaaaaattagctgggcgtggtggcgggcgcctgttgtcccagctactcgggaggctgaggcaggagaatcgcttgaacctgggaggcggaggttgcagtgagccaagatctcgcccctgcactccagcctgagcgacagaacgagactccgtctcaaaaaaaaaaagagagaaaagactaaagtttaaatatatgtatttgggcatcgatagcatgtagttggtattgaacattatggggttgtaagagactagggagacaggagtttgatagtatagtccttcgtatttcatattactcattcaccatgagggcttgttgtttaattattcacgaggtggaatttccagataaacattttcagctttccacggcttttttgttaataggacattcccttcgccaaatggatgaccagagttagactgtggccactcagacgtaacaaatttatgctaggggtgcagtttgatgacgttagacttaggtgctaacaaaatgcatcaaacgtgaaacgtgaagcagacggtttaatgctggtaatgggatttcttctcacagcaaactaaattcatagcatattttattttctctggttataaatgtggtctcatatcttgcttacagtttagactcagcatttagactgataggctccatatcttgtggtattttatagacttgttgcacttcaagaaaactttaatatcctcaaattttaataaaaaggcctaaaggagagatttggtatagaacatttaagttaataggttaccgtcttcagtactgagtgcttaatgtatttgaactttattatattattaatacatggcctacaactttggggacaatatgctagtggtcataatcagaatgagaataaaacattgaatttatatgcaaatgataactttcttaatatatagtagtttggatttgaatttaggcctccacggtgggtgacttggaagttacttttttaaatcttagtttcttacttcctgaaaagacaatgatagtacccaccatatctgtgtgccattgttgtgaggatgaactgagttaaatatataaggtgcccgttgtagaatatagggccttatataaaatactttgtaagaaaagataaaaatcactcttagtccccaaagataaccattttagggggtatttctttccagtcttgatcatgtatatgtacttttcatgaagttcaaatcataccgttttgtatcctttttcttacaacatataaacgttccaattatgtcgttaaaatttatggggagtcttaatagcaacatgatagaatatcctatgtttaacccagattcagtaatctagataattgsttcctcccagtttttgctattataaatgctgtttttaactgacttttgttttcttagatctgaagaagacacttgaatcatgggtgacgttaaaaattttctgtatgcctggtgtggcaaaaggaagatgaccccatcctatgaaattagagcagtggggaacaaaaacaggcagaaattcatgtgtgaggtactgaagaatacagtttgcatttatgtgatttatgaggttcattttggggttaaaagaaaaatgttttctgtttggagatgttaatgtgttgcacattaggaaacgacagttctttattgtgacttgactgctattgtaaatcattttcaagtcagcattacttttaaaacaatctgacaggtaaattattctaattagagcctatatcttcctcarcttcctcagtaccagtagtggggatgggaaaagttggatcaactgtttgcagttttataagcacgtttagaaagcagagcaattcttgattgcttcaaatcaaagtgcttaaatacaaatggagagcttgttcatggatattacagaatcagattttaatgtgaaccttctgttatatgagaaaaaaaaatctgagccacttaaattatttttggatacaacacaatttaagctttttcagtagctcatgcattctcttatttttatatttatatttatagagtatatttcctaaagttagctgtttgttgtctcttaatggactactgaattacgactttttaaaatctcagaattacccaggtcagtctcttagtacttttttttttttttaaaggttcaggtggaaggttataattacactggcatgggaaattccaccaataaaaaagatgcacaaagcaatgctgccagagactttgttaactatttggttcgaataaatgaaataaagagtgaagaagttccagcttttggggtaagtacctatggcgaagcacttgagatgtatgttgtaaagttgtacaaactcaatatgcgtaagagactcaagatagtaatttttcactgttttcagatatatcgtgtttcgtaatgaaatttggcatcttgttttgtctcagcactggacaaaatttctgaagatgtggattgcatccttattatatacctgtcttaggggcttgagaaattccattaatctttgtgtcttatggctttatttcatgtatttatacaccagaaatttcagagtctgttatgttccattcattaccaatgataatactttaaataaaatagaaaaatcagtaatattttagacatgtttgctcccattgacactccccctgccccgtaagcratgaggtcttgctctgttacccaagctagaatgcagtgacacaaccatagctcactgcagcctcaaactcttgggctcaagcagtccttcatccttaacccccttagtagctggactacaggtgcatgccaccacttctggcaagttctttgtgttttgaggcagagtcttgcactgtcgcccaggctggagtgatctcggctcactgcagcctccgcctcctgggttcaagcgattctcctgcctcagcctccgagtagctgggattacaggcacgctccatgatgcccagctattttttatgtttttagtagagatagggtttcaccatgttggccaggctggtcttgaactcctgacctcaagtgatccatccacccacttccgtcttccaaagtgctgggatcacaggcatgggccactgcacctggctgacatgtccttatataacaaaatagtattttatgcaatggagtatttttgtgttttttatgtcatgattatcttaattatattacgtaagtatgcaacaaatacctctgtctagtaggttgttttgggggatttttgttttgtttttctgccttttttctttttggggctcaatcaaactcttggcctcaagccatcctcccacttcagctcttccccagtagctgggactgtgggtgtgtgccgctacactaggctctagtagtttttaagaaataaggttttttttgtttgtttgtttgttttgttttttaagacggagtcttgctctgttacctagggtggagtgcagtgctcactgcaacctccacctcctgggttcaagcagttctcctgcctcagtctcctaagtagctgggattacaggcacctgccaacatgcccagctaaattttgtatttttagtagagacggggttttaccattttttgccaggctggtctcgaactcctgacctcggcctcccaaagtgctgggattacaggtgggagctacggcgcctggcccacgcccagctaatttttgtgtttttagtagagacagattttcaccatgttggccaggcttgtcttgaactcctgacctcaagtgatccgcccccttcagcctcccaaagtgctgggattacaggtgtgagccactgtgcccagcctgtctatgccagttttaacagggtcctgttactgaatttttgtattctgccttgtttatgacagtattctgactcgttatgaaagaaatcttatttccttccattcctttgactaagaactcgatagacttactttccggtagattaactgctgggtaattatagtatcttacagtctttaattttattggtttgcctatctgtaaaatgaagggattgggcaagatcatcttaaaaatgccttctggtagagaaaacagttttgcaaatgtcttttacatgtttgaagtctccctctattctttatcttttaggctcttctctatggtcttgtagatctgctagtgacaaattctcttattctctttctgaaaatatttttattttaccttctttaagaatattttcactggatgtagaattctggggtaccagatatttttttccctcttttggtatgtaagtggaaaaaaaaaaaaacaattttcctcttctctcataccacaacaatcaacaaagaagatttctgtgactaaatgtggggtggaggtgggggactttttccacacaccccaagcaagcaatcagttctgcagcagtcactagcagggtatcctccagttcaactctgacactacctggagatagcgtcagactccacagggtgaggactcagtcccacaagactccccagccccttcagacaccacttgcaagtctgggcctctagaacttctgactgactagcttcaagttatggttttcatgactgcctctttggggtcagttaatttgctagtgtggctcacagaactcaggaaaacctacatttaccagtttattataaagaatactacaaaatacagttggtgaaataagtagggcaagatatggcggaggcagcagggagctcccatgccctgcctcgaacaccattcttcaggaacctccacctgttcggccatttggaagccctccaaaccctgtcctttggtttttatggaaacttcattattcagtattgattaaatcgttggccattggtgacttgaccttcagcccttctcacttccccagaggctgggaggtgggaccgaaagtttcagccctctaatctttccttggtggttctggtgaccatccccccacacctgaagctacctagggcctgccagccagcagtcaactcgttagcatacagaaagtctccacttaggagattataaggatttaggatttctatgccagggaaatgggattgaagaccagatgtactttttttttttttttttgagatggagtttcgcttttgttgcccaggctggagtgcagtggcatgatctcggctcaccgccacctttgcctccgggttcaagcgattctcctgcctcaggcaggagtatctgggattactggcatgtgccgccatgcccggctaattttgtatttttagtagagacggggtttctccatgttggtcaggctggtctccaactcccaacctcaggttatctgcccgccttggcctcccaaagtgctgggattacaggcgtgagccactgagtccagccagagaccagataggctttaaagataatatgacactgtctacttgctgttttctgtaagaagtcagctataatcaaatcactctctcccatatgtaatgtggtagtctgtgtttttaagatcttttcctgttatttttggtttttagtattttgtgttgtgaccgggcatgggtttttttgtatgtgtgtgttctaacttgttcaaggtttgctgagattattgaatccatagatttatgtatttcaccaactttgagagacttagctattatttaagatattttttgttttattttttcttctttcctcttggtgtttatatttataaagacttgatatcccacaggtccctgaggctctcttttttttttcctatcattttttccactgtttctcaaattgaataatttttattgattatcttcagattctttgatagttttttctgtcccttccattttgctaagcccacccagtgtatttcagacactacctttttcacttttaaaatctccagcttattcttttctgtatgttttctctggtggcatttcttttcattcgttataagtgtatgtttgtaatataaatatggatttcttttatgtcatgaagcttaattctaatagctgctttaaaatccttgcctactactactaacatctgagtcatctcagggttggattctcttgataggtatattttcttgaggttggatcacattttcctctttgtgtatcaaataattttttattgcattctgggcattggaatattatgctgtggagactctgaataatgttatactcctccaaagagcattgatttggtttttttgttttgttttgttttgtttttaatcaggcatttaatttaactggactcaaactgcaaatgctgtcttttggatgttaactcagatctcacctcagttttctgatcatttaggacagccatggaagagtccttcaggtctcctttgctgggcagcttggaatctgccctgtacatgagtggttttcaagggttagccagagatttcaatatacagaattcggggctcctcctctctggctgtttcctttccagcattccctcactttctagcagctttgctttccctgaactctaattctgattcttcaggccaaaaagatggtttcattggaggtttagctgcctgggatggcttctctcaggctaaaagctacagtaaactggaattagacccttgatactccgtgcttccccattttaacttctctcaagaatctacctgcttttttcgttcattttttattgcctgcatatagttctggtgtgttgtgtgtgtgtttgtattttttccccctaaagtttattttacctgcaggagggtcagtcttacaggaacttacttggctacaaccagaagtaatcccctaggtgatttttttattattgttttaacatggctcaggtgtttcctattaaatgctctgtggatttcctactttcttccttatttcctctgttccagctacagtagctgtacttcttcataggtcttcaaataagccctcatctttctgcctcaaaacttctatacctgaaggactcttccccagctgtcctatttaacattataaacattgtcaccctcaggttacttcctaaactccttcaatgctttatttttctccgtaacacttactttttaactcagtgtttctcaactggagaccattttgtcccctcaagggatgtttggggatgtatggagatatttttgttgttgtaactcgaggaggccactgacatctagaaggtgaaggccagggatgctgctaatgacctacaatgcacttgacaaactcctacaacaaagaattaaccagcctaaaatgtcaccaagatgagaaaccttgttccaacgtaatttatttttgtttcattgtattagaatgtaagttcgtgagggcagggatttttttgtttttagttcgttgctgtgtctccaacatttagaatggttcctggtctatagcagatacttaaatgttttttggttgactgagtaaatgaatggatgaatttggaaaaaaaaattataacaacccatttctacttttaaccccactgtattattagtccattcttgcattgctataaaatacctgagactgcataatttataaagaaaagagatttaattggctcacaattatgcaggctttacaggaagtgtggtactggaatctgcttgacttctgaagaggcctcagtaaacttagaatgatggcagaaggtgaaggggaagcagggatgtcctacatagcaggagcaagagaaagtaaaggggaagatgccacacacttttaaatgaccagatctcatgagaactcactcactgttgctaggatagcagtaccaaggaaagtggtactaaaccatgcatgagaaacccacctcatgatccagttacttctcaccaggccctacctccaacattgaggattaaaatttgacatgacatttgggcagcgatacgtaaccaaactgttaccagctaccatctttatcttacctcctcattctagggaaatcctttttcataatcacttatttcatctggaacttaccctttcatgccataaattgcatttgccaaaagtgagcatgtagaggatattttaaaattttttttgctgtggacaattgtagatgtgtataaaagaataatatagtgaaactccatgtttccgtcatctggctgcaacactttcaattttactcatttctaactactcccctttcttagattattttggagcatcccagacatcttattcatctgttaatatttcagtttttaactaaaacataattctttttttaaaaaaagtattataatcaaacctaaaagaaaaatttaagaatagtgtcaatataatgagatatccaattaatgtttacattttcctgatttggtaatgtctggagatgtttgaacttgaaggaggtgtrttgatggcgtctagtgggtggaagccaaggatgttaaaaactatggtattcagaacagctttctgcaacaaataattacctggttgaaatgtcagtggtgctaatgttgagaaacattggtctgtaacctcaccactggttttagataccttagtattcttttaatttgctttttaaaattatgagtgaagtcaaacatcttttgggctttaaggatcatttacatatatatttctctgtactgcctctacatatatcttccctttttttttaattggattcttggtcttttcctctgtgtttgttaatatattagcaatattaactccttacctgtgatgtgtcacaaatattttttctcagtttgcccattataactttatttttacttgtgttttttgccatatcaaaaaaaactggttcattgtaaagtgtacacacgtaccccccccccttttttttttaatttcatcagcgttcagctttattgataacatcctccaacccatcaaaatttttctgtcttctctggcactggattctctaattatctttctgtctctgactgctccttaattttttttaaccttcctcttggtagagtgtggaaccatatccttaagtattaagtattcatacataatactactccaagcttgggtattctgtcagatacttgtgtctttttgtaatgaatgcatcagtacttgactattatctaggctaaatcatccagccttggtgacagagccagaccctgtctcaaaaaaaagaaaaatggcgtggtggctcacacctgtaataccaacacttcgggagatagaggcaggaggatctcttgagtccagaagttcaagaccagcctcagcaacatagaccccatctctacaaaaataaaatagaaatattaggtgggaatggtggtggctgcccgtagtcccatctactcgagaggctgaagtgggaggatcacttgagcccaacaggttggggctgcagtgatctgtcattgcaccattgcactccagcctgggtgatgcagtgagaccctgtctcaaaaaaaaaaaaaaaggttttaaatgggaacagattgtgagaatagaaaaagaaataaatggactatagcattgccaatgttgctaaaatctgtgtatttttgtttagatagttacatgtgtattttaatgtgataaaatatatattgtgtatactattttataacctacttgaaaaagtattttctcacattgctgactcttccttaggcagagccaagattatgcactgtgacactttcaatactcttatacctcacctattttaattgattttgaaatgttaaaaaaggaaatcctccccatcactggaaaatagaagttacatcagacacctcaattctcatacgttaggaattttcttttaggttggtgtagatagagagtgaggtggaggggaatttgaggtcctggagtggcaaggtggtagaaagaggaggacaagttagcattgtggtgccaggactgcccagtgaatttttcctgtgccttggttatyagggctgacccttgaataggttctactttgtctccataaccccaaccttggaggaacactatccttcaaggtataagctctctagaagaaagcagaaaagaaaaaaattcacaatgtactaataacacaacattagacatgttgctatatatattggcagaagcaaagtggtaatgtgaaaaagtaacaaagcgcccaaaaaaccctaagagacaattggaaatttgaatttagatctaagtgaaaattttaaattatgatcatagactatttagataagtgtctggcaaaactctggagtggtcagaggaacaatcatttattcaaaataataatagttatactattgcacaaaaaacagctttttgaatgaattagctttcatctcagaatgaaacaggagaaattaatagcgataaaatcagaaattgctgaattagaaagtaaaaataagtcaaatttttaaatgttctttgcaaacagaaatagttcatcccatctagttaaggaaaaggttgtatagatctcagttcttcatcctaaaacccatgtggttagatgggtttaagaattcagaattttccttagtttagaaaaccaatatattttatgtaacagcacatctgaggcaaaaccctgtaattaaactttcttaatacgtagtactaatgatcttataagagaaaaatatctattccgtgatcatcttaataaaggcttttgaaaaagtatttgataaaattaaacactaatgaccaataaaatacttaagaaatggagtagaaagatacttttttgactgctttaaaaggtgttaaggtagtaaacactactaaaaatgagccccagagcagtgttactcaaaatgttacagtttgtgaggaggtaagtacagaaatgagtaaacatttagaaatacagtattgtgacaggttgttcccagtggattaggggaaacaaccagttcttcattgcagacattttgagatgcactgctctagagacttaacctctaaacaaagatggtaatattacaaagaaaggaggtatgacacatgggtccttttaagtattaaaagaatttactagtccccgtgaaggcaaaagcactgacagctgccttgactttttcttttgcaggtagcatctccgcccccacttactgatactcctgacactacagcaaatgctgaaggagatttaccaacaaccatgggaggacctcttcctccacatctggctctcaaagcaggtaagggacttgaatccatgcacgtggtggagaataagatatacacaatcttgatcaccatctctgtttctcgttttgggtagaaagaactgcagtaaactcttgatgttaagagacaacccaaggccttcataaatttgcacatattaccagatcatttatttttttcttagaacatgtggtacagcatagttctttgctgtcattggcttttactamatttttctctgaataaataggttttccacaggctagaatatttggtgaaagaatcttatgaattgccttttcttgttccttattcttactaaatatattgttgacttgtttgtttaccctgtggatccaggccattgcagaatgacttacagtaggtccttgaataactttgtttccttcaatgttattatcttacaacattgcttatagtcttcgtttccaagaacctagcagcgacattaattgaggatttactgtatagtcacagcttttattgggatgtctaccatatggtagattaggatttgggtcatattgcttaagtctcatatttactgtttattgaatagcagtagtatctacttcatatgattgctttttgaggcagagtcttgctctgtcacccagactggagtgcagtggtgcaatcttggctcactgcaacctccacctcccaggttcaagtgattctctcacctcagcctctctagtagctgggattacaggcatatgccaccatgcccggctaatttttgtatttttagtagagacggggtttcactatgttgaccaggctggtctcaaactcctgaccacacgtgatacccacctcagcgtccggaagtgctgggattacagatgtgagcctccatgcccggccataaattaggataattctttaatgtatttaggatttttctacagttatgactcattaagagaattttttttcttttaacagaaaataattctgaggtaggggcctctggctatggtgttcctgggcccacctgggaccgaggagccaacttgaaggattactactcaagaaaggaagaacaagaagtgcaagcggtaaggccagcaccgtaggttacatctctgagaatgtgatttgggacttagttaacagcaaagcttaggattaggatattcacaagttaataattgggtgcatcttttaagaggttatttgagactacttattagcacaagtcatcataaagctaaactacccatttactcttgttattcacattgcctatggaggaaaaaaacagtatttttttcttggtagtaataaaaagatctcctcttcagctttataggaaatgtaattatctcaggggaccttattttatgagcacttagagtaaaaaaaagtctttagtatagcttatttttccacttcatgtattcagtgttaaaacaagcacaaagaagttgtcattttttttttttggaagaatttaaatgcaatgtattaactaatagcttgtttatataatagggcctttagatgcaataaaaagtaattctggttcagtttttgactaggattataaactatcaaaaacagcttttgcattataaaggatagtacaaagacagtattaaaaatttctgtgccttgtttgtatacctaaacttaacacagccaaatttaattatcattgattctacagactctagaatcagaagaagtggatttaaatgctgggcttcatggaaactggaccttggaaaatgctaaagctcgtctaawccaatattttcagaaagaaaagatccaaggagaatataagtacacccaagtgggtcctgatcacaacaggtttgcttgtttcattcttttccttctgtagtaagttaaggtggttttggatattcactgttgaatataatctatttttgtacgttgtctggttaattgtgtggattagaattgaattgttaaaagataacgttaatttgcacaagaataattattgatttgtgcagtttccatggttttcacatgagtgaattttagctgtgtaagaagttcagcgtaaatctttttgacatgctagacatttaagatgctcatttgaatctgaaaggcaaaagtcatgaccacaattgctggtttgtccctagttgatgtaaaagccagccaaaggtggtgattttttttttcaccttggtattgttagaggcagttactatttctttaatgggtcaggttagatacttaagctttgagtcccagaattagattgtattgcatctacatccacatttcacttaagccttgaaaactgccagctttcctaggagtcctagtgaaatttaagggcttatcgtaaggtcgaaaaggaacagccttggtctttgtatgtgggggtgtacttttttcctgttaaatgtataaaacaatataaagggaggtcattttaacagtatgtttctcagcctgcttgctgttcttcctgagagcattccagggtgtagtaattattactcccaggaaggctcatatggattagacttttctggggagcgatgtatttttattagaacggaggggaggttgtaatggaaacctttttgaatgattccgtttgctgtccgtacttatgaaataaattatccaaatacattaaaaatatttttctcgaaaatcaaagtgttctccattggatgcatctagcgaccctgaaataattaatattaatacaaaattttgtcactgatcaaaatgatatttagagcatggttcccccttcctcccactgttttgttcaatcctgaattctcagatatttctggtgtcagcctttttaaaaccgtcaggttgcaaaggagtgatacatttgttgatgatttgttttctttcatattttgtctttctgaacgcattgggcttggtagcacttggtgactttaagaacaatgagataccgaagtgtgcctgaagctcatcgttgcagacattttttgttatcagtatcttatcatagatttctgatacaaagcagtgaagaattcaggaaaagacaatgtgggaggcacagacagttgggggagccaggacagcattgctctttgtatgtccttttatttaaaggcataacagacagcaacaccagaggtctgtgttcatacacacatgtgctgctgcttaggctgaactaagcaatcacatgggaaactattgtaaactgatttctggtgtcgctgttccccctaggtggaggagaatgagattgagtgctgactttaagcctggctgagaaacatactggcatcgatgtcattaatgaaagggtggatgttgttcccctgaaagccagtggcctttgacccctgaagccgctgtgcctgaaggtcagttcacacgaggtataggaaggagtctaacatttatttttttcttaagcctcacctagccttttattcacaccaccaagtctaggttagaatgtatctgagcagtgaaaggaccagaatgcatagttatcaaagggcagtttttcccttgctaaaacctaaattcattttttagactctgctagcagttttagatataatgttacaacatgtgttttgttctccaggacctgatttaaataaatgtgataaaaataggctaagttttttgtcatccagggctgcttccaactgcaggcagatgtgagaactctgcctcaggagccactgatatgcacaaagtgtatgtgcatgtgtgagtttgcgtatattagcttaatagatcgcagtcattaatgggtggcctatgcaaaggaatcttaaaataattataaccrtaatgtaaaacatttggggcctactttatttcttggctccaagctaagtggaaaattccttttcattgaatgtgttctagctcttgagactccagcctttggaataagagtaagtaaatataaaatctaataccctaacgttttcctttcatgaacaattggctcatcaactttgattatagttgtcttatgccatgttgtatattatttgaagtttatatacttcatttgttctagggttgggcagaaataaatgttggtaattttttttttctgtgatttgcctaagcagttggaaagcctgcctgacttgggagacctggatttgctggtttctaacagtgaaatttctaaccttgcttgtatatgttgttacaggagctttattgcagaaatgaccatttatatcaagcagctgggcagaagtaagtgttactgtttccccaatattccaagtctytgtatagagaaggaatcttcacattttaagtcttgagtcacgtatacagaagctgtattatttgaaagagcacataatgtaagatagcatctagggtatattttagaatattagtaattatataaattagaggcaaagtctcccagtttgcatgtgaaaacagaccatgttagtgtaatctttcaaaggtaagacacagtgggatgattaggagtctgccagtgtcaattaattttaaaccttttttgttttttgagacggagtcttgctctgtcgcccaggctggagtgcagtggtgtgatctcggctcactgcaagctccgcctcccaggttcacgccattctcctgcctcagcctccccagtagctgggactacaggtgctgccaccaagcccggctgattattttttgtttttagtggagacggggtttcaccatgttagcagatggtctctatctcctgacctagtgatctgcctggctcagcctcccaaagtgctgggattacaggcgtgagccactgtgcctggtcttaaacattttttcatttttatatatacaatgagttattttgagtggatggataatactaagggagagaggataaaggcaggctaacttctgtcagctcacttaccttatcgaggttaatttggctagttaggcagaaagatacctttgtacccctttgctttatattcatctctcctaaggatgaatgatacaggaggagaggaaactttctgttaatattttctataaggatatgagtaacttagctttagtttaatgctaaggtcagcaaactatagccctctggccagatccagcgtactgcctgtttttataagaactgttttattgtaacatagctacactcacattttagactttacaggtcacacattgttattctcattttatttttacaactcttgaaaaacgtaaagccattcccagtcctatggtttatcaaactctgttgtcagtgactgctttcacacattaaaggcrgagttgagtagttgtgacaagatactatatggcctgcaaagcctaaaatatttattaattgaccgtttatagaaaaagtttcccaaatcctggtctaggtaaccactctggacccaattacttttactggtttattttttactctttgtcttttcaaactatgttttcttccccattttaatgtctgatattaacagtgacaactttgttgaaataggttatttgctttcataatattgatttgtatgagtcctagtatcagccagtaatcaaaactgttggttatttagttgataagctgtttggcaatttcttttgtttagcagatattaatagaataaaaaggaactagaagccatggcataccctgtattttagggcttcttgtgtacgtaagcccatagtttcttgtgataagatgtttctttactcagatgatttctttctgtctgataatcctgaccttacattatagggatttttgcacgagaacatggatcaaataagaaattggcagcacagtcctgtgccctgtcacttgtcagacaactgtaccatcttggagtggttgaagcttactccggacttacaaagaagaaggaaggagagacagtgagtctttagatttaatagacttgtgagatagtgtgagattcaatttagctcttgtttagtgtttggctgaagaagtttaattttaagaatcttacctcaggaaatgaaaatggccctgctaatcatctctgtgtctggcatgatgttcataataggcagtgagtaaataatcattgaagtaattctctcacaaaagggaactgactattggtttaggaatattgtagacctagtgttgactgtatagtcttagccccattatagtagatttgagtagtgttgttaatgtgtgatcctttttccataggtggagccttacaaagtaaacctctctcaagatttagagcatcagctgcaaaacatcattcaagagctaaatcttgagattttgcccccggtaagcataaagctgtttagtkcacatttacgtagaactctccgtagacaagcaaatcatattttttgtttgtttttcttattttttaatagcctgaagatccttctgtgccagttgcactcaacattggcaaattggctcagttcgaaccatctcagcgacaaaaccaagtgggtgtggttccttggtcacctccacaatccaactggaatccttggactagtagcaacattgatgaggggcctctggcttttgtgagtgcaatattgtttttgagatcagagtcttgtgttttactcttgagactatatttgattagtatgtctaggtaaaaaatggatttattttgaagctgaattatgtgcttttgtttgactatgttggctttttgttttacaggctactccagagcaaataagcatggacctcaagaatgaattgatgtaccagttggaacaggatcatgatttgcaagcagtaagtctgaattatttagacaagtagtgctcagagcttcagaatgttctaggtatgggtaaaaagtcaatgagcagtacattttgsccttttaaggagggcatatcaaaagatatgtaccaaactgctaatcctagttacccctgaagttagttgctatgagttgagggcctgtgagagaatttcacttcttaatgtaatttaataaaagtggagagatttaaggcagtgactccttttgttgttggtttttttgtttgttttagtgttttccaaataaaaaattaaaatgttaaaaagaatgcgtgtgcgactttcagggacaatgagaatttagtttttggacaacatcaaaagatacattcttcagaagtgtagtgaaaagaagtagttctattagagatataaatatacacattcttttttgaaaaaaacattttcatcactaagccaatggaaatgagtaagtttttatagagatggaagtttggtttttttgtttgtttttttcttgagacaaagtctcgcttagttgcccaggctggagtacagtggctcagtctcggctcactgcaccctccgcctccttggttcaagcaattctcctgcctcagcgtcccaagtaggtgggattacaggcacaccccaccacacctggctaatttttgtatttttagtagagatggggtttcaccatgttggctaggctggtctcgaactcctcacctcatgatcctcagcctcccaaagtgctgggattacaggcgtgagccaccgcgcccagtctatagagatggaagttttttaaaggatcaagacagttgcttctaatgtgttggtagacatttgactgaagtgtgacttttctaatgcagatcttgcaggagagagagttactgcctgtgaagaaatttgaaagtgagattctggaagcaatcagccaaaattcagttgtcattattagaggggctactggatgtgggaaaaccacacaggttccccagttcattctagatgactttatccagaatgaccgagcagcagagtgtaacatcgtagtaactcaggtaagtggtaaaccaaccatgaaatacctagagagcagactatttctgattctttctttgattaactaatttttgtaattatttaagattgagagagcattgtgcccttgaaattaaatttaaaaaaagaaaacataaaaacaacgtagtctttttctaatctctagtatgctacactaataagctaaactggactatgtgagggattctttttatctgggctaaagagtctctgggcctagaatcagactgtcgagattaagaattctttgtcctaaagttcatccaaatcttggtcatctctatctaaccaccttgatattgagtaaaaaccagtcagacaggtaatggttaactttcactgtatgccatgttctattctaagcagtagctttttagaaaaaactcaatcgaagttcataatgaccctaagatgtaagtactatttcacatagtatttctctttcagtaaattaaggcataaagaaggtaaaatgcccaaggttaacacagaaagtggtagaactaggattaaaaaaccaagcaatccgccttttaggattcttccttttaactaacactgtattaccttaccagcaatgagcagcgcctgcatgtttgtcccagtacttagggaagaactgattagctcttctaagtgctctcaggttaaacagttccgttggctctaccctgtacttctggcactttgtgggagagcattgcaaatagccaggtactacctctgaggtaggcttacatcttgacttagaaattattttttccccgatgggttaatgttgcttaacctgggaaacataatcagttttcagaggagagttacaaactttgaaatgtgtgcatgttcatttacatttgcatgtataaagcatatatctgaaactttttaacatttctgaaattgagatacatttttataattagtatatttgtataattgtataattagtataattgtatattttatgtgagaattgggttttctcctgaaaaaaaaaattgctgtgaaggaatcatgttgcatcctaaggctgatgataccttaggcttgaaaaaatatgataaattgacatttttctgggaaaggattcctagcttgttcacaaaattttctttgattttccgactcacccctaaaactggctatggattttttgacttacagtgaaggctgcagccccagatgtcatcatactccaataaaatattcttactcttaattcttacctcatctttcaggaagaacattgttcaagagtgcaattttacagaagagaagccttgagctcagctctgctctgctcttctcttcccttcctctcccttctaccactatccatttctaatctcaaaagcagttgtggcatatagcagaaagaagcagaatttaacaagcgagctgtgaagacaggagtctcaagttgtctgcatgtcataaatagagtaaaaattcctgcccaagtgagaagtgctttgtctcactgtcttttaaaatgttcagtggcatggaaatgtattagcaaacctgtgtcttctgatttggggtgaattacttataactcatattgcatctacattctgtggcttgcatgtttttgtcctagcgtttgtcccaaaatcagtctcatacctcttacctgtaacaagtcttcaaaattttaaaaacctatattgtgtcctagtatgtacttagtttgaaagtctcaactaaacatttatagttcagccatgaaggtacagtaagtctaagatttaaacacactcaaattcatcagcacctacctgtaatatgaaaagtaggcctgagcatgctgattggttattacagaatacagttttttattatttttgtttttaatatactgtacttcttttggcacagtctgagatagcattagttatttttgtagtactaccactgttgaatcatttttccattatcttgcacttgtagccatctataggaaaccacatgaagtcatcagttaagtattagaaagtttttttatgttcctgattttaagtgtattatctcagttcacagagcacaagtttagagttatggactggcgtataacagaatgagtagctcaaaccatgacatcagccttagtgtaaattctcaaccaaactcactgaattttatccttcggtctatccatactcaagccacttaaaacctgtgggctgtatgcagaaaattttaagtaggaaatagttgtcttctacctttaaagttatttgaaagagatgaattgtaattgtaggatgtaaatcaagcatattaatgtaattttatcaatcctgtacttaccccatagtaccatcatttcaggataagaacggttctttgtataaaataaattcagaaccttagaagatagagatagtggagcctgatacattttgtagtatctagtgcattaggaatcttgacattttgtggcagcttagtcatgttactgtgtatataacgcttagatgtgaaaaagcaaagttgggaccttttagaacttcagttttgaaagatggaagaaattgctgtagttctgagtaaatggcaagaggtgtacattaaaggtatggattctagaatactacaaaataacagtttgggagagatctccaacctcttatggtatagaaagtgttagttacccagtacctggtacatagtaatttcagtgactgcttagtacatattattagagctacttcagttaaagcagacagaagtgtggggaagaggttagcacttgaaattacctactactatggctggactccaggcaagagtagtaaaattctaaagagaaaatgagataagcagatgtatgcaatgaaaattaaaagcacatatctggaggacagttggaactattcttccagctttctgttggaaaaatattatcctttgctttcatcactggtactttctaactagtctcacttttgtcggttattgttttatttttaacatatttagtaatccaagtgtaacatagttaaaataataaaaagtaaaataattggagaaaggattatattgggagtaaaggaaatttgaagtcttaagtcatttatgtgtccttaggcaaaataacctttttgaacttgtgtttttaatctactagaatgcagcaggaaaagattttactagtattctgaagcataaataaggcatatttgctgccatggtttttactgttatattacacaaatacgatttctagatgtctctgtgttcttggttcttatttatatttgagtaatatagaatatgtatatattccttataatagaagtggccgtgcaggtatagatagaacttgttttacctatgagccttgccttgtatttattcactgtggcagaatatataaaataattattgaagcacagaagatcaagggaaaagtgatagattatttaagggataagtagagcatcttcatacgctgtacagtggcatgcagtctgagaaaggtttaaatagtcattgatacgctcacgttaggcattgttttcccacacaaaatgcctgtcctgtgaatatttctagtgagctaagaattaagaattagaagattttttttttttactgcttttggtgtactacaagagtaatacatacaccttggggaaattttaagaatagaataattttttaaaaatccaaaacccaggccaggcttggtggctcacgcctgtaattacagcactttgagagttcaagacaggtggattatttgagtgcaggagttaaagaccagcctgggcaacatggcgaaactccatctctacaaaaattaattaggcgtgatggcaccccagggtagtcccaggtactttggaggctgaggtgggaggatcgcttgaacctgagaggaatttcttgtttcttgagagacagggtcttactctgttgggattacagggacacaccatcattgctcactgcaacctcaaactcctgggctgagcaacccgccagcctcagactcctgagtagctgggactagaggcctctatcacctgacctaactgatgtttatttttgtagagatggtgtctcactgtgttgcccaggctggtcttgaactcgttgcctccagcattcctcctgccttggcctcccaaaatgttggaattcactggctagctaccataccgggcttaaagattttttctgatattttgatatgtgtgctgggatgaacatacttgtatacgcctttgatyaattggattaaattcctagacatagaattgttgggtcagagggtatgcatattttaactttcgtgcattttgccacactcccctgaagaaaaatgacagatttctagtcaaatcaactagggatgaaaaacacttgtattttaaatgttttttgtttaagtcaagggctrttgaggaaactggaagttggtaaatcagagaagcatataaaatatgggaaagagattgcggggtcatttatttctttgctgttgaaatagttgtcatgatattaatgttctagtcgtacttagagaaattcagcaaaaaagtgcttctgatcatggtttcttagcacctcctgtattagtatttaaaacctctatcatgtcttccttgggatttaagacgtttgtgttttatgggtagttaagaactaaaatagataactgcttgagaaactgaccatctcctgcgcatattcagtttaggagtgatctggaaaccacaaggatcgtagacttgaaaataaccccaaggtgacaaagcaatctctgagtaccagtagcatgtgaacacacctcagaagagtcaaatatcctaatattttaagtctttctagaagccagctgttagtagaagtgttagaaaagaaaaaaagaaaaactatagggaagacagtagtagaaaagggggacgataggttgtagaatacaagcaacttttggaaaggacgcagaaaacttggtggttacattttgtacctttagtgaaataacattttcacattccttaactcaagtatgtagaattctcttgatggacagatacagagctcatactttcatgtaacgctatttttcagggtaactgaggtgcagagcactgtgtctgtatctcattttattctcactaattaaatctctggatgaaagtgcgtgtatatataatgtgttgatatttaaacagctgatctgacttacaggagttgaaccttcagaactttggtaatttctatgaaatacagagaaattcaagaaaatggtgacataggtggaaaaatccttatccattgctaaataagattattaaaaggattgtttagtaaaaagaagatagtgatcagtaagagctaccaaaattctacacagtatgtttaacaaagtagctttcaatcttttatctttatgggcaggataaatatgagccaggtgatagtatacacaagcaaggaactgaaatctagcctgtcatcaggaacttatagacagaatcaaatccaaggcaccttaaaagcatgcagtatataaatcttcgtgtacctctgtagctatacattaggcatgtcctcatagtatccaccaagtaaagatcgtttttgtacttagaagacatggaacacttcagaagagttttcataaaaagatccaacacttaaacattaatctatagcattccccttagagttttgcagattgattgttggaaatagcaatacacacagtttttcctgctatgtgagctcatcaaaaacagtgatttcagtttcctttctctggcacctgatgcaaaagtgcattgaatgtttgattactgaattaataagtgagcagaaaggtggtcacagtacatatggcaaagaaggcagttgttcaccttcctgattcccataggtctcagttaaataattttctaaaactgtttttagtgtggcgatcggttacaaaaacaaacccccctacgtatgctgtgccctgtttcctactggaaaatcactttgcatactattttaagagttggcggcaatgacaaattatagaatcattttatatgcaaaatgaaaaacattttttaagtgtctgccgtagaaccaaatagtattttttgtacatttattgtttctgttaattattcaactagcagtaggacagatttactacaataatccaaaaatgctaataaacaagtatatctaactttgtagttgttaagtcacttttctttttttctgtctcagcccagaagaatcagtgcggtttctgtggcagagcgagttgcatttgaaagaggagaagagcctggaaaaagctgtggctacagcgttcgatttgagtctrtacttcctcktcctcatgccagtataatgttttgtactgtaggtcagtaatgtattttgatttttcatttggggtttatattgtggttgtgaagaaracttgatagcagaacagaatgactggaaagaaataatgagccagtctcagatttcttgtttaaataaaacttttggcagttttttccttcatggaaagtatgatatacccattagatcttgtagcttagagaaaatgaaatcataaaatcagtgaaaaaaactatatttcatagtacactatcactttttaatagtttaaatgtacatgtgattattttctaaaatgatgctggggtctcttagttgaaatatagataattgtccatagatttactactttgaacttttctatagtttattgattgtttttcttttcaaggtgtgctcctgagaaaattagaagcaggcattcgaggaatcagtcatgtaattgtagatgaaatacatgaaagagatattaatgtaagtaacttgagaggtacagtaaggtacttaattctgctatttctaagagaaatcagtagaatgtctttgttttccctttcccccgtttttatcattatcaaaaccatgaacttcagtcactaagatgttgaaaatctttttttagtgagattattcaatcttttttttctttattgttaaactttacagaaagccttttggaggtgaagacctatgttgtaaagtataactgcagtaatcagtattagctggcataattcagcaattgaactaatggtttatgactaaatagctgatggaatttttatgattcgtttttctttgatttggaagtttatgatagattttataatcgttttttgttttgtttttttgagacagagtcttgctctgtcacccaggctggagtgcagtggcgcgatctcagctcacagcaacctccgcctcccgctttcaagcaattctcctgcctcagcctcctgagtagctgggactgcaggtgcccaccaccatgcccgactgatttttgtattttcagtaaagactgggtttcatcatgatggtcaggctggtgtcgaactcctgacctcaggtgatccacctgccttagcctcccaaaatgctgggattacaggcatgagccattgtgcccaacctataatgtttataattaagagtccttttagatgttttcagctctgatcttttcagatgttaatgagaatcatgccaaaaattaggaagaaactagaatttatttccaacccctccctcttttggtccttgacaaaaaaactgtgtaaaatcaacttgctatgcaattaaatgatatgaaatgatatccaagctaagtagtatagtgactttcaaaggtttcagtgcatgggcagcatgcttatttaaactgtcaaccataactcaaagcatttctagtttttatttttttcttttttcttctcccatcccccatcctgaagttacccaggggttaccagccataagttcagtcaatcattagcaaacacaagacatcacttcagagtttctaagtgttttaggagttgtatgccaggaaagggggtcaaagaccaaaatatatatttcataatatcataagtcataaaattgaatagtactcagcaacaaaaagaaagtactgattcatccatcagtatggataaactttaaaacattattctaaaagaaagaagctagaggagacatacctaccatataattttatgcatatgaaattttagaaaaaagcaaatctgatctgtggtgacaaaaatcagtagtgtccagggattgggaatttccaaatttcaagcataacagtcaaaaaaaaatttaactgttatgcttgaaatgtgacattatttgatgtacttgctatttaataaaatttaaaataaggttaataaaagaatttggattttagatctcatgataatctaacacttattttaattccttttttttttttttgaggagtcttgcccttgttacctaggctagagtgcaatggcgcgatctcggctcactgcaacttctgcctcccgggtttaagccattctccttgcctcagcctcccaagtagctgggattacaggtgcctgccaccagtcctggctaattttttgtatttttagtagagagaggatttcaccatgttggccaggctggtctcaaactcctaacttcaggtgatccaccttcctggcctcaaagcatttcttaaagattttctcctcttacttttatatctgtttttgttaaacatcttcagttttgtcaaaactaagctaaagcaaataagactggtttggatggcttatgatgactataaatcatgtaacttttcagtagggcaaaatttttgctcttttgtcctttataatctcttggaaactttataggtttttcctaattaacttaattgacaaatgttttgatattatctttgcttgttaatgtagcaatgttcttagggtttaaattattccaaacactggaataatgtcatggattatcgctggtatttttctaaaacagtaagttttggtcagcttaagcaacttaagatgtaagtctgggccaggcacagtggctcacgcctgtaatcctagcactttgggaggctgaggtggatgggtctcttgaggtctgtgtactattcacagtgaaaccttgtccggtattgtttggtccagtcttctccagtcctgaccggtcttatccggttcggcccagtctggtccggtcctgaccagtcttatctggttcagcccggtcttgtccagtcctgtctggtctaatctagtccggataggtcttgtcctatctggtttgggccagtcctgaccagtcttatccggtttggcctggtctggtcctgtcttatctgatgctgaccagtcttacccggtttgctgcggtttggtctggtcttgtctggtcctgacaggtcttgtctggtttggtccagtcttgcccagtcctgaccggtcttatctggtcctgaccagtgttgtctagtttggtctggtccagtttggtttggtcttgtccagtccagtcttgtcttggagtttcactcttccgcccaggctagagtgaagtttcggcatctcagctcactgcaacctccgcccctgagttcaggcgattctcctacgagtagctgggattgtaggcgcctgccaccacacctgggtaatttttgtatttttagtagagacagggtttcaccatgttggccgaactggtctcaaactcctgacctcaggtgatctgcctgcctcagcctgccaaagtgctgggatttacaggcatgagccactgtgcccagcctgcagaaacttttcttgttctctttcaagataaatcttacctagttctgtcaccttacatagaaaacccaagtgcacttacagaccaattactacaaataatagaatttaacagtctggctggataaaaggtaatataccgaaggcagttgcattttttatacttacacaaataactagaaaaacaaaaaaagataccattgcagtagtcaaagtatttagtacctaagaataaacaaaaacatgcaagatctctccaagaaaaataagttttatcacaaaacactgaaaaaagaccatgtttatatgtagaaggatttaatagcatatcaattattttcaagttggtccacattttgaatgcaattctaattaaaatcccagtaaggttttccatataacttgatgaggtgattataaatacttaaaaagatagatttatggccccaaatagccagtatttctaaagaagagcagaatagagaatcttggtttacagataacaagacttgctttgaagctaaaataatcgagacagtgaggtacatgagttgacagatgggataagacagggcacaaaagcacattgtatgttatatgttacatgcaacattgttaggagacggtggcatgtcagattagtgagaaagggaatgagcaattaagtaaatggaactggaaactaatggttatttcaaagtagttgaaatcggttccctacctcataactaagtacaaaaatcaattccatatagattgagaactttaaacgtgttgacacatgaaagagtttttcatacactgaagtagaaaatataaaaatataaataagcatcgtctagacagtgctgtccaaaagaaatatgtaagccacatagataatttaaatttttctagtaacacatttaaaaaggtgaaaaggtgaaattaaacatatttaacccagaatatctaaaatatttacaacacgcagttaattttaagttacatttgagatattttgcattatttttcttatggtgtgttcaaaatttggtgtgtgttttacatacagagtacatctcaattcagattaatgctactgtattgggcagcatagtcttagaccttctgaaaggattgctgaaaacatgaaatgcactaaccttgaaataaaagatcaatatattattctatattaaaattaaggttatttgtttaatcaaaaggttatttccttactttaaggaaaaccacaagctcaaagattccaatatgttagtataggaatatataagcaacttctacaaatcagtaagataagtaaacaacttagtagaaaaatgatcaaaaatacaggcattttatagaagaggaaacatttggctaataaacatggagatactcaatctcattgggactaataggaaagtatagatctagatcacaacaagacactgctttatatctgtttatttaataaaaagtgacactaaaaatgttggagagtatgtggatcagcaggatcccttatccactgcttatggggatatataaataatggtaccacttagaaaaatagttaagcattaccttccgaagttcagcagttacataccctatagcttggcaattccatacccatgtttaacctacagaaacttggatatgtttagcactcctgtttagacttgaacaagaatgctcatagtagcaaatgttcacattagtaaatcttgaaaagaagccagatatgtgtaagagtaagtgaattaactgatatattcatacactgggacagtaaactgtcatcagaaaggatgagtatagtaatgtgtggatgaatcttagcaatgctgttgtatataaaaaaggaaatcccaagacaacataaaatatgcattcccataaagtaagtaaaatttaaaaatatagtcggccgaggcgggtggatcacttgaggccaggagtttgagaccagcctggccaacatggctcggctcactgcagcctctccttcctgggttcaagtgattatcctgcctcagtctcctgagtacctgggattacaggcatgtgccaccacactgggctaattttgtatttttagtcgagacaggatttctccatgttggtcaggctggtctcgaactcccgacctcagattatctgcccgccttgacctccaaaaatactgggattacaggtgtgagccactgggcctggccaatagcactcatttctaatcacaactattaggctacaactgttctcaaaaattgttattgttatcttaaaaattgataaaagatccattgtggtcctttatcttggcacttctgtgagtcatctaagaaactgaatttaattgatgtcttatggctgtataactcttttaggcatagcttgttatataaacttaatgtaatttcaaaaattttgtgtttgttttttaatagactgacttccttttggtagtactgcgtgatgttgttcaggcttatcctgaagttcgcattgttcttatgtctgctactattgataccagcatgttttgtgaatatttcttcaattgccccatcattgaagtttatgggaggacttacccagttcaaggtaatattgtgggggtggtataggaacatcttttgtgcaatagggtttgtattttcttaatcctggagattggagttacaatttaaagaatacttaaaatacaggacaaattatagtatcaaatgtatcatagcatttttgaggagtttctcktctgttattttatacagtagtgagtacagtctgagaagtgagaccaggtttcatttactacttgagtagtttgcatatgcagtaagtttccaggcctttacttataaagccaaacttttaaaaattataaagtatagtcaaagggaaatcactgtggtgtataggtaattatgggaattactgttaaaagtttaagcagccaggatcaaattaagaatcctttttagagcctgagcaactagattttgaattaagattaaaggaagtgtatcaaggttatgtatttctgataagtgagagttctttagtatctttttgtttttctaagacaaggtctcactctgtcacccagactggagtgtagtggtgcactcacttggctcactgcaacctctggctcccaggctcaaccagtcctcccatctcagcttcctgagtacctgggactacaggcgcacaacaccacgcctggctaatttttgtatattttgtagagacaaggtctcaccctgttgcccaagctgctctcaaactcatggactcaagcagtcagcctgcctcagcctcccaaagtgctgggattacagtctagagccactgcgcccagccttctttactgtctttaggagttgttaccacagttttctaggatagtcatctggtagctgtgggggaaaaaaaagaattatggtacattctaattgagggcatgaaaataagagagaaacagtgtagacagatacgaagtgatgttatggctatgccagcatgctaagccagtataattcactggggtacaggttaattctgaaactgctgtacatgtgtactggaaatgccatacaagtaaatggatggcaagtggtgggagctcagtttcttactactaggaagagaagttaaggataagtgggattgctagaacaaaccgtatgttactggattatactcaaagagatcagtacgaacgtgtgtttagctaaatggaggtacaaatggataggtatagaaataattatagataggtgtggatacatgtgttagtatacatatttttttctagctctgtgctgagtgggagtagaagcagtgacacccagtagatagggatatgccccacattcagattttgtttttaatgccattctccaactaaaggagccagatattcctggagaaatggctgcttctaggatgaaacaatatacaaaaatgagcctggaacatcttgtcccttaaagtaaggaggtgcctaaaagaagcccataacgatggggataaagggacacaggagccaacctgaaagagttcccaatggccaaagctggaacagtttgaggaaaaaaaataacatggtattagattaccaaaatacaaaatatttgtgtgtctatactgatatgtaaataagtggtttaataaaaagaatagtgacaagtgcctcttacaaaagaatttcaaataatttatgtaaatggtctccccatttttcaaacaagtgggcctacactacctaacccctgagtgggctgtgtttaataacttctgaagactacagtgtgggaagaagggaaaatgagtaactttacagtggagaaatttggcaggcactaccacaggtgatcaagttttaacatcatgaggagtaagtcatattgataggatatgcccttaatatgatgtgatgagactggcactttgggagtttttggatatagagggtgttttgattataaagacattctggggccatctgagaatcttgggcataattgatcaacagatcttccagtccttgcattgagatccttcttcagattgaccagaagccattttgtgtgtgcatactgatagaggaaggatggactgtggtatattgtattgaagttacttctttccatgtataactcccacacaatggaagtgtatagataaatgtttgattgaatgttatacacagaggataccccaactggctctgggaacatgtataaaagacacctcaccctccttcaaggtctaagagagggaaacactgagtttgattaggaaaataaggttattgctactggaactttttggcatttgtgaagaatcagactagaggggtattaaagtagttttgaactatgaattagcaaatgaatttaggtctgctccattgtgaaagttgatagtacttaacctgactggattgtccctggcagaatattttctggaagactgcattcagatgacycactttgttcctccaccaaaagacaaaaagaagaaggataaggatgatgatggtggtgaggatgatgatgtaagtgaatttcatgaagaatttccattatgggcaaattgtcaatgcagagaaaaaaatgagttaatgtaacatgcaatgtattagcattacagcaaactttcttaaaaactgactgtaatgtctgcctttggattaattgatgtattttactgcaaaaaaattccaggttcagtgacaagctgttttctatcacaagttaaattatctctggcgtaaagatcaaaggaaaaagaagaaagaatgcgatgtttaaaggccaggcatggttagggacaatgctgttgtataaggttttgctactcaaagtttttcagtaggctgcagcatctgggaaactggtagaaagacagaatgctgtgccccaccctagatctactgagtcagaatctacagtttaacaagatcctcaggtgatctgtatatacaataaagtttaagaaacagcagctatagctttagctacaggagaccggtgatgacattatcaggtggacagagtattaaatcagggagcaatgagggatttcctaggagaaacaggaaagaaaagactttgtagtgcttgagagttggacgacgatagtatagaaatggattatctggaaatacagactgagacagccagcaatgcagaatttgctagaaaacctaagattatatctttttaatcaaaagatctgaagatgtaaatgaacagcagattagaaaatttagaaaaagaccaattgcaacaactgtttctcaacttgctttatcattgattcaaatgtaaactttttggaaaatacattatttcaataatacaaagaaatatactcagaaggctccatgagagttttgagtcaaatttaagtttgtgtttgaattttagtcctatcctgtgagaaatactaattagtggaaaagttcagtatattgatgtaagctctacatttttggaaattaaatttcttctgtattctatagtgtgtgactagtcaactagaataaataatgacattacaagtaattagagtcactagaagaaatctagaagacttacctcatgagtaactgagacaatccaaaaatatgtctccctgttttttacaggcaaattgcaacttgatctgtggtgatgaatatggtccagaaacaaggttgagcatgtctcaattgaacgaaaaggaaactccttttgaactcatcgaggctctacttaagtacattgaaacccttaatgttcctggagctgtgttggtttttttgcctggytggaatctgatttatactatgcagaagcatttggaaatgaatccacattttggtatgagtctttgaattctcacatatttgagagtgaaaatgaatgtttttgctagtgccttagccagtatgtgaaaacaaaattttgtattgtttctactttcgaataaaaatatgtataatggagagctgtttgaaaccagctcctgtttttagtccctgattgttctttattgttatataggaagccatcggtatcagattctacccctgcattctcagattcctcgagaggaacagcgcaaagtgtttgatccagtaccagttggagtaaccaaggtaaatattaaacattagagtgatrggattggaagtgacgtagatactaaacaaatgttacaggctttcaaagagctacccaaaaaattgtaacccatctaaattgaggaagaaaaaaggagtcttctctttctgagcttagtagattgttgttcattaatcagttattgggtgatctttttaggacttctgtaattttcttgtcatttgttacatacataagcaaatcagtccttttaagtaactaataagaatattttctggagtgtaatttttctttcttcacaggttattttgtccacaaatattgctgaaacaagcattaccataaaygatgttgtttatgtcattgactcctgcaagtaagttactgggaaacctatttgtctgctccagtgttactaactggaaacttcttaccagttaacagaatcaaaaacaccttatttttaaactcctgtgttcttaaatctccaaaattattgtgcatctatatagcattataggtaattgataattaagagtaattattgttgattactgcaaatcagttacggtagaaagtgacaaagcttgaaactgtaactgatgattacttctcattgctcttggctgctggtgtctcacttatttcccattgggtgtttccattgatcactgccatactatagcatgctgtttgatgaataaagatgaccagtgtttagcacatgacaaatatcctaccttgaaggacactcctttaaggattaagggtcttcattttggtatgagatgagcctggaaaaatataccaggagacattctgtgtagatacaggaattacatggtaattgataaattgaaaggacaaaaaagttgaaacttggttatatctggccaacttgtaccccatgacttctctttataattccttagtctgtyctgacaatgaaaacaatttgctgccaacatccattttaggaaatgatgaatagcattctgtgccaatcccagtcatttagtggcagctgtctctgtatgtaacattgaaggaatctgaggttacttgggggttcaaatggaccacacaggcatcactagatacagatatcctaaaagttacactaaactttggaatagagatgacttaaataattactttcttttgtgtatgtgccatattccatttaaatgctttgcatttgttaatttatttaatgtttaccaaaaaaactataaggtagataatggcatgcaaagtttggccaaggcagttcagctgataagtggcaagtggatgttacattgccttttagtaggttgacaactaggagtttgcagtcagattgctgattcttacttgtgccattcatgaatagacatcacaagtaggtatggctttaactacatagtggaaagcattcactacttagtggatatataatagttattgataatacacatgagtcttagaattaaccactttttcctatgtaggcagaaagtgaaactcttcactgctcacaacaatatgaccaactatkctaccgtatgggcatcaaaaacaaaccttgagcaacggaaagggcgagctggccgagtacggcctggattctgctttcacctgtgcagccgagctcgttttgagaggtaagacccattcttgacctttagtaagggatttttgttctgttctctgtagggacagatgtgtgcagttatgtaaacctgccaatataagctgatctaagtcttgccagccatgttggaatcaggtgtaaatgtttcgtaagaatcttcatcacaaatcatttagagaataagccagatttagaaatatagagacctagattttaatattatttgtgcctaatacattgtataacactaagtggttactccttargcctgcatttccctcattctataaaatattaagttacttaacctctcttgtttcctcagttgtaaaaagaatataaataatgcctaacccatagggttggtataagtattaaatgatttaataatgtaaaatactttgaacagtgtatggcacatcatgatctcccaataagtgtttgctgttgttaatttatacaggtcagatatctcttttaaaactgaaatgcttgggaccagaagtggttttggattttttttcttggtaatatttgcattgtatttaccagtcgggcatccctaatctgaaaatatgaaatccaaaacgctctaatgagcatttcctttaagtgtcatgtcagaagtcaaaaagttttggattttaaagatacatctataagagcctttctagtggcactaaaattacatgaactaggaaggtgggaggttgtagagaaatgttagtatgagttatcatcctacaaaaagtcttgttgtcgtttttaacccatgtttgtcaacaggcaaggcctgaagagaccatgggtggagctaataacattcgcgattttggataattttttcatttttcttctcagcctaaaaggctatcaagctgtgaggataagtcagaaaccactatgcaaccagattaaattttgtcaacagtgtgtatagtgaacgataaaaggtccgatggtaattgtaaaataaaaggatgaggaaaaggcagctctgtatccctgattaccttgctgcaaaaagtttattaacatctgtgtatacacaaggaggatggttattttaygcttattttctcttagacttgaaacccacatgacaccagagatgttccgaacaccattgcatgaaattgctcttagcataaaacttctgcgtctaggaggaattggccaatttctggccaaagcaattgaacctccccctttggatgctgtgattgaagcagaacacactcttagaggtacttacaaatacaaacctacttgacgcagatattaatcataccatctgtcttgttctggcagataacacttacaaatgaatcaagatgatgaagatgtagtcaacagggctgtgataataatagtaaggcctccagtcttaccttagatagttagtatagtcactgttctaatgagcaatgagaaggaagaaagggacaatgtgagtctttaaaaaagaaaagaaaacttaaaaaggcatctcttaactatgtactaaagatcagaacataacttactcatgatacccacagtatttcatatgaatctcttacaactttttttgtttttttgagacggaatctcgctccattgcccaggctggagtgcagtggcgtgatctcagctcactgcaacccccacctcccaggttcaagccattcttctgcctcagcctcccgagtagctgagactacaggcatacacyaccacacccggctaatttttatattttactaagacagggtttcaccatgttggccaggctcttctgaaactcccgacctcaagtgatccactcacctcagcctcccaaagtgctgggattacaggcaggagccactgtgtccagcctggaacatttattttttcttgctaaacttgttagaggtacagtgaaaattaagggcattggagctagatctgaatttgaattttgaatctagcatttatctactatgtaacttcagaattttctctagattttattttttttaaaacattaacagctgggtatcagacttcttatggcatgtagaaacttacgctgctattatagttaatactgtatttatagacttcatatgaattgtatttgtttttataacctacaggatttagttgtagtacctttatgttgggtgctccagattttgattttgttctatttttgagtacagagaattgttggccgtagacatggtattagcgattggcttgacaaaagaggaactctaaactgtcttaaccttaatttagagtaatgttttgtctgcctaaaattagtgttcatttgtttctgctcacaaagaactatctccccacagagcttgatgcattagatgccaatgatgagttgactcctttgggacgaatcctggctaaactccccattgagcctcgttttggcaaaatgatgataatggggtgtattttctagtaagtgctttgttttatttctcttcgttaagtggcagaataatttcagaatcttctcctccctgtaaaagcagtattggctcagatagacaaaaaaaaaatcctaaatgttcttcagggaagtaacatacctagatattgagagcagtgtaacactaaaaaaatgaacagttccagtaggtggatatctgggcccaatatggggaaaagggcactgatttctcaaaagttaaaagcaagcaggccaggcaatgtggctcacaccttgaatcctagcactttgggaggccagggtgggagggtcccttgttattaatagttggtcttgaaagagcggtgtcaggaaaagaggtttattttatcagaaaatgttgaagattaagagatttggtatgatggggaagagagaatataaaaggaaaaatatacttggtcataatttatgataaatatgtggccattagagcatcagagcatttttttctttctgattctgaagagagcagctataaagttctttgttaagccagtttcattgcaaataaaagtagaatcatagccataaagactgcaacccacagtcgacagtcctacctgagctgctggcaacaacattgtgatctagtctggatttaactgtctttgtgtatttcagcgtgggagatgctatctgtaccattgctgctgctacctgctttccagagcctttcrtcaatgaaggaaagcrrctgggctatatccatcgaaattttgctggaaacagattttctgatcacgtagcccttttatcagtattccaagcctgggatgatgctaggtatgagtaagatttgggtgagctgtctgtagtttctcatttgtatttagttctctggtcttagagaatgatttctcatgccaatttattttagaatgggtggagaagaagcagagatacgtttttgtgagcacaaaagacttaatatggctacactaagaatgacytgggaagccaaagttcagctcaaagagattttgattaattctgggtttccagaaggtaagacttcttccattcttaagatatctttaaagtgacatttatatagtacatgcaaattgacagcaaagtgtattttagtttcaaattttagaccctatgatttttatatattcccgactatttcttagttctcgtgaacactggtctagttcccagaatgagtactttgctgataaccttatagtggtttgcaaagtaatttattagcatttagacttgaagtaaattctaccacattaaattttaaatgactttaatttatactttcggtgtacagatgattaaaggactttatgacatctaacatagaaaaaaaccaacccatgtttcttgatgagctgtagtacttttcttttccaactaggttaaaatatagaattacttcctaaaacattgagaactggaatgcataaccagaaataagactgttgagagacagaaggtagttgggcaagatggtaaatttttaaaggctgtaattggaataactaaacaaagtagtgagtggttctcttctgtcataagccagccgaaattttagtttttcctcaaaattataagaaagggaaaacttcatgtgctagaatcttgagatgaattttacaggtaatgaaacaggcaccaaggtataaattgtctttaattcatccaattaggaggctataagactagaactcgtttgtctagaacaaaatatgtctgtgctttcagcggttgactgtcatgctttccagtcagtagctaagtactcaaagtgtagactgggtaaaaacgtcagccttcattccagtaggtgtcctcttagattatctccatcttctctacaactaacagctatttaagagtagcagataaatactttgtggtcctatcagtcaagctcttattctcagagtagatggttgattgggggactttaaaaagtaatcaccccggccgggcgcagtggctcacacctgtaatcccagcgctttgggaggccgagtcaggtggatcacgaggtcaggagatcgagaccatcctggctaacacggtgaaacccgtctctactaaaactacaaaaaattagccgggcgtggtggcgggtgcctgtagtcccagctacttgggaggctgaggcaggagaatggcatgaacccgggaggcagagcttgcagtgagcagagatggcgccactgcactccagcctgggcgacagagcgagactcgtctcaaaaaaaaaaaaaaaaagtaatcaccccaagcttatttatggttgagtctataagagaatagagacgttttcgttttcttattgtggaaactcagtaacattactccttgaacttaatctgggtgtaaggattctgagaagagaaagttttacagacaggttatgtgaaaagagtgaggaagagtcagttctctgaattatcttaaatagtttgcatgtaatgtgaagatcagccagttatctgatttttgttttcactgtgctcctcttaacagattgtttgttgacacaagtgtttactaacactggaccagataataatttggatgttgttatctccctcctggcctttggtgtgtaccccaatgtatgctatcataaggaaaagaggaagattctcaccactgaagggcgtaatgcacttatccacaaatcatctgttaattgtccttttagtagccaagacatgaagtacccatctcccttctttgtatttggtgaaaaggtaagaaaagactagaaaagtttacattgaaagttgaaattgtstttacaatcattaggaacatgaattttgattttcaaagcacagtatatagcggtatttggaagttggaatgtcaaccattttgtattgtctctttctccatttgcagattcgaactcgagccatctctgctaaaggcatgactttagtcacccccctgcagttgcttctctttgcctccaagaaagtccaatctgatgggcagattgtgcttgtagatgactggtatggattttcagatgtgaactccaaactgaattcttagaattacaatatgatggaattcagctgctaatctaacttaattatatactaattatatctaacttaattatatactatatacttaatcttaaattgataccagtagaagcaaatgcrttaggaatttgagccatgtctaccactaggcacaccaccactatggaatcagaatctaagtgaagcttgagtaccctttcacatactctgtatattgattcaaaactagtggtaagcactgggcaaaaatggaatagagcttratggacagccagtaggctcagccatcatattcttgaaaacctagaaaatgccagtattctgggtctcttaaattcattattttaaagtctggatgatctggctgggtgcggcacatcacttgggctcaggaagttcaagatcagcctggacaacatggtgaaacctgtctctacgaaaaatccaaaaaaattagccccgtgtggtagcgcacacctgtagtcccagctattctggaggctgaggcaggagaatcacttgaacctgggagttggaggttgcaatgagctatcacgccactgcactccagcgagggcaacagagcaagactctgtctcaaaaaaaaagaaagtctgaatgatccatattgctggactttgttttttgtttattatatattgcatatatttttattatattttatttggcttgatagactttttggcttaagactcctgctcatagctagcagtgaattttaagaagctagtgctgattataactactcttcatatctgtgtttgcctaagtttggggccattataagtagtttttttttttaatattaatgcttaagaagttaaatttattctataatgtgccatgtgtgaagttgagagataatggtctttttctacatatactccctctcttatttttaatgtatttcgccactttaggattaaactgcaaatatctcatgaagctgctgcctgtatcactggtctccgggcagccatggaggctttggttgttgaagtaaccaaacaacctgctatcatcagccagttggaccccgtaaatgaacgtatgctgaacatgatccgtcagatctctagaccctcagctgctggtatcaaccttatgattggcagtacacggtgagtaccaatatacttcttactgaaccaagtagaggggagagatcttatgtaggcctagaattcctraagttagtgatagaagccctattacttaagtaaaattctagatatagatagagctatatagatagagagtttgatgttctgagttctaacatactcagaacaaagaatgtcatttacttttttgttagtagttggtctgctgcatcagtgcatgttggtagtgttagaaggaacttacaaatrcacatacatagttcagagtgggtcacatgacagggaagtgacacagcccagatagccctttttccatggtactgttttggcatctctaaagaaaaatattgatgagatgttaaattgtttctgtatcaaatgtatatgtgtttttgtttatcttaaacaactagagcatggatatcttaaagaaatgagaaatttatcttaattcttaaaatttttatttgcttcaggttttaaaattttttctttgcccactaatttttatttacatatacttgatacttaccaaaaaggcaagaagagtgatacaatgtatagccatatagtctttatttaggttcactaattttcagcattttgtatttgcttaatatttgtgatgaagtagcaggcattaccacattttacatcaatacacttcatgtcttttaagaacatggccacaataccacaatcacaccccaaaaccttaagtgttttagtaatactataatatactaaggtactaaaattcttccagttatccaaaaatgacctctaattcctcatcaaaaatgatgtattggcatttgatctatctgtaagatgggtagattgttatcctcatcctctttaatataaacaaggaaaccaggcacagataagacccaaggtcatacagctaataactgatagaaccaggttcaaacccaggcaacatggctcctgaaacagtgctcttactatgctattctgtggccctcctaggtggttaaatgcatagaataattcaataaccgtcataggcagataacaaatgaagtattcatgggtgtttaggagaagagagattatttttggtaggagggctggtaagcaaggagccgctgtgtatataatctgtttctatgaaggataacagtccggaaactagaaagaaagggatatatgcaagagagtttaggatgtatgaatatgtggtggcttaaattacagtagtagaattgcaatggggagatgtgactggattagacagatttgtggtagaatcaataggaattggtgatggactaaaatggaatagtgcaatgaaagaaggaagacagattacagtcatttatttttatttttatttttttttaaatttatttatttatttatttatttattttgagagtcagttttgccctgttgtccaggctggagtgcagtggtgccatcttggctcactgcaacctctgccttctgggttcaagtgatcctcctgcctcaaccccccgagcagctgggattacaggcacacactgccacgcccagctaatttttgtatttttagtagaaacagggttttgccatgttgcccaggctagtctctaactcctgacgtcaggtgatccacccacctcagcctcccaaagtgctgggattacaaacctgaaccactgcacccagccacacagccatatttctgacttagctgctgaattggtggtgttattctcgaagaaaagctgcacaggaataataagcagattggggatatgtttaattgaagttgttgacagtccatcttgatttctgcaattttttattcgctttattttccttatttgccacatgaaacagatttaggcattattaccaaggacatttttcaaaatcatatttcagaattattgcaggaaaacatctggtgataaagaccaaatagtttattggcagctccaggaaccctctcctaatgcttgccttcttggaacacttatgttattgaactgagtaagaggactgtcttaaagttctaatgacatactgccaaaattcaaaacctttgagattgaaccagaacttcagaaaaacagatggatacaattgatgactgttttagaatagcagatcaattttatttcaatttctatttgtgcatttggcttcattccctttattaaattttcaaatataactaaatgtgtacatttggtaagtcrttgggaaataataagaatgctttgctaaagtgatggtyttgtgcttttcctaggtatggagatggtccacgtcctcccaagatggcccgatacgacaatggaagcggatatagaaggggaggttctagttacagtggtggaggctatggcggtggctatagcagtggaggctatggtagcggaggctatggtggcagcgccaactcctttcgggcaggatatggtgcaggtgttggtggaggctatagaggagtttcccgaggtggctttagaggcaactctggaggagactacagagggcctagtggaggctacagaggatctgggggattccagcgaggaggtggtaggggggcctatggaactggctactttggacagggaagaggaggtggcggctattaaaacttggttatgtcagttcctgtgtgtagacagtaaggaaaaaaaggcatgctatgtgttacgtrttttttccagtatgtwtatttgccaccaaaaagtaaatgcattttcacccattctgkggttcattgtagtttaaggaaaccaagcatatagatgcattagtgattktgtwtatattatgtaaaatataacgatctcttaaaaataccacagtttgtatttttycttwaaggagtaaagatttgccttwaaataacttggtattttcctggctttcgtttaatacaatagaaaataaagtattacmccgaatacttgccgtgtagtttgtttgttgacctcgtatgttagaaaattttacaatgccagctacatctgttgattttaaatgtcagagaagttgtaccctgtttcaaaagtatactaagtgatactacttgtaatagaataaatcatcttggaattgaattgttaccttttgaagtaaatactggcaagtgcacaagccacataaacctgaataaaacttttgacctagggttgaacatttggcttcctcccatattctgtctttgaataagaccaaggccagcattttcttttctaagttagtttccacgatgacaattaaaagcaataaaatcaatccatagaactcttgaataaaaggtaaatgaagcttcactgatgtgacacatttacctaccttactgtgttgcaaaaggtttttgttaagctactttgttttaatagagatattcatacatttatagcacattacagtttccagtgaattttttcacatttctcatttgagcaagatacagtggagagggcaaaggtactggattacacagaactgggtttgtcttaattctgttctcaaccatgtggatgatcttgggcatatttttgttttggtttccttttcaaagtcctttatcctgcatacatgttttagatcaccttcagcaattattgttaagctgatggcacctatctgcagactcacaagtctgtctccaaccgaaatttcctttctgagccatgtaaacaactgcacactgaacatgcgtctctgcttaaatatcccacagaaaaaaatctcagtgccttccaaactgaccttcccctccccacctaccctgtgtcctgacagtactatgttctctgctctgctctttggagtttcagctgcttaattgcttaagccaccatctctagtcagctcaaaatatctttcaatatacttttatagttgagttgcctctgttctattcagtcttagtttggacatacagtgccacagcaacttaactgatcctgcctacaggcctgcctcaagatgatctccactacagctacagtaaacattcccaaacaaatccagtttcataccccctctcctgacttaaactaatggttcttaactgccatcagggtagaggctaaactcccttcttagccactcactccggctctaccttcatttctgctgtacagctgtagctagccaaactgaactagcaccatcgattgatcatgagctttctctccctttgcaagttgtgaaaactcccataaaaggtataaaatcagtaatggttcatttgaatggtactcatccctccaacaaattcaattagaaatgtaaattgataaatggccaaaagttgtcaaagtgcattctctgaaggttgaaagaagcactaaggcacagttctaacgttaccatgttcagctaaagacctgaggagctccatgtgtagcttcccccggtcttgtgccccacatattccagctgtcctccctaaactcgtttgtctcttaaccgcagtgctctgcttggtactttctccctctgccatgacccagaaagtgcttccacatagccatggacttgtctcatttgttttccttattggggatcacagttctgcattgcctgttacctaatgtctgaaagcagctgtttcactagttgcttacatgggaggaaaagttcagtgccatttgtatttgtcatagctgtaagtgggaatccagttaccaaagaatccatcataaggtccagaaatcattccttttcttagatgagacttaaaagagcagaaggctacgtagagtattttgtgacattaataccttgagacatcaaccactgtttaatttcttttttgaggcagggtcacccaggctggagtgtagtggcacaatctcagctcacttgcaacctctacctcccaggctcaaacaatcttcccacctcagtctcctaagcagtggatagctgggaccacaggcccctgccaccaccacacccagctaatttttgtattttttgtagaaatgggttttcacctgcccaggctgatcttgaactcttgacctcaggcaattcacctgcctcggcctcccaaagtgctgggattacaggcatgagccaccacagcccgccttcatttcctttcttagccatctctacattttgcttagaacaaagacaatagttaaagaatgtcacagcaagtgtgcaatgactgaaagttcttccaaaatgagagcttgaatacacaccgttcccattcaggaaatgggagagaattcgaggaaaaaataatgtagaaagttttctgcttaccaccccttctctcacagcacatatctgccggggtttgggggtaataagagttggcagtgacaattgagtcagcccttctagaagttcagacaggaaagagtggcctgatgtgcacgtgtttggtctgtggttgacagtttgaaagttaactggaagaaaaagctgatgtgccaattgcaggaagccatgctgcagacctccctgcgttaacagaatgtgtaggtacagtgtcctcaagtaagcagctacaatttggtgggatcttttgtgctgtgaagctacactccagaccctctgaatgtcaccgatgccataggaacagatcagaatatgaatagttgtgccaacttaggggtcagcccagacaacaagaaagaagacattaactttagccaagcatgtatttgaataccaatttccctctttctgaatctggaaacagaattgggacaggaggatagtaaagaaaaccaaaaatggaatttctaatttggaactgatgtgaattttggttttgactgggaaaacggctcctgaattctactgtatttaccagaaagacttagacttgaattactgtccagaagacaaaaagggaagttttttaaagttgtatttgtgtaactttcatatttgcagactgttctattacatgtagtataaaatatttctggaccatgtggggaaaatttaatattgaatctcaaagttaactgaggttacctgaatttctgagactattttagtgataatttagcttctaagaaaagatgttgaggagaggtggagcaagatggctgaataaaagcctccagtgatcatctccctgcaagaacaccaaactgaaaactatccacacaaaaacctttgtaagaactaaaaatcaggtgagcgatcacagtacctggaaagaggtatattgaggaaagaggcacggaagaaggtaggaaagacagtcttgactggcctacatcaccacttctctatgccctggcagcggccacatggcgcagatagaatctgtgtgcctggcagtgggggaacagattgtgagactgcgttggaactcagtgctactctatcacagtgcaaagaagaatttagcccacgcccatggaggaaacatttatacctagccagagatagctaggtatattgatacctagacacctagatatttatagccagagatgaattgtccttcccagtagttggaacctgacttctggcaagccctgccactgcagaccaaagtgctctggggtcctaaatgaaaggcagtctaggccacaaggactgcaattcctggacaagtcctggtgctgtgctgggctctgagccagttcacttcaggtacacacaacctagtgagacrccagctggggcagccaatggagtgtttacgtcacccctcccccaaaacagaaagcacagcttgtggcttctagaaggactccttccttcagctgaagaatggttcaacatatgcaaatcaaccaatgtgataaatcatatcaacgggatgaaggacaaaaaacatgataatttccattaatgctgaaaaagcatttgttaaaattcaaccatcccgtggggtggggggaggggggagggatagcattaggagatatacctaatgtaaatgactagttagtgggttcagcacaccaacatggcacatgtatacatatgtaacaaacctgcacgttgtgcaaatgtaccctagaacttaaagtataattaaaaaaaaaaacaaccatcccttcatgatttaaataaaaccctcaaaaaactgggtatagaaggacatacctcaatacaataaaatccacatatgacagacccacagctagtatcatactgaatgggaaaggactttcctctaagatctagaacaagacaaggatgccactttcaccgttgttattcaacataactggaagtcctagctagagcaatgagacaagagaaagaaataaagggcaaccaaattggaaaggaaaaagtcaaattatccttgtttgcagatgatatgatcttatatttggaaaaacctcaagactccagcagaaaaactactggaactgataaatttggtaaagttgcaggatacaaacagacatacaaaaatcaatagcatttctatgccagcaacaaacaatctgaaaaagaaatcaagaaagtaagtcaatttataatagctacaaataaaataaaatatctaagaataaacttcactgaagacatgaatgatctctacaataaaaactataaaacactgatgcaagaaattgaagaggacaccaaaaaatggaaaaatattcctgttctttgactgcaagaatcgatattgttaaaatggccatactacccaaagcaatctacagattcaatgcattctctatcaaaataccaatgacattcttcacagaaatagcaaaaataattctaaaatttaaatggaaccacaaaagacccagaatagccaaagtcatcctgagcataaagaacaaaactggagaaatcacattacctgacttcagattatactgtagaactataggaaccaaaacaacatggtactgtttgcctcctcagaggaaagaatttgaggggcataaggcagaaggagagactgaggcaagttttagagcaagagtgaaagttttattaagaagtcttataacaagggccaggcccagtggctcacgcctgtaatcccaacactttaggaggctcaggcaggtggatcacctgaggtcaggaatttgagaccagcctggccaacatgatgaaaccccatctctactaaaaatacaacaattaaggccaggtgtggtggctcatgcctgtaatcccaacactaagaggccgaggtgggcagatcacctgaggtcgggagttcgagaccagcctgaccagcatggagaaactccgtctctactaaaaatacaaaattagccgggcgtggtggtgcacgcccgtaatcgcagctactcagaaaagctaaggcaggagaatcgcttgaacccgggaggcagaggttgcagtgagctgagatcgcgtcattgcactccagcctgggcaacgagcaaaactccgtctcaaaaaaaaaaaaaaaaaaatacaaaaattagccagacgtggtggaggtcacttgtagtcccagctactcaggaggctgaggcaggagaatcgcttgaacccaggaggcagaggttgcagacagccaagatcatgccattgcactccagcctgggtgacagagtgagactccatctcccaaaaaataaataaataaataaaagttttataacaggaataaaaggaaggaaagtacacttggaagagggccaagtaggtgactcaagacgcaagtgcgtggcttgaccttttgacttggggttttatacactggcatacttctggggttttatgttacttctccccagttgccaaactcctgagctcttatcaggaagctgctgatcaccagtttcaggtgttttctatttattaggagagactgcctttccttggcactggctgtgaccagttattagtttagagagacagttgaccacctgaccatcacctgatggttgcctgacactcctggtgtattgtggggggtgggggaaggggcggagctctcttctgccccactcatacccaactagctacccactgtaacattacttgcatgaaaacaggtacatagactcatggaacagaatagagaaattaaaacagttgaactcatggagataaagtaatggttaccaaaggctggcaagggtagtggtggtggtaggaaagtggggatggttaatgggtacacaaatattgttagattgaatgaataagatttagaatttggtagcacaacagggcaactacaggca

SEQ ID NO: 95194 - DNA, 95940 bp, Homo sapiens
tggcatgatctttgctcactgcaacctctgcctcttgggttcatgcgattctcatgccttagcctcccaagtagctgggatcacaggcacatgccaccatgcctagataatttttgtacttttagtagagatggagtttcaccatgttggccaggctggtctcaaactcctgacctcaagtgatctgcctgcctcggcctctcaaagtgctaggattacaggtgtgaaccaccgcgcccagcctctttcttttcccttatctttaaaggatcttgttctgtattgaagagtgtcttaatctgtttgggttgctataacaaaataccataaactgggtgacttataaacttcagaaagtgttttatgttttaaagttaaaatcgtaaaaaataagtgtgttaactagtactacaactcttccccagaagcagctgtatttgcagttacctcaccaaacgaaagatacaaactgttggtaagttcaaccaatccaaatggaggtaacccattaaaaaaaaaatctataaaatttagactgcagccactcatcagttcactttagtggcctttcagggaccttctgtttctcagctgataacactttggccctgggagctgcatcccgcatcacagggcctacatggaggaagtccaagatcaaggcactggcagattcagtgtctggtgagggcctgctttccagctcagagacagctgccttttttatgtgtcctcaaatggtagggggaggagaggtctctctggggcctgttttataagacctctggggctcttataaaagaggccccagattttataatctcattcatgagggctctcctcttatgacttaatcacttcccaaaggccctaccttctaatagcatcactttgggggttaggatttcaacacatggatttgagggagacctaaacattcagaccatagccaagaatatgtctcctaaagctgccaactcaaatgttctattatttggttttgactcttgaaactctcccagcagaacctgcctacatttaattatgatctgcatgtttatagttttatgacacaaagaagacacactatttgtcttaagggattcaggaaggactgctattttgatccttcacatttggaattatgatcctggttacatgctataatcagaggattcccagaactgcacctacctactgtctttatagctgaatcaaagcacctggcagttttatctatctcatcaactccctccacatggctttcttttatacttgtaatttctggaccacattttttaaaaataaaaacagtgtattctattccttctcctgccccaggaagtggaaagagcaacaaattaatagttagaaaaccgtgtttgagttcaaacttggccaccaatgtgccacacagaaaatcgttacctgtagcaaaggctgagcatccttgtgatggccatgtgcctgtcttcagcctggtactgacatccattacaaatccccatgcagcacccagtcctgtcaatcacccacaacaacctatcctgccccataaaataatcacagcacttttcttctgtatcaaagctgaatcctgtgaaggtcccgtcctctctctgggagacccgggattgaacccatcctgttccacatcaaccatctccaaaacaacagcccttggcatcgtgtctcctccagtattctttcaccctcatactgttttctctccccctgatctttcttccttcccattctttatctcaaacatttaacagtgccttctgaaatacccatgctatggtcaacaaatgcctcaatattctttatctcttgattaactcttccctacacctcttggctacattgggagcagaaaaggatgatgtttcggggatagaggacataggagtgcgaaggtcctaggttctaacttggatatatgagtgttcattttcttattcttttaatgtgtacatattcattacatatagcctttacatgcattatctgcttcctcattttaaaatattttataaaaacacaatctctgttcttttgaggcacatatcatttaaccataacgctcagtcccttttcatcagtcactgtcaattattggtcctgattgttctccctcatctattgctgcattgatagatcgtcttctccagcaagcacctactatcaatctggttgatttcaatactcaacacgtgacctgtccaacaaactagattctgagttccttgagctccttggttcaaagtcattttcttcttccctctctcagcctccctgaactgttcaaatcagtaatgtagaaaatctaccctctaactccaacactaccttccaagtgtttgcttcagtaatccgctttttacctgggctggactgtgagaccagctaagctgagttaagggaacttgtgttatatcaagcaatccctgtcctgccctaggaggcagaatcccacaatcctcactcatacagtcagttccagccgaggcctgaggagtccatcctcctgcaatgggagatgcagctcccagtgccaaggtgatatcagctgagaaacagaaggtccctgaaaggccactcaagtgacctcatgagtggctgcagtctaaatgttaaagaatttttttttttttttttgctgggttacttctatttggattggttgaacttatcaacaattgatatattttgtttggtgaggtaactgcaaatgcagctgcttccagggaagagttatagtactagttaacacacttatttttcacaattttaacttcaaaacataaattttgccataagtggtcaagtcagtgttgtaaacaatggcgttatctgatcaatcacacgtctctgattttaattcccaactcccatttaagttcagattctcttctcaaaattccatggggactgttttcacaactgcacagacaccttaagatccctatgtcccaagacagaggtcattatcttctccctcaaacctgctccccttccagaattctagagctcagtaaccagctgagcatatcagggtcatctttgattcctccttcttcctaatgtcccaaatccagtcaaataccaagtcccatccattttacctttttttgtaatttaatttatttatttagagacaggttcttgcctggtcatctaggctggggtgcagtggcatgatcacagctcattgcagccttgaactcctggcctcaagcaatcctcctcctgcyttagcctcctgagtagctgggtatacaggcatgggccaccatacctggctaatttttaaaaaatttttctttatagagacggggcctctccatgttgcccaggttggccttgaaatcctgatctcaaatgattctcctgccttggcctcccaaagtgctaggatgacaggcatgagccaccatacccagctaattttttttttttttttagtacagatgggatctcactatattgcccaggctggtcccacattttaccttttagatatttttttaacacatctccaatgccaccatccttatccaggcattctttagctctcacttgtctatagcaacagcctccccatcagttccctgttcctatgcctgcctctctccaggacagttcttccatggaagtctaagcagtctgttcaaaattcatgtccctttcttgactcttaggatatagtcccaaatccctattggcttacaggaaagtccatgccctctcccacctactcttctggcatcctctactgcctcttgaccccctagttctctccactccaaccaggctgtagctcttcagtttctcaaacatgctatgccccttctcacatctggttctttgcacaagctgtccccctgcctggtatgccctccttccctttcattcagctaatgcatttatcctcttgtcttagctagtggacactgtctcagggatgcttccttgactttctagaaaaggttatgttaatttgcaatatgctctcatagcactctgaatttttttcattgctgaatttagttattcatatatttgtttatcccataaaaatatacaactactacatacccctaaaaattaaaattaatgccaggcgcggtggctcacacctgtaatcccagcactttgagaggctgaggtgggcggatcacaaggtcaggagatcgagaccatccaggctaacatggtgaaaccccatctctactaaaaatacaaaaacaaaattagccaggcgtggtggcgggcgcctgtagtcccagctacttgggaggctaaggcaggagaatggcgtgaacccaggaggtggagcttgcagtgagccgagattgcgccactgcactccagcctgggcgacagagcaagactccatctcaaaaaaaaaattaaataaaaattaaaaaaaaattaaaattaaaaaataaaaatagaaaataaacataattatttaatgtttgccttctcccattagaatgcatgttccatgaggacattaatgtatctatgttgttcatggctatatcttcagtgccttgccaatgctcaacacatagtcaaatcttaataagtagttgctgcttaacctacagaatgggagaaaacttttgcaatctatccatctggcaaagggctaatattcagaatctacaaagaacttaatcaaatttacaagaagaaaacaaataaccccatcaagaagtgggcaaaggatatgaacagacaattctcaaaagaagacatttacgcagccaagaaacatgaaaaaaagctcatcatcactggtcattagagaaacgcaaatcaaaatcacaatgagataccatctcatgccagttagaatggcaatcattaaaaaagtcaggaaacaacagatgctggagaggatgtggagaaatagaaacgcttctaccctgttggtgggagtgtaaattagtccaactattgtgaaagacagtgtggcaattcctcaaggatctaaaaccagaaataccatttgacccagcaatcctatcactgggtatatacccaaaggattataaatcactctactataaagacacatgcacacatatgtttattgcagcactgttcacaatagtaaagacttggaaccaacccaaatgcccatcaataatagactggataaagaaaatgtggcacatatacaccatagaatactatgcagccataaaaaggatgagtgcatgtcctttgcagggacatggatgaagctggaaaccatcattctcagcaaactaacacaagaacagaaaaccaaataccgcatgttctcacttgtaagtgggagttgaacaatgagaacacatggacacagggaggggaaaatcatacaccagggcctgttggggggtggggggctaggggagggatagcattaggagaaatgcctaacgtagatggcgggttgatgggtgcagcaaaccaccatggcatgtgcatacctacgtaacaaacctgcacgttctgcacatgtatcccagaacttaaagtatatatatatatacactttatatatatatatatatatatatatatatatacactttatatatatatatatatatatatatatacactttatatatatatatatatatactttatatatatatataaagttaaggatttcgtttcaatgtgcagctaaaacttaagcactaatagtcaattgtagctgtgttttcctaaagccctttgacctttattttccacttcacaaagtttgttacatatatgatgtattgccctctttctcttttccctcttcccagtgatgcatcacaaattattgcatttttattgggtgaggcccagctaatctctctgtttatagctctgacctttctgggtgcaaacacaaagtgaactttggtttatctcctgccataaygtmgctgctaattactggcaagcaggctgtgttccacggcccatgtgaccagttgggcatgaccagagagaagcgtggggaagagtgggctgagggactccactagaggctgtccatctggattccctgcctccctaggagcccaacagagcaaagcaagtgggcacaaggagtatggttctaacgtgattggggtcatgaagacgttgctgttggacttggctttgtggtcactgctcttccagcccgggtggctgtcctttagttcccaggtgagtcagaactgccacaatggcagctatgaaatcagcgtcctgatgatgggcaactcagcctttgcagagcccctgaaaaacttggaagatgcggtgaatgaggggctggaaatagtgagaggacgtctgcaaaatgctggtaagaaaatgttaatagamtcttcctccactctgttactacctctggggacaaaatgttgctaagcaaagaccttgtgttctttgatcacacaactttctctaaggactgtccctaaacccctttctatttcatgacagtagctccttagagagaagaatttgaaccctattatgctgtgctcactcacacttcaccttgctctgggactagccctgactcaggaaatgtaaagtgttcacggcagtgaaacgtcccagttaaaactgggtttaggccagatgtggtggctcacgtctgtaatctcagcaatttaggaggccaaggaaggagggacactgagcccgggagttcaagaccagcctgggcaacatagcaagactccatctcttcaaaaagaaaataaataaaaataaactcagtttattgcccggttccaggaaggcattatgtttccttctgtactcagaggtaagatttggtctagacctaagatttcacagggatactaatcaagaagatgaattaagacagtcaatttcacatagacaccaaatctttctctgggccttttatccagagaaagacatttgtctctggcctgttcactcttttttttttttttttttttgagatggagtctcactctgtcacccaggctggagtgcagtggcacgatctcggctcactgcaagctctgcctcccaggttcacgccattctcctgcctcagccccccgagtagctgggactacaggtgcccaccaccatgcctggctaattttttgtatttttagtagagagggggtggtctgttcactctttacatttcctgtggctgtgattactagacatagttaatataaaacatttgcaatcaaattcattgttgcagttcttcattgtaccttttagttataaaaataaattttataacattacatgaaatgtgtaaaataaagggggaaaaaaagcagccatgattcccagccacctggatgtttccagtctgttttcatgtgcttcttagcttcctgtttttaagaacgtggttggtgatcactatggcatagaaacagttttggatccttctggttcacttcacattattgcacaagtgactttcctagagcgtcatggcctttctagtcatcatgtgaattgatatataatatccgccagatattataatatccagtatgtatyatatccactggatataaattacctaatttgggggatatatatgataagatatatataaaataattctctgatgtaggatatttcatttgttttaaatttctcattactattttcataatacttcaatgaacattttcattttctgcattccctgagattagattaccagaaatagacttattgagtcaatgagtatttaatgcatcttaatggttatttgtggttttaaggatggtatgtcttaattttctctatttaaaattctgtggaagtagggcagctgttcagatatgaataataagttacttctgtgcacacacaacatctctccaattctgaaactagattcacacataagtgaacggatttgatctagagccataatggaacaaggaggttatttagtgaartccccttatttaccgaggcagtgtggtacaatggaaagaacacttgatttgtcctttgaggacctggactgggatccctgccccaaagttttctctctctgtgatcctgggttagtctccctgagccttggtttcttcagttactaagtacctatcatggggtagctaagttctaggtacttcaattacatcacctctttaatcaccacagctctgtgaggttagcatggttgacactggtttcacagcaggggtttaacaactttgctaaggtcatataggttgtctgtttgcgggtcactctttggaatccattgtaatatctttacccagtgtgaactaagtttctaattaaaacaaggcagtggaacattatggttagaagcagatatttggaacctgacagatcttgatttattttccagccagaccattcacaacaggtatgaccttaagcagctagttaaattttcggaacctcagttcccacacctataaattagaataagtggtagttacccsatatgaatagcatgtggattcaatcagaaaactcatataaagtacctccttcactgactgaaacatagtaagaactcaataaatggtagttgttgctgttgttgttattgacattaatgtagttgttcttattgtttctgtgctgttgctactgctagaacacattaccaagcacctaaaataattaaatagtatgttagttagagccttggtccctgatgcatacaatctgaatttgaattcctgctccattatttacagttgagtgacattaggtgagttatttatcatctccgagtttcactcaagtcatttgtaaaatagttattagtgggcaggttgttaaatggatcatttaagtggagagctctatggagatgaaggaataagctgtgatgcccagacttttacatttgttagtgcattttgttggatgaatatgcatgcatagtaaacacaaaaggtacaggtttttggggaagagatagctcatgttctaaacatgttgagcatcattatttgggaaaaattataagacaatatatctcagggttacattgaggaaaagtaaaagttcaagcgttatatgtgatgttcaaagggaaatgatcaatattttttttaggaatcaggaaagctttgagggtcttgaagaacattcaggatctagtgggaaagaacatgaaaaaaagagattccttcgacttcatgacatcacctccctgaggctgtatggttccaaggctaatcacatgacccataccctgtgtgtgctcccttgtgctgagctggtcccactcctagaccctagcaccaaggttttagcttcatgttggtccacrttggtccaaccccatccttaaacccttagataggaagagagagttctgagctcgccccatattgttcagctttccatccatcctcccaggaatgagatatcattgtggggtagagagtgccggtaggaaaggatgaaaagtagcatgggggaaatggcttattttaaaagtaaacctttgatttgaagttatgtcattgtctgaaaaatgtttagtattttctagaaaaatcacttgagttctggagtgataaaagggaagacattacccccaccaaattaaaaataagagaaagcagtacacataaaagtaaaatattgagaggcagcatattatactatgctccatagaagccattctcaaatattttggtattaggacctctttatttatttatttattygggacagagtatcgttcttgttgcccaggctggagtgcaatggcatgatctcagttcaccacaacctccgcctcccaggttcaagcgattctcctgcctcagcctcccaagtagctgggattacaggtatgcatcaccacatccagctaatgttttgtatttttagtagagacggggtttcttcatgttggtcaggctgatctcgaactcctgacctcaggtgatctgcccgcctcggcctcccaaagtgctgggattataggcgtgagccaccgcacctggcctaggacctctttaaactctttaaaattaatgagggtgctgaagagttatgtttatgtggctacatatatcagtattgattgtattgaaaactaaactgagaaacattttaaacattttttataaattcatcaaaaaaaataaatatctgttagcataaataatatttttattaaagaaaacctatatttctcaagccaaaaaagaaaaaaaacaaagcgagtgagaagactggtttacacttttgcaaatgtctttaatgtcaagcttaatggaagatagctatattctcatattggcttctacattcaatctgttgcaagaatatatgtgatatagcctctggagaacttatcatatgctcatgagagaaggagagtagaaaaaaataaggaatgtcttagtataattataaaaatgactttgacctcatggatcccctgaaagggactaaagggtacctcagtggctcatactttgagaactgctgttctacagcatatcaaagttctagaattagacttccctaggttcaaatccctgcgctactacttgcaagctgtgtagccttaaacaagttaatctacctctccagacctccattttctcatgtttaaatgaggatgacaaaatattaccttgaaggattcagagaggattaagtgaaataatacctgtaaaaaatcacagcccaaagctaggcatatagtgaaagagatcaactggctctattctattaacaagtggatgaggaactggggcccagtagggaagtcacttgtctgaggtcacactcaacagatgttggttccctttttcccaggcactgtgccagggtttctacttgagtttagctgtatcagtcatgggctgccaggagcactggatttttaagtgtcattttcactgtccctcatggtggtaggacagaacaaagccctcatagagrcaggaggtcaagagagaggagctgcaagtgtggccatcttcatgtgactgtgtgctrccctccacgtcactttctgactcctcttgcagtgttccaagaccctctctaaccctattttctacagttcctcacatgccctctctcattcccccaggtccactgtagcctcattcattctgttctcctggtttcaaattctctatatcctttctattgtcatgaaaattaaataaaaggcatatggggcttagtactgaagctgactcrcggttacactcaattaagtgtgaactgctattaaacccatcactccccacttctcttccattagatatctctgactggtctaattacattgaagtctcctatttggctagtcctaccaaagtactgacatctctcaatcagctatcttactgaataaagtatcagtgttttcgaacttaaaaaagcaaagttggtagacatctctcaagtggctgtagaagtgcaaagactcctccattctttgaaagaacaagtctctacctttaaaaacattcttatttgttcagaagaasaacttctattatagacatgctttgctcttttaaaggtgctattaaaaattatcccattttacaaacttggttttaacctcattttacatgcgagaaactaagtgagagaaattaaaatggcttgtacaagaacacataagaaatcactcataatgccrgactgtggactgaggtttccagactccctctagacttggcaaacttaagaacatccctgcagctgggcacagtggctcacgcctgtaatcccagcactttgggaggccgaggcgggcggatcatgaggtcaggagatcgagaccatcctggctaacacgatgaaaccctgtctctactaaaactacaaaaaattagccgggtgtggtggtgggcacctgtagtcccagctactcaggaggctgaggcaggagaatggcatgaacatgggaggtggagcttgcagtaagcagagatcgcgccactgcactccagccagagcaacagtgcagactctgtctcaaagaagaaaaagaaaaagaaaaaaaaagaacatccctgcttaggaatcagacatktgtcctgattattttttactggaaggaaccaaaatttaatagattgtggtcaaatggttctgctattcccttctaaaacgtggtgcctagcagtccccagggatatcgccagcaagacccttgctttcatctaaatatgggagttctccattayacaaagacctcaagccaggatgaacataattcactttggctttgggagtagcccatagaggaaatgcctaacaccaggagtggtgttctggtcagtaaggccagccatccttgtgaccaaacagatattttgaagagaaacttrttttcaattcttgtattgctttctaagaggagaaatgtgtgagtcagagtgaaatccaaacaaaactctcatctaatttaggacactaatgaacacatttttgttttctttatccttgattagaaacattttaaagtaagaggatgtattttaaagacaaaggggttttctggcaattttgtaatgttacacaatctccttccctgtctactaagaaagaaaacagaattctgcagcaccttctttaggaaaaatagatgataattaactgttaaccattttcatttcatgtgagaagtgtgggtacagctgcagggaacttcctgagggtatgcaggtatttttctcatagactatttactcagtatcttgaatgctccaggagagacagggtctaaaaattgtaatacagcaagattcattgagaacaaacaatcatacccattgataaattttggatttaacattttggtgcatcactaagctggtaaaaggccattccctcatgcgtgagttttcatttgagatatcaaaaatgtacaattggtttgggatgagataatcacggcttccatttcagatcccactatttactgcatatgggactctggtaagacaaactcaataaagcttttgtctcaggctttgatttctagaaaactgaccaagacaccccttttgagcaagaatgataaatctgagccacagatgtgacagctttttatcaataagaatgattgcattaataactatttctgatgggtgtatttcaactgcttagtgtcctctctatctagaagtgtgacaggcatctcacacctgacatgtccacctccatcaccacacacaccacattagcaaacctgctccacccacactctttctcatcttggtcaataggagttcccttcacccacttgctcaggccaaaaatattggcgttattctgagtcctcttttctcatacttcatattgcatttatcaatttcctaccttcaaaatacatcctaaatgcaaccatttttctctacttttgctccaactactgtagtccaatctaacctaggttatgaatcgtgtcttcactagtctccctgcatttgtttctgttccccacaatctattctctgcatcaggatccagagatatcctttaaaaataatagtcagacaatatcatttctctgctcaaagtcctccaaaacatcttatcctggaataaattgaaagcacttactaacgtccacatggtcatgcacggtgtggcctcactctgacctcacatctcacccatactacctctcacttactctgtcaggactacgctggcctccctgttctttctgaaatgccaagaagggtcctgcctgggatttttgcccttgctgttccctctgaccagagaaaccatgtgtcgcatggctaagtcttcacgcaggtcccagctccccctagggcttccatgaccaccctatcagaaatgcattattctgtgtgacacacaaagaaaatgtaagcctattgaaagggggaacttttgttcaatgctgtatcatgagcgcaaagaagagcgcctggcacatagcaggaacttaataactgtttgttgactggatrgataaagatcagagaccaaggaagactgcagcctcctgcaagttggcaacaaatagcacctggggaccatgaaagaacaggttatcataatgtttatgtctttgcttcccaacactctccagtccatacaggagacctgctgcatctagggttgtgaaaagatgaagaggtcagtgaacacaatgaaaatgttctaaaactggaccatgtggatggttgcacaactatatatatatttactaaaagtcattgaatcgtaaactcaacatggatgatttttatgatagataaattatacctcaataaaactgttgagagagagagagaraaacagagatgaaaagatacagagagacagagacacacagaggaaaaaagtgaccaggagtaaaacaagggctcaggatgtaaatattcctaggcctgaaaatggatatccattttttcccagaatcaatctcatggctgwtataaattactgaaaaataacactagtgttctattttccctcatctctgggcgacaggcctaaatgtgactgtgaacgctactttcatgtattcggatggtctgattcataactcaggcgactgccggagtagcacctgtgaaggcctcgacctactcaggaaaatttcagtaagtatttgcttttgtggatgcagctcatggcctctgggcacaggataatcccagtgtgaaatgtaggcacatgaccatgaagcagctctcccatcatctctagccacatagctgaatgagtggccgagtaccaggcaggagactctggctttacccctacagattacctaaatgacaggggccctccatgaatccagaaaagtgaggaaagccttggctatgtactgtgtgtacactttcatttgtaaggagaggaattcttttgctttaaattgttttaaaaattttgttttgttttgtttcttgggtgtttgtttgtttgttttttgagacagggtctccctctgttgcccaggctggagtgcagtggcataatcatggctcactgcaggttgagctcctgggctcaggtgattgtcccatctcagcctcccaagtagctgggactacaggcatgtgctaccatgctcagcaaatttcttatattatttgtagagacagggtttcaccacgttgctcaggctggtctcaaactcctgagcttaagtgatctgcccccattggcctcccaaagtgctggaattacaggcatgagccactgcgcccagccagtttttaagtttctttatttaaatgttagtataaactggtttgcctttgtatccctcaagaaatacctgagaaatcatgtttaaaaacatatttcaaggccccacaccagaaatctctgtttcaagtcatcaccatatatcaggtcatagttaattgcttaagcgttgaatctgccacctaacttaaagtagtaacttcaatgtcaaaggatgaaaatgggaagagggagattcttgcctagttcctcctcctaatccccaaaccccaatcccaaccagagctttaaggaaataaagagggttaaaagctctctagagacaagcagatgtgcaatgcacccccttaatacagaaactaaagaaaaggctgtcttagcagcagagcactgggagtagagccayggctctaaactttaatcaataacatcacaccaaccaggcaggccacactcccatcaggaacaatggctaccacagcagtgattctcaatcttgggaaggtaaggtgtgcacaagcatagttcaataaactccacatcacaatttcagaaatatatgctgcttttctctgcctctacagagagaggtataacctggttctccaaaaccagggatgagatggtcccaaccagattccccttaagaaataggagaaaataagatcaataatcacccaatcaattgcatagcattttactcacttcagccctgttttatagttctctctacaactgaaacttgccctctcccttcaaagcacctccaaatctcatctcaccactatctggcctacagacactactaatgctacagcctcccagtccctcttctgcctcttcccatcctgcattgagaaggaagccaggttcacctccagtcagctcacctttgtaaaatacctttcctccctgtagtgtgttttccctctcgaacctctccatgcctcagttgatccttgtccagaccaaggcaccctatgttgctctgagtttgagcattttgggaggcccaactttctaaacctctgggagccttccccttgctacttctttcctgtccactgagtatttttcttagttctaggaattcattgttgttttctctcctacagaatgcacaacggatgggctgtgtcctcatagggccctcatgtacatactccaccttccagatgtagtaagtaatactactgtgaactgaagtcaggacatgatattgcaacttaaaggactcatcaaacaacagtctagtcaagccaasacratcagaggtgttgaggtctagtattttgccatctccccataactgtcattctcttatccaggtaacttcccttgctcagcatggagtgaatgtctgtagccattcaggttgagtcattaacatctgaccttgagagaaaacatggtatgggtaaaaagtcagagttttgagagaaagcaggaaagacagtgaaattggataatttgaggcgtttaataaataaaatattcacaaaagtatgggtagagggttgggaaacacaaaagaaagtgcaacaccccagggtactagtagggttctgttctatcctgtaggtctggtaaaagtggggaaaataacaatatatttagttcatgttatttgagaattatataaatgacatgttaaagtcctttgtacagtgcccttactatcttagaacaaagctctcagtatattctagaatgaatatatttttctggctctgggaaaatcaccctcatctcttccattcattttacacaatgtaattatcaccaaaaaatactttgttctgctamttacaccttccctaatcaaaatcctgctcaagttccttttttgtacctgttcaatctgaccctgaatcaagaatcacgcttcatcgacacagagaaaactgtgcagaatatcacttgmaatggattttggagagtaaacattagacctctgaaaattctgttgcaaagtttgcttttgtcacctcacacccaccattacaaacagcctcagatgctcaggttcactgagcactttttcagcttctcttccataccaaaatgcggacagatccagaatcttactcttccttgtatttgttcccaactgtcatctaacctgatcacttactaatattgctacagagtatgctcaaaaggaaaggaggattggaaaaattgattcaccatttatgaagaccttctacgtgcaaagcattttagctgtggcagagtagagagaattaagtaaaacacagcccctgtccacccaaatagagaaggtgacaaggactctcctgaccaatacaaggcacagtgagatcaatgccatcagggaaatggaaacaggaaactgcagagggcagggatcagtggcaccagcctgtaatgccagggctttgggaggccgaagcaggaggatcccttgagcccaggagtttgagactagcctaggcaacatagtgagactctgctctccagaaagtttaaaaataaaaaaattagccaggtgtagtcatgcacgcctgtagtcccagcaatgtgggaggccaagatgggaggatcacttgaaccgaggaggtcaaggctccagtgatccaggatcacaccactgcactccagcctgagtgtcagagtgagatcctattaaaaagagagaaagagagaaagaaaaggaaggaaaggaaaggaaaggaaaggaaaggaaaggaaaggaaaggaaaggaaaggaaaggaaaggaaggaaggaaggaaggaaggaagggaaagaaagaaagagagagaggagaaaaagaaagaggaagggagagagaagagaaaagaaaagagaagctatagagtgcacagaagggaagggtcacctctgcttgaggggactaagcttcaatggaggaaaaaaatcttatgaaggagatgcgattgtttgcatgttgaagaatgggtaaaattttaatgagtagagagatgaggagatgagctttctagccaggcagagggaragaagtacatgtaaaagcaaacaagcagggaaatgaagaactctgtattaaccagagttcaggaaatgtataggggaataatagagataagactaggaaaattaagtaggaccatatttggaagttcatgggaggaaagtccaggtgaaggaagttgcatttaatgagactcacatcagaaatcactaaggttttaagcttgggaatgccatgagaagcagccaactttcagaagaatgattgaccacagtgtataggaaagacacaggcagactgatgacaggaaagtcagcagagaaggagggcctggattaggaagaaggaagtggacatagaaagggaggataactgcaaagatatttgaaggtagaatcaatcaatggtatgatgctggggtgagagatggaaagtagtcaaagaagcctttgcaatctcaaaacactaaaataaatgaaaaaatctcaaaacactaaaataaatgaaaaacagtttggaggaacagaaatgaaagagaattctgactgtgaacattgtagtttgagatgcaagcaggaagcccactaaaaccttttgatggagcactgaagatgtaaggggatgctgttttccttccttcgttaaatacatactaagcatctacatacaagcctagatgactggagataccgaggtgaacaagctggggagaaggcaatgcatggcaaagtgtagatggmatctttttggctttacaacaactatggtggctgtggtggtccatcctttttcttagcccgacttcccctgtatcccagcccagatatcatgatgactcactttagaataaatcgaagtaaccaagccacatattcacaaaattgcttagagtgtgcttagaacatagcatgtgctcaataaatgtttttaaayttagctgtatgagaaagacacctatatacatgagaaacctgctttaatgatcygatttcattcttaccatttatacatacatgctgaaacaggttaaagagggatcttatttgtgctacttaagttaatactgataatggcttttttcctcaacctcttgacatagccttgacacagaattgagctaccccatgatctcagctggaagttttggattgtcatgtgactataaagaaaccttaaccaggctgatgtctccagctagaaagttgatgtacttcttggttaacttttggaaaaccaacgatctgcccttcaaaacttattcctggagcacttcrtatgtttacaagaatggtacagaaactgaggactgtttctggtaagcaggatcattaatatttcactagcacttgccatggagagaagccataggatcatgcaggccacctagytattaccagatgcaccttccactggtaacagcattgggtatagacatcagttcattttctcacacataaataaaagcaaaggggaccaagtaaatatagagttgtaaaaataatcagtatagtttgcatctgcaacactctttactgttttgaaagtacgttcacatcagttttattgatttcctgcagtacgttatctgaagaaaataaaacaagtaataggatccctattttatagacaaggaaaatgaaagccaggagttaatgttttcacattcctgtgtaagaaacaataccagagaacatgtatcttgcctatacctacaattagttagaaaaaatgatctcacacttcttcagagaaacaagaggtaggggagaaacaggaataatgggtattgtattaataatagtttgttttcatactgctataaagaactgctcgagactgggtaacttataaaggaaagaggtttaattgactcacagtttcgcatagctggggaggccccaggaaacttacaatcatggcagaaggcgaaggacaagcaaggcactttcttcaaaaggtggcaggaaggaaaagtgctaagcaaaaagggaagagccccttataaaaccatcagatctcatgagaacttactcactaycatgagaacagcatgggggaaaccacccccatggttcaattacctccacctggtctctcccttgacacgtggggattattgggattatggggataacaattcaagatgatatttgggtggggacacaaagcctaaccatatcaggtatcattactaaaataaaatggaaagattcattcaactccaacaaaggtggtagaagaaatcttctggctgggttgctgcctgtacttccaggatgctgcttaattctgcattctttctccatctaagtaagcaaaagactaagatgggataccaccagggatgcacgtctagagacccacaggaatcaacccacagtatctaatgtgaggtttaaacagaagcagaaaattattcctatcaactctgaatttttgtactgtagattcaagggtttcaacttatctataatgggactagtttatagagcagagcagaaccctcttcctgcaagcagccagaaaccatcacaaatgactcaccaaatgtcagatatcatgacaactcactttaaatcaaagtaaccaagctacatattcacaaaattgcttagagtgtgtttagaacatacactgtgattatggggataacaatttacatgtacacatgaagatccctaaaagttcccccatcctttcacgaatttagatcttacaatctaaactagtggtatcatggtgtgtgctgtctattgtgttaatagcagaaatgaattttagatgaacaaatcccaggatagatctgcaaataagaagtgaaaggcatgaaaggccatgagggaagtaagctgttttagtttctwttttcctattccaggtaccttaatgctctggaggctagcgtttcctatttctcccacgaactcggctttaaggtggtgttaagacaagataaggagtttcaggatatcttaakggaccacaacaggaaaagcaatggtaagaagacatgaagataattgttttttgctaacttcttctttatgactaccacctccttataagtcatttcaacaaatcytccactgcagagctatcatccttactcatacatattttgtatattttgggagatctataattgcatgcaacttcattatattgttcctttcattgactaaaaaccttatcctctgagagaaaatacctaagtaytattgagtaattatattaacataataacgataatgctaaaatccggcttttataaacccaaatgatattatgacccaccctcagcagactgtttttttaaattcacctcaatccaacatattattggatttgtgaccaatcttcacacattctgagccccagtcctcctggtgaccaagaggatgaatttattgattacatagcttcatgcaaaattacaacgtaagcaaagattatctcactttcctattccttctgtatctcacctgcccagtgatctaccagctagagaccaagtaggaaagcctaattggatataaaattatcctcagataaatgaccacacattgggtacagcgtacactgcctaggagatgggtgcaccaaaattttagaaatcaccactaaagaacttattcatgtaaccaaacaccacctgttcccgcaaaaatctattcaaataaaaagaagtcatcctcactaagatattaggggatttgttgcactttccacagaattctcttgacaaacaagaatgtatcaggggcaaaggaatccattgtgagaattttctacaaggaaagatacttgcttggtggatttcctgatattcaaatcatcatttattgccattatcaagcatttgttatattaatggcctaccagttgcaaaaacattaaccaagatatggtgggaaagaaatatataagtatctatgtccctaaagagtttacaattcaacagggcagcataatggcacagcatctaaaaagatctaatgaagtctcccccaactcctctcactcataaaactgcattcaggatagctagcagaaattagtggtagacttcagactggactctggcattggagttactaagatgaagttttgagttaagaggctacagataaagcccaagttgcttagggagactttataaattcttctcagttctcacttttataatatctttttcaaccacttttacaaatggtgaggtatacttcacttatctatacaatatattctgtaattactccagcctggcataatggaataagcactgaacttgactgtcagagctgtctttgtcatctactagttctttgaccctttgacatcttggcttcagcctccttaaatctataaaattaaaagaatgatggacgagatgatttttttaaaaaagatcccattcagctctattctgactctataattgtaaatgaaaaaaaaaaggaaggaggaatttaaggaattggagtttatctttaaaaaatttaacattaacatactggattcaaattcaggcaactggttccctgcctgtttgtctgtagactgtcatatatttctctccttgtcttaccttctcctccagtgattattatgtgtggtggtccagagttcctctacaagctgaagggtgaccgagcagtggckgaagacattgtcattattctagtggatcttttcaagtaggtataacatttggaaaaaccctcctcctttcaaaaaggaagtattccaaggatttccagaaggcacattctcttttctcttgctttgtacaaccccttatggggttaagtatgatgataatatttgaactctgtcacactgtcattcttatttagctaattgtggctttagcagagatgcattcctttgacaccttcaccatttgtaaatataaaaggtttattatagccccattgaacccacatgtccatttatgactgaggcctgctcagtcaacatagaatcctggctgtctatggtcactcacacctgtaatcccagcattttgggagacccaggcaagaggattgcttgagtccaggagtttcagactagcctgggcaacacagtgagaccccatctctattaaaagaaaaaaagaaagaaaggaaaaacatacgatcctgatctctagcctgattttaaagtctttgtccagaaaatgataaatcaactaaagactcaataatactgttcctggtaatgtcagccccatttttctccttcagttgctaatggcctttggtcctagattacttttccttcaaccacctctgataagcttgaagtttcacttgtatgagtctgatatacacaattattcctcaccctctgtggcgtagtcactargtggtgatcttttcctccacatttctctgagccaaagagaaaaaatgctggagcgtagagagcacctttgttcacatcccatcttttttttaatcgctaattatctgaaatggttggagaccccactgacaagctgtgccaaagtaatatttgagtcaagttaggcttgaagaaggtgtcactgccatgcccatgccccttgcccccagaagccagatcacgtgacttcacttatctgactgggccattaatcattacctgtctgtattcagacaagaggctgctmctgtctagatctttcccatatttgcctgatcatttcacccacactaacgatacttctcacagcatgaatggaaatgaagtataggaactgcaggcctgtttgatggctacacgttcatgaaggtaatttaattaaccaactagactctaaactacagaagtacaggaaagagggcagagttactgatatttcactccaagaacctcattgatttcaatagctgctttacccctggaaggagtccttactgtagccaggttggtataattttactttcagaaatcctcaataaaccaccaaagtgctggcattcctttgtcactattcccaaaggacacctggctatgttttggaaagctaatgagactaaattagacataatgtgttcacattctaattctgacacttctggttgttttgactcttggatttttttagcattttaagattaaatcttcycatttgtaaaatgagaattaaaatgtcctcttcataagggtacttctaggattaatgtgataataggagtaaaatatccaatacagttctcagcacatagtagatgtgttcaaatattaaatatgctgggcacagcagtgcatgcctgttgtcccagctgctcgggaagctgaggcgggaggatagcttgaatctaggagttcaagaccagcctaggtaatgtagcaagaccttgtctcctaaaaaaagtttttaaataaaaacattaaataatggtcagcctaattgcagcagttcaaacataccagattcttttcaaatctccaaataataggaagcttagaaaccacagcatttgaggctgggtgtggtggctcacacctrtaatcccagcactttgggaggccaagacaggcggatcacctgaggtcaggagttcaagacctgcctggccaacatgctgaaaacccgtctctactaaaaatacaaaaaaaaaaaaaaaaatagctgggcgtggtggtgggcgcctgtaatcccagctactcaggaggctgaggcaggagaattgcttgaacctgggaggcggaggttgcagtgagccgagatcatgccattgtactccagcctgggaaatgagagtgaaactctgtctaaaaataaaataaaacaaaataaaaataaaagtaaaaataaaaataaaccatagcatttgcagagcaatcttagacagtactgagagtctacaatgtgccaggcattgtctaggagttgaggatacaagaatcaataagctaatgttccatatatcaagaagcttaccatgttagagaagacgtttagtctttttatgcttatgtttcaccatctaaaacataagtttagtgataaaatttctctctaccatgtctcaatatctctaaattgttaaaagcacttaaagaaagtttctacctataaaccaagccttaaaagcaagcatgagctcacatgtccatagcmcccccaaatctcaaagaaatcaagaaatatctgtattctgattttcttttccttttgtgtatgttaaccacaattgcttaaattctcttatttaacctaacaagcacagaagaaaacaattctatctggggaaagtagaaagttttgcagattaatgaaaaaaaatgtwttaaactattttcaatgatgatggtatagtttgtgtgaactatagaagatgcatctctatttttcctaattttcatgaggaacctgygctttttattacagtgaccagtacttkgaggacaatgtcacagcccctgactatatgaaaaatgtccttgttctgacgctgtctcctgggaattcccttctaaatagctctttctccaggaatctatcaccagtaagctattattttatgttatagtataaattatatattattattttatttgtcaagggtaagataatttttctccatttaggacmcaaattctaaaatgagcaattatttttacttgctctaattcattcaacaaatgttaactgaaaccaactacatgtacagcattttgaaacagcaggatccctatcaaagctcttaactataggtcactctgctagactatagaacagtacaacagtggacacatccrccacattggcatgaaagtaacaatatggaaagacaggaagaagccctgctattgagggtcaatcttacacttaaaakaggtagaaattaaataatgtaaaataaagcaagggttactggaaagttccctacgtcctaaagcaaaattttcctgtcactgatattaaaatcctacctttagaaatgtatattcctaggttaagacattgtcttccattataattaagttgaccattgtccaaatttgcccaggagagttttggtgtattcctgttattccattatgccatctggtttagcatttgtgcaggaaaaagagcctccatttggacactaaatcatggccaccttattataatgcagggctcctgattctaatagtatattgggctttgtcagtccctgtactttcatatgattaaatctattagatgcattcttcccacagagacaaaccattgagagcaggctgggatgggaggaggaggaagaggcaatgctgatgaccttaaacaactttgggatggcaagtcaagggccaggcccaaaaagctgcaaasaaagatggatacctctggggtgtcacagtttttcccagctagaagttctaagtcctctcatttacgaccgtgccaaaattagggactgcatcctcttttggagctgggtcttaactggattctttttacctcatgaaatgttttcagcaaaagaaactgaaaccaatgaaagttttatttttccagcaaatataattctgagtgtaatatctggatattacttgaccatcttcatggttctagcaaaaatacgattctttgcaaatgggcagtccaacatgccggaggtaatagaacccacttggtctcagttcagcaagggcttttaattcatcactcagccctgtgaaggtcaccattctccagctgctgaggcacagcagttctgaccctctccattatttttcccaggacaggcatttggggcatgaagtaatatccaatcagaactctattcaaagcaatttcagtggcatcatccaatcaaaactgctcatgttccactcagaatacttaaacgcagggattgtttttggtttttgatttttgggtttctcttttgcactttaataaaaacaatcaactagaaactaacattatttctatataaaatcttataagaattatgaaaatgcttcatgttgcctttcctggttgcatttgtatgtttttcatcatgggaatgaagtataactgcttatagttgcttccctcattttattgattccaagagaagacagaattgtgacatgggatcawaaagaacactgacccaaggaagagttttttttttttctttctttctttttttcttttttttttttttttttttttgagatggagtttcactctgtcacccaggctggagtgcagtggaatcttggctcactgcaacctccacctcctgggttcaagtgattctcctgcctcagcctcctgagtagctggaattacaggcatgtgccaccacagcaggctaatttttttgtatttttatagagatggggtttctgcatgttgracaggctggtctcaaactcctgaactcaggtgctccgccctcctcagcctcccaaaatgctgggtttacagacatgatccacctcacccggcctccaaggaagagttttctaaamgtctcctttaataacatcccttcaattcccctgatatccctttaactttccagtaaccctgctgatcccaacaaccttttgttctaggctcaagacaagattcttttttgaaggacccgttttaatattttccttttttatttagacaaaacgagactttgctcttgcctatttgaatggaatcctgctctttggacatatgctgaagatatttcttgaaaatggagaaaatattaccacccccaaatttgctcatgctttcaggaatctcacttttgaaggtactggtctactaagagcaaataaccccaaggtgaagaaatgtaggctttctgagtggatttggggcaacaaagaaggtttagcaatagattccacagctaaatccctttgaactcaactggatgcaaacatcattacataaactttgagggtgctgttattgataactgaactccggtttatgtttcagtcttttagaatctttggatgtcacagaaaagggcaggtagcgcaggttctgtacttatgaacaagctcatcataaggcattttgagcagtaatgtcctgactgtgcttggagactaacaagaggataaayatttgcagtttgatttgggtccttccatatctccttttctatccttcaaggatctgggaccctgtgttaaaacctttagctatcaaaactccacaaaataataccctccaaaacaacacaaacctcctgagctgcatggatcaatgttgccctttcctacaagcccctagtgaaactcccrtctttcrtttcccagatctcatcctgagactatgaagaaattttcctctaaatgtaatgtatactaagtcaaagataaatgacagtggccttttctaacttgcctcagagtcttactctatgaaacctttgttttactgcagtgtaagtgactttctctgtaggcttcggagggcagcaggtgcccagcattaggactgagggctgcaccaggggctatggtgtatgacaatggcaggaagagatcacttctgcttcactgaagatgcagggagggagacacagtaatttgttggtcatcccatgtgtcccaagttctaccaggcactttatatgcactcttaatttcctcacttccatgaccacggttgagcattttaatggattagcacaggcttaacatttggcttaacatttaactaggaaacaaacaaatgtttgttcccgccacctaccagccgtacgacccttaatatctctgactaaataaattatttctcaccaatataacggagataataatagtttctatatcatgatatttcaggaagaataatatgataatgcatataaatcacttagcacagagcctggtatattgtaaacaggaaataaatgttcattgttatgtcgaaacatgtgaagttactaatttgatcacttttttttacctaaatagttttatcttatattgctatttaatagatgacaaaactgaaactcagaaaacttaagtaattttattcaatgtcttcagcaaatgagtgacagtgaaaaaattttgatcttcctacaatctatgttaagattgtgcagtgaccctatacactatgctaggagttcaggaaatattcttagcaaaaatgtrtcactaataatcgagggacttattgactcattacatttagtgccaccctaaatgcaatgaaaaggttttttgctttttctaaataaatacatctcccataaaaatgccctccagagatctctgggctaagaagccaatccaggtgccatctgattagactattaatrtcaacaatgttttcagtaaatttgaaacagagctatttgaacccatttyacactstctgtcatratccaacttatctgtcaggcaaaaatcaagaatggcctctaacatastctgatcttgccctagggtatgacggtccagtgaccttggatgactggggggatgttgacagtaccatggtgcttctgtatacctctgtggacaccaagaaagtatgtctcactgcttatcagaaaattcagggtgctgtgactgggtgaggaggggtaacttggaagaggagcactagcaaaagaattagagaaattatgtttaggatctgaagacagttcatttcaacttcacaattacgccccacttagggtagtattccttaagcattttgacccataaaacttcttactcagaatatccactgtatttactattaatatatctatacctctatatcaatatccatatagataggtatagatattttaaatatccacccagaataaattacataatataacaaaaagactattgatgggataccaatgagaggatcamaagtctttcctaagaattgtttactcattttcacaactaaagatttcaatgaaatattccctgttatctccatttgaactctcaggaaaatcattaaatgtgtaaacctgagccccacataaacagccctgtaatgctatgcttttattcatattatattcacttttttttcctcacccaatagtaggttctttaaagaaaataagtggtctactcacctctccatcttttcagtgcatagcttcttatctggcacaccattgacggctggtcagcatttaatcacaaacaaacaaaaacaaaacaaaaaaaacacctgtcttcatgtcatccaatgttgtatccatccaaactataaaagccactgttccagccaaccaagtggtcagtaaaaaggtttatataggaggtcaggtcctgacataacataaaatttattcattttttttttcattttccaatgtgagtgttatgacagtctaagtcatatactaaatgtgtacatcaacccagctttgtaaaagatatctgcaatggaaaatgtgaaaagctagagaaaagatgtccacgttgagaaagctaaaccagaaatttgctagcagcattccataaatgtaattcrtagtttctagatactatattgaaccttcaatataatgttatgtttcgcatacattccgtaagaataccttaacataagatcccatcaatacttcagttactaatagcgattacaaaggtacatgcattcctctctgagttatttgcatctgggatgatgcccatgatcttcacagagagaggcagaaacgtgtgagatctaatgtcagtctcataactatacttcaaaatggaaaatgttgctttgtgcatttattctctctataagcaaattcgggtgaatttttcaataatgtagtaccatcggttgtgctatataacatgtatatttgggaaaatcagagatcttctcaaaatgtaaggttaaagggatgataatctatatccaggataggtctcaacagagattcaatatgccacatcctaacataaaggaaaaagaaagaaagagtaaagttatgaaaatgtaacattgggcwgggtgcagtggctcacccctgtattcccagcacttttggaggccgaggcaggcggatcacttgaggtcaagagtttgagaccagcctggccaacgcggtaaaaccctgtctctactaaaaatacaaaaattagccgggcatggtggtgcatgcctgtaattccagctacttgggaggctgagacaggagagtcatttgaacctgggaggcagaggttgcagaaagaaaatataactttgctgtccagaacattttgagggtacactggtaaatttaaaaggatggtcactgatatagtttggctgtgtccccaccgaaatctcaacttgaattgtatctcccagaattcccacgtgttgtgggagggaccaggggaggtaattgaatcacgggggctggtctttcccatgctagtctcgtgatagtgaataagtatcacgagatcttacgggtttatcaggggtttccacttttgcttctttctcattctctcttgctgccaccatgtaagaagtgcctttcaccctccaccatgattatgagacctccccagtcatgtggaactgtaagtcaaattaaacctccttttcttccccaaaaaaaagagaaaaaaaaattttttttcagaggtttcatggactccccagcgaggctggggaggcctcgcaatcatggtggaaggtgaaaggcacatcttacatggtagcaggcaagagagaatgagagccaagtgaaaggggaaacctcttataaaaccatcagatctcgtgagacttattcactaccacgagaatagcaggggaaagaccggtcccatgattcaattacctctcctgggtccctcctacaacacgtgggaagtctgggagatacaattcaagttgagattttggtggggacacagccaaaccatatcagtcatctttcagatctcccttacaaaattgactcaatatatgcagcagtaatttaaggatatattaatatttccattggcaaatgacttgaaaatgaaatcttttattttagaaactaattaatgtcatgtacaagaaaagcatattagagccaaggaatagaagagattagaaaattaagtaatggatagaagttaagaaatgtagttatttcagggccccttgatatgtatcaaaatgacataatggattttagctctgctgcattttcttgagagcttttttcaaaagcaacttaatattgtggaaaacactagtctttcatttatcatgtgacttggagctagccatttaatatttcttagcctctagtttaacatttgaaaaatgaaatacttgaactgattcactaaaggcccacagaatctgtgctggacagacaggagttaatggtgtagtgtatgagcataaagaaataggaaactaatcggtccatctgaagttatatctgtgttcatgctgggaatcaataaatgatcctaactagctggttaacagttgccttttttcactgagaattgttatggaaatcaagygtcattgtgtagaatcattaatctcaccataatttgttctataatgttttactgttcatcctttttcttttttgtgccctgacacagtacaaggttcttttgacctatgatacccacgtaaataagacctatcctgtggatatgagccccacattcacttggaagaactctaaactkcctaatgatattacaggccggggtaagatatccctaatgaattttctctccctgacactgttttcctggtaagaaaagtaaagtctattgtttatgtaattagcctgtgctttttgctgtgttttgtctgctgtcccagtttgatttcctgctgtccagtttgtaaatgtggtccttacttccctgcacaatgaatgatattatagttctgattcaacagtgatttctggccaggcatggtggcttatgcctgtaatcccagcactttgggaggccaaggcaggaagactgcttaagcctagaagtttcagaccagcctgggcaacatggtgaaactctgtctctaccaaaaatactaaaaaaaaaaaaaaattacccaggcatagtggcacacagccgtgttcccagctacttgggaggctgaggtaggaggaccagttgagcccaggaagttgaggctgcaatgagctatctttgttctactgcactccagctgggcaacagagtgagatcctgtctcaaaaaaaaaaaaagaaaaagaaaaaaaaggaaagaaagaaaacattcttattctaatttagctatacctatctttaaaatatgtcctaccatttgacataaattattccacagaaaaccgggtttgacaactggcaaaaatgagcacagagacatatattcttactccatttacattttactgcaataagctaaaaggttgtgtatttcagcaagaaatacttgacatatcaggctgaggggtgaccagtgatcctggcctttacagtctcccctgttcccatactggacacatatttgggttgcaatgatagttacccacctacttaagattaggtcctatcatgtcatgaatagccctaacatgayttggccagctttcacccgtgcaagctgcatactcaccatcagcagcaggcagggccactcaggatctcctgggcaacgaggcctcaggacaatctgtccatgactggcttggccagggcttgccataatgagtggtaattccatgtgactaggaaaaatctttaagaaaaagtcttaaatctggacagatatttagcccaaagatttaaaaaaaaaaaaaaaagtagaaataccatcaataaaattatttagagccaagcgtggtggctcatgcctgtaatcccagcactttgggagactgaggtgggaggattgcttgaggccagaagttcaagatagcctgggcaacacagtgagatcccatctctacaaacatttataaattaaggctgggagtggtggctcacgcctgtaatcccagcactttgggaggctgaagtgggtggataacgaggtcaggagttcgagaccagcctgaccaacatggtgaaactccgtttctactaaaaatacaaaaattagctgggcatgatggtgcgtgcctataatcctagctactcaggaggctgaggcaggagaatcgcttgaacccaggaggcagaggttgttgtaagccaagatcacgccactgcactccagcctggggaacagagcaagactccgtctcaaaaatatatatatataaattagtggacatagaggtgcatacctgtggtcccagctactcaggaggctgaggtgggaggatcacttgagcccagtaagttggggctgcagtgagccatgattgtgccactgcactccagcctggatgacagagcaagaccctgcctcaaaaaaaaaaaaaaaaaaaaagaaaattattatatattcacaaatggagcatcaggcaaccaattaaaaataattatttatgaagaatgttaaatgacatgggaaaacttatgatgtaaagtaatagaaaagtacagcttcttatttaatgagattctaactttgtaaaacaatgcatagaaataagactggaaagaaatatgttaaactgttaagagtggtgtcctctgactgatgggatcctgcaagattttttttgctttattctatttttctgaattttccaaaatttccacaatgactctgtattagtttcttattttcaaaaagtattaaaaattataagctacaaatatttttataccagccccgctctacagccagaaactctgaaaatttgatctgatataaagggaacatttctggtttgaagggcttgcttgtgtcagagctatacctgcgtttctagttttctttcactccatgagtcaaattaagtccaaaatgattcctgtacttttatccaacaggtattagcagctgattaacgaaatgagggaggggggaatgaagatggcattcttctagacaataagcaatcctgagctgacttcagatttattgctatgattgctttttaaagtcgagttttatttaataagcttttaaaactttctggaaccatcttcaagctttctagttttaaaccaarcttgacttctgaaatatatctcttttctcatrggcttctgcaactctcaacttcttttgtaactttttgagttcaaattattttttctttcttcttaattataactgtcagtgacaaagttaggtttgtgtttttaatgtatttccttcaagttttttggtattttggttattcaataggtctgtgatttctaaagtgctgaacttctcaaaaagtactttttgagagagttctctttacttaaagagaactgacttcctcaatggttgaactagtttacagtcccaccaacagtgtaaaagtgttcctaaagtgaacattaaatattcatactatatcctacagggacgttatattatcctgagcaactttacttcagcctcagttaactaacaacctcagttagccagagcttttcaatacttaactgttacttactacatttagctctaaactttaccaatgaagcaataatataggagttaaaaagaaattatttaggcaggtagcgagggtacaggagtcctcagtaaggctttttcttttcttttcttactcttttttttttttttggagacattgtctggctgtatcacccaggctggagtacagtggtgcaatcttggctcactgcaacctctgcctcccggattcaagcgattctcctgcctcagcctcccgagtagctggaattacaggtgtttgccgccacgcccggctaatttttgtatttttagtagagacggggtttcgccatgttgggctggctggtctggaactcctgacctcacgtgatccgcctgcctcggcctcccaaagttctgagattacaggcatgagccacggcgcccagccaggcattttcttttaattgaaaacagtctccaaaccatttcttttctagcaaaaagcagcctgaaaagctgaactgcaagcataaataagcaagctggaagcttgcgtagatgaatgcccgcagctgtactaaaagccaggtccacccaatatagcgatttcccctcccttttctttgtagccatgtgtgggggtgtcattgtgccggccgggtaaagccacatgtgtgggtgtcatggcgccagccaggtagaggccgcatttgcataataaaagattagggtgagagggccagtttcttcagggctatgtaaatggcacactggtcaaaccaatcccctgggccctatataaatcagacaccgcctcctgaagcctccctatataacctactgcttcccaccacaagcatggttttttcccttcagagccctcctacctctctaccggtgagctgttctcttctttcctgcctattaaactttccgctacttgacccgctccgtgtttgcgtctgtgtccttaatcttctcgtcacgcgatgacgaaccttgggtatgtccccagacaatgaagccgcttcagcaactcaacctttgaaatagtatagaaatacgatatgcatgactggaacttgcatctgtgtgtacacagctactaagtaacaaaacatttcaccaagagattacaccatccctgttctttcatttatttaacaaagatatttatttaatgccagacaatgttctgagcacctgggaaatagcaatggacaatgcagatttggtgcccgtcctcatccaagtcctcagcatctgcttcctgtatcacaaaaatgacgtcaaactgacttcctgcattagtcctgcccacttccatccaacccatcctgctatcagaaagaaagcacaagtccaatcatgtcactgcactgttgctaacatgtcaattggcaactctgctttacctacagaatacagtccaagttacttaatacagcacaaagtgcccgtaatctccctacttatcttttactcacctatcccttccccatgctctcagcttcctccctacttccttaaagcgtcatgcaaatttatgccgctgtgtccttatttatgctactccctcggaatagaatttatcacttctccatagaggtgggaaacatctactcatcctcaagatttaaccggaatctcaactttccttagctttttttttttttttttttcctgagacggagcctcgcagtgttgcccggcctggagtgcagtggcccaatctcggctcactgcaacttccgcctcccaggttcaagagattctcctgcctcagccttccaagtagctggaactgattacaggcacctgccaccgcggccggctaatttttatgtttttagtggagacggggtttcaccatgttggccaggctggtctcgaactcctgacctcgtgatccacccgccttggcttcccaaagtgctgggattacaggtgtgagmcaccgcgccccctcagggcttattcttattcatatttccttgccccaacacagtgccttggaatgaataaatgaatgaatgaatgaatgaatgaatgacaacatgagataactgaatatatttctactctggactccagcactcatctatactctgttaatttcagtcaatttatttctcttttctaagtgtgagtttcttcccctgttaaatcaagaagtttatcaggttccttccaaccgtaatatcatatgaccttgaggttataaactctcattcattgtgagatgagttaaatagaatgtgataactacagcagccaccagaaggcagcagaagcttaaccttggaatttagaacttgatactgcgtttatctaaaaggcaaaactgaaaagcatgtttaattaaaaatgactacatttaaatagtatatttaaatactatatataaatattataattatatctaatacagtgagatgttcatactgtaggaggcagagaattgaggtgggctgaggagtccccatattccctccagtttatactctagtctaggggatgtgcaattttgatagaccagtgagtgggattatctacactgttgaaaatgtatttcttgtactcactttcgttttctggggtttagggcgtgagaatggtgggagtggcaatagtggtgatagtgatggaagtggtgattgtagtaacaaacagaattcaccagttaaatgtgcccataatgcaagttcaactccaaagtatgaatttatttctgccccgatgagagtagaaatccaaagttcacattttcaccattgaaaatttcccatgaacacaaaacaaggtaatagaggcaaagtcacatgtctgcaaagcataaacccttcaaattcagcccttatacaaaggagctgtagtgtttaccccaagctaaaccatctacttcagaaggacataatatgattaaacaaaaacagttttaaaatacatatgacatgagacccctaatggcacaggagtctttctatatgaatttatttatgtattttaatgtccaagcaccttctccttgcctcttctcaggcaataagatgaycagggccaggtttttcttctattattttttattagccatttttattgatactttaccaggtcttgtgctgggtgccaaaggtgtaaggatgaacaggaatgaataagtaggacatggactgtgcccccaggagtttagattatggtgtcatgatagagaatacagtgtgaaggtttaggattctgctttcataaagaagtcctaaaacctcattttyggggcacctacatcaattatattttagcacagaaaaattcacacatggctgggcacagtggctcacgcctgtaatcccagcactttgggagaccaaggtgggctgatcacctgaggtcaggagttcgagaccagcctggccaacgtgatgaaaccccamctctactaaaaatacaaaaaattagctggacatggtggcgtgcgcctgtaatcccagatacttgggaggctgaggcaggagaatctttgaacctggagggtggaggttgcggtgagccgagatcgtgccattgcatgccagcctgggcaaaaagagcaaaactctgtctcagaaaaataaaaagaaaaattcacacacatgattttaaaatccagtagcagatgtgttcataatggaaagtgaatgcacctgatcccacctctgtgcatctctgctctctcagtcacttctgcttttactgttttgcatatctaaataatatgcttctatttcttgatttataagctttagcagttatctattaattttttgtattgatacatgaagatttagctcatcttcgctagccctctttctcacttcttcccatatagttatatcttttttgtcggtacaattattgaacacctttttcattttaattaatatgcatgagcttctagtgttgtcctatcaattgtatataaaatatcttgcctcccactttgtaagatgaagatgttagtgccacaattctttcttctacctccttcccatctccaaaattctcctatatttttctttgccagggttgataatatttatttggtaaccaaaataaagacctctgttctttacctataacttgattctataagttgaaaacaaggaaacattttcattatgtgaatattatttatataaagctaaattgtataccgtgataacatctttctttttttttttttttttttgagacggagtctcattgtgtcgcccaggctggagagcagtggtgcaatcttggctcactacaacctccacctcccgggttcaagcgattctcctgcttcagcctcccgaatagctgggattacaggcacccaccaccacggccagataattttttgtatttttagtagagatggggttttgccatgttggctaggctggtcttgatctcctgacctcaggtgatcggcccctcagcccccccaaagtgctgggattacaggtatgagccaccgcacccggccaacatctttctatatagccccaatgtctcccttttgtaccacaaaggaaaattgattttctctccttttttaatacctaattctcaaagtcagggcacattttactttgtttcatttttggattatgccttccttgaacattttttccttagaattcctgattggatttctcttttctttccttgctgtataaagaaacatgtcttcttcaccatactcctatcacttcccagcttcttacacattctgtctattgcttggaatctattccattttttcttcttgaacctactgacttcctaatagggaattcattgcggcatatatgaaccacgactttcccgtgcagtcttcttgttgctgtccttctctgtgtaggagtattcctttgtatactcagacactgcttcagtgcttccttgggttggatccacattttcctggattccacttactcttctgagagtctttccacttactccatctatacaactccacccacccactagtgttctagtaaataaaatcccattcttcattgacttccctcactaacccaggagagcttggaaagaaccagcatgcaacactgtcacttaatattctatactgacttacttttcttccggcatgtgctctgtatttaaaaacaagttgtcttagttgggtatggtggctcatgcctgtaatcccagcactttgggagactgaggykggcggatcgcttgaggccgggagttcatggccagcaacatggcgaaaccccatttctacaaaaaatacaaaaattatccgggcatggtggcgcacacctgtaatcccagcttctcgggaggctaaagcaggagaatcacttgaaccagggaggcagaggttgcagtgagccaagactgcgccactgcactccagcctggatgacagagtgaaactctgtctcaaaaagaaaaaaaaatacatgtctcatcctctatgaacccttcttaggtatattggtttcaaggacaccaggtagacttctaccaccaacttttttgtacgtgctctaaactattttatgtttgtgtaacatttggtgattcttattagaaagaatagagatgtatatgctgtcagaatagccaaaattaagccactttccctgggtacaatgccagacaaggctgtcagagagtagggacacaggacttatattaccagagagaaattaataaaaaataaatttttttaaagggttctcttttcccttccccaaattacattgtacagctagaatcttggaaatgcttttgctctcttgtctaaggtccttcctaackcattttccrccacaggccctcagatcctgatgattgcagtcttcaccctcactggagctgtggtgctgctcctgctcgtcgctctcctgatgctcaggtacagccgcctctatcatgcctgtgttcggtatccagagaggcaggaagggaaagtgggagaggtctgttgtctgttgatgatgatgaatattcacaaagaagcctgcagactgacctaagataatgaagacattctgcatcaaagactaactgaagggcagaatattattgagtgaatagattagggctttgaagccaaagatgcctgaactcaaatcccagttctttgagttactagttctgtggtcttaagcgtgttacttagcaacttaaacaggtaacttagcttcagtttcttcatctgagctgttgtaaggattagaaatggaacatgtatacaaactaccatataataagcatatatagataaaatagttatttttattatgctgttatattgtgggagacatcaaactcattaaattacatatttagactgggagaggttttagaaacaatttattccaaatctcctattttagcctgaggaaagagaacccagaaagtcaaatggcttctctagagtcttatcaccaggtagtgggtggggccagaactagaactcaagccttctcaccatcagttccatgatttttctgctcaacttgggtctgccaaatgcctagccagagacattgtgtgtactaagaaatatttattgaatacataaatgagtgagtaaataccacactacatcctaatctgcatatgttaaatgccaaacttataatactgtattatattaccaggttcacttgcacttcctagctaaacaagacaacagttttatctgtgtattacacactttggtctgtgtgtcattatactttctcatgtgaatgtccagcctgccatatactggttgatgttttctccagaaaaggaagtagactattttcttcaatctgacaacaccgcttggctcctgtaactgtgttgctcagaaatacaggtgatggtctacaatgtgtggtgaccatttagtgaagagtgagaagaaaccaaaattttcccccaaaagcaaatctaaatgggaatcactttaagatagggtaaatcacaagatcaaagataataacaggtgtttctcattgtctctaaacatggcaggcagagatggggcttcctaatgaccagtgcaatgctatgcccatgagggggcctggcagacaggtggtacacatgcagtttgccattacaacagcctatgcaagaaaactagcaaaycatttaagaaatcccctaattcagtatgaatgacagttggctctgctgggtcccaagagtctcctggggtacagagctgagaacccaagagcctttaaggtcttgatattcatcctacttgcctccaggtcttagggtcagtaatatgctattttacatgcatttacttgaagaatactcagacttagatggaagcatacaaagagaataatcatttctgcttaggggacattaaggaaggcatggccttgagaaggtgagaatgagtttgtcaaataaccaaaaagcaaaggcaaacagggacaaaacaggtcaatagaaaagaatatcagttccagaatcagatacaagcaagaacttataatatgacaaagatgacagtatgtgacagctaagaaataatgttggtggccgaacacggtggctcacacctgtaatcccagcactttggaaggccgaggtggctgaatcatgaggtcaggagttcaagaccagcctggccaacatggtgaaactccatctctactaaaaatacaaaaaattagctgggcatggtggcaggtgcctgtaatcccagctactcaggaggctgaggcaggaagatcttgaacccgggaggcggaggttgcagtgagcagagatcgcaccactgcactccagcctgggcaacagagcaagactccgtctcaaaaaaaaaaaaagaaagaaatgatgttggtaaggtaggctttccacatgtaaaaaacaaaattaaaacaggtaacttagcttcaatttcttcatctgagctgttgtagggattagaaatggaacatgcacacaaactaccatatactaagcattatataaatgaaaatagttatttttattattatattgtattatgttgtattttattattattatatatctaaaataatacacaaagacatagtttactctgtggagttttaaatgttaatgcatagtttatgtggagttttaaatgttttaaatgtttgattatgtgaaaatcaagcttcaaaacttagaataaattaataaaaatgactttttaaaattatttttatttttttgagaccgagtctcactctgtcactcaggctggagtgcagtggcgccatcttggctcactgcaacctccacctcctgggttcaagcaattctcgtgccttggcctcactagtaggtacaattacaggcgtgtaccaccacacctggctaacttttgtatttttagtagagatagggtttcgccacgttggccagcctggtctcaactcctgacctctagtgatccacccaccttggcctcccaatgtactgggattataggtgtgagccactgtgcctgtccaataaaaatgactttatgatctcagtttaggaaagtagttctcagtcaagataaaaaaggaaaagtcaaagaaaaaatacataaatatgacgataataaaatcaaaactttctgtaaaacaaagttaaaggaagtcataaactaggaaaaggtatttgaaaactaaagggacaaaggatttatttctcaaaatatattaagaacttatgtaagttaacaaggataagaaaaatatacacactaggaaaaaatgagcaaaattataaatacataattctatataattctgagtctatatactctattaaatagctagaaaatatttgaaaggataatatcacttgtaatcaagaaaatgcaaagtaatgcaataatgaaacactgtttcaccttcatcataaaggttaaaaaaaagtttatcaataccaaatgttgacaagaatatagaaaatgggaattctcaagataagaaggtaaattaattgataactactgctttgggaagcaatttggtgatatctgcaaagtcgaaagtgtacatcgtctatagcccaagaattctgcttcatctataccagcagtccccgaccttttgacaccagggactggtttcatggaaaacaatttttgggggtggggagagttttgagatgaaactgttccacctcagatcatcaggcattagttagattctcataaggataaggagtgcacaacctggatccctcacatgtgcagttctcaatagggttcgcggtcctgtgagaatctaacgccaccactgatgtgacaggaggtggagctcaggtggtaatactgacctctcacctcctgctgtgcagcttggttcctaacaggctacggaccagtaccagtccatggcccaggggttgggggcctaatccccaacctacactatctggggaccgatactatctgaaggaaactatacatttttaacattttgtagttgagataggtgttgttacattttctctgtacttttccattttctttaaacatattttttgaaaaggcacagatgggtaagaggaactggcttatttagggatctggtgtattctctctggattaaaaattaacatttttgcctctcaatgtcaccaactttacatttttttcctgtattttttcctcactccttctatgtcatcagtttaaatcctttagtattgtgaaggactgccttagtgaaaaacctaggaaagtgaagtgaaaagaaaagaaagactaggaaacaggggtccccaaaccccagtccatggcctgttaggaaccaaccgcacagcaggaggtgagcagcgggtgagcgagcggtaccgcctgagctccccctgctgtcggatcagtcagggcattagattgtcataggagcgtgaaccctactgtgaactgcgcatgcaggggatctatgttgcacactccttatgagaatctaatgcctgatctgaggtggaacagtttcatcctgaaaccactccctgccacctccatggaaacattgtcttccaggaaaccagtccgtggtgtcaaaaacgttgagggccaccgctataaaagcccatcagaaatccttgcaggtccactggcagtaagcgcttttcagtttggaggacatggtgttctgtcattgggctrccttccctcacacatatctacctgagcataccagggttctaaacttcacccagtcttcagaagctgaatgacatggatattaataaaaacctattgaccagttttattcctttcacagaaaatatagaaaagattatgaacttcgtcagaaaaaatggtcccacattcctcctgaaaatatctttcctctggagaccaatgagaccaatcatgttagcctcaaggtaaagcctaccttacctgttgaagaatgggttcaatttggcaggtatttgacaagacttaagtagcattgcaggatatgtgccaagtagggatagttgttctagaaagcaagacttagatgctttctaattttcagctctctcccttccccttgattctccattctmctacatgtcaactagttaatccaatgagcacttccctggaggctgagatatggtgtgttctcgttctttgcatcttatccagaatagaaatacacatattgggaatttgccatggaagggatgtaggaatgggcagagcatttgagttcccctaaaccttggatgctaatctatccatactaagggcctatgacttgtcttactcattcctgaagaaagaggcctctgcttatatttgctcacatttaccttcaaccaggaaatagcagcagccaataataacttactccatttaccacagtcaatgcaggacctatgctgtctcatctattcctcacaggaacccaaaattaagctttattatcataattttgctgatgaggaaactgaaggacaaaagattaagaaacagtgcagggacacatacaactaatgagtaagataactataagtaataatagctaacacttactgagcacttataatgcaccacatgcattaacccatttcatcttctcctgagcactgtgaagtagcagggtggaaattccaggaacacagctacaatttaaacccagtctgtctaactgtaaagccagagattgtaacaccttccatacaccatataattatcctagtttttataccaaagcgtattaagagaatatggagacccaagacctccacagatgggaattcgtggactccttcagagtagggccaaactgatagtgtagtgtgatttgagatgcttccttgcttaaaatcagcaggaataaaattgcatttggcttaagtttgtctctggaacctctctaccagctcttgaccctcctccccaagtcctgtgtgctgccctctaatggctccaatcccctcatgtctatccaaagaccaggtcttcccttctttcagaaatatgacatgctccaatgtgaccctcctggtgcattctgaacctcaacagaaaaattctattcacaaagaccaatctgtctcagctaagtgtcaggatgaaatcaatttaacagtaattcacagtcaggtgtaaatgaccttaaggctactgaatttccaaagagagaatttgttgacctaaatgacaaactggaagtacctagtgttaaaagaaaaacactggacagacaaaatagaatttatttgagcaaaaagtgattcatgaattgtgaagcactcaaaaccaaaagaggttcagaaagctccactctgcagcatgggcagtgagctttcataggttgtacaaggaagtaaagtacacaaataacttgattggttacagctaggcatttgctttatttgggcatggtctgttcagttagcttcctgtgattggctgaaacccagccatttgttacaaaaatagactcctaaattagttttcagtttgtctgtatactaagttaggttgcagtttataggaactcataatacaaagacagcctcatgccaatggtctcctgcttatttaatataacactaggaagaggagaggggactttcagaaggagcgtgtgcacctctgtctctcatcttctcccagatgggctcccacacgctccacctctgcacaagtccagccttggtgtcattcctcaagcacctccccactgcctcaaaaccccatatttcatattttctcttttggagtaagcccaaaacatgtgtcaccgtatgttttcttaaaatataaatattcctagaagtataattcatccatttcttgtcagtttctttacaaaatttttatgagtacagattagttcatcggaatgaatgagtcacctgaccaaggaaataggtctttgggacagtaaactcaaaggagggaagttcaaaattattttgatcatgtgatcattgttactctgagttttagacaggctgggaagcaggtggatcagaaattggctgtacagagagctcatcaggtgctaagagtcaggtagacatggagaaaacccaaggtcacccgaagtcagcaagggtggaaaatacctacaaccagacaggtagtggttcaagtttggatactcactgaatgcagaaataaggaagcaagactaagagatgagataatagagagtcaaacatcccactgctagaacaggaagggtcagaatatcagaccaaagattccagacaaaagaaatcaggaaagtcaaagggatagagtaacacagaaaaaaataatcaagatgatcattcatttgagggtaaaaagagaagtattttagctagcaagagaatttcacaaaccttgtctcatttaacccccagctatttctatgagttggaattgtgcagtaaggaactgaggtccaaatagtttaaatgatgtcatcaaggtctgaaataataaaaagagcattaggcaagaagacaagcgtaggttctgccattctctttttatgtgacatttaatgttatttaacccttctatacttaatttgttaaatgagaagaaaatgaaatgatgataactgacatttgttagtctgcaatgtgccaggcatcatgcttggaccttcagagagtcatttcactcgcatttcaaaatggccttgtaaggtacattttaacaaagataataacacatctcaggtttttatgagaatcacatcaaaagatgcaattgttcccaaccttttctctgtctttggaccagaagtcattaactggaaggccaagagccatatgtggcctgcagttgtgagtgcctatgtgtgtgcgtgtgttttgttcaatatttgacattttaaaaattaattgccaacatacaaatgtcatgagatagcatataagaattcttattaccagctccttttgataaataagatgatttagcaacttcgggctgaacccagagctgacagtactgcttcccttagacacctggcccagttttatcatttgcattgctacttgggcctttaggcatgagtgtgcaactcaaatgtacagcatccttccccaagagcatctatctgtagctacaggcaataattcccacaaaaacagggttggggtgaagggagcaaaggaaatccctggttgaagtagggccacaagaggaagggaggaaacccatagctaagcatgagcgcagtagatacctggaaacacgttgctggagtccaattagtgagagggagcaagtcaattacaacagtttttctggaagcctgcttgcccagcatgttattgaggaaacagatgcagcccacctggaagagcctctcagcctttgacaggcagtgagtaggatgagatatggagcttctggaataattagccttttcttgtgccagatcgatgatgacaaaagacgagatacaatccagagactacgrcagtgcaaatacgacaaaaaggtgacctctcccacttctctgaactctccactggggtatgctctgggccttttgacccctcattgccctggmccctgatgtcagtatcacaatggtgggagtccccagtctgttcctaggggctattcttagagcttcacagggatgggcagggccctgcttcaagggttacaaaactcacaatcctggggaaaatggaagacaaatagaatgttggggaagggtggagtgtaggaagaaaaattaaatatcaaagatattcagagtagtccagggcaaccctagtattatattttggctcattgctgagaaatacaacgatctcatatgagagctttgcatcttatttccatccttctttcttccctccctcccttctgcctgccttccttccatttagtcattcttaaagaaacattcgagactgaacttaccatatgccaggtactaggcaccagggatataaacatcagtcaaggctgggcacaatggctcatgtctgtaatcccaggactttgggaggctgaggcgggtggatcatttgaggccagaagtttgagaccaggccggccaacatggcaaaaccccgtttctcctaaaaatacaaaaattagccgggcatggtggtgcatgcctgtagtcccagctactggggaggctgaggcaggagaattgcttgaacccaggaggcagagattgaagtgagctgagattgcaccactgcactccagcctgggcaacagagcaaggctctgtctttaaaaaataaataaataaataaataaataaataaatataaaaaatcaatcaaatactgtcactgctctcaaaagtttatagtctagtgagacacacaaacaaactgttataatatgcatgtaaagagttacaccacaacastgtctcctaaatttcattgatttttgcagcgagtgattctcaaagatctcaagcacaatgatggtaatttcactgaaaaacagaagatagaattgaacaaggtatgtagcccttacttcaaacccttgagaaataacttcacttcatttsctctaatcactgaggttgctggtggagtaagaggctracagaaaagccctcaggccaagaaatggtgactatatttcttgttgaaaattctaccaagagatattggaaagtgaggttgacggtgtaaaaaattctggaaatctactagtctttcctggaaagtggacctgatattatttgaaagtaaagtttatattcaagkcctcttactgacaaaggaaagtttgttgaatgagattgatataatgtgtgataagcaatgggtactgacattcaatttgttaagacaacacatcttctcaaagatctgaaacaaaacacattttattggcatattaatttttactttggcaccccattctgcctaatttgctttgtaaacaaacacgttcttctagttgcttcagattgactattacaacctgaccaagttctacggcacagtgaaacttgataccatgatcttcggggtgatagaatactgtgagagaggatccctccgggtaagaaaccatggtcatttccaattttctaatcatataaaaatattcagcaggccttttaaaatatttaccgagtaaaataatattagagaaaatcagggaaagttggtggggtcacatgctttccaaactagatccccgagattttttcagtcttattatgtttttataaacaagcaaaaaaaatttcaggaaaaagataatagatttggggaggggagtaaacagagaatggaagtggaaaaatgagtgattacctccaaatacattttattttccatgaatacttgcttttgtattaaaagagaaatggataatcattatgatagcgccaaataagcattagaagacttggtcatcattcttggttctgctgctgtccaaattattactccactcttggactgaggatcatctgggagttgccagatgaggtcaggtatttggactgagcaagtccaaagcaaacagaggaactaagaaaaaaagcaagaatattagctttcatactatgcggtataaactcaaatctaccctccaagaaaaaaacatagccctatatgttactatctcttttaaaagttatttcatgcttgttattctaacatctgagggctctttctttggattaatccctatgaaattcaacagtggtacaaggaaaaagtgacacattaagccattaactatatttaacactttgagaattcatttgctgtattgcagaagggaaagcaagcccgtgagggactaatgtaatggaatgtggtagagaaatcttgagcagggggctggccaggagaattaagatcacagaggaaaatggtgctaaggtaaaagttcttaaaaaataataaacaaggctgggcacggtggctcacgcctgtaatgccagcactttgggaggccgaggcaggcggatcatgaggtcaggagatcgagaccatcttggccaacatggtgaaaccccatctctactaaaattacaaaaattagctgggcatggtggtgcatgcctgtaattccagctacttgggaggctgaggcaggagaatcctttgaaccagggagtcagaggttgcagtgagccgagatcacgccactgcactccaacctggcaacagagcgagactccgtctcaaaaataaataaatgaataataataataataaacaattgaagtatctaatgcaaactttagaagaataactataacataaggaaaggaaactattaaatatcaatcattttaaatcaaataaaataggatagaattttaaaatgcacttgctacttaaaaaacaaaattattaaagcatacaagcctttcacttctagttattatttttaaaacaaacatgcaaatacacgaaattgggaataaaaaagcagtgaaaagatgttttaattgtgaaagaatacttcatgactattaaattgtaatctttaaaaagggaaagtttcagaagcaatataatcatgaaatctgtttcaaaaaaataaatatttaattaggccaattctgaatcagtttcagggaataataagccatgtgaaaccctttgactaggctctattaattggtattctaaaatttctgtctcattgaaattaaatgaggtctagacctcatgtgaaaaacgtttctaattttgaaagacctgaaatagttattattattcctagaaatttgtatttattttatcagtatcaattaaaaygatcactttaatcatccattaaaatgctcatgtggtttttctcctatgaccttttgatttggtacattataataatattgttccattcatagaattaaccatatccaattatttgtgttatgctttttgtgtatacaactggcttagcatttctagtattttagtacgtttcttcatctatattcacaactatagattttagtttcaatcctatgctgactttgttcaatgttaaatgaatttggagtatgttcatgtttttgtttaagtttaaaatagtttttatatagataatgagaactactgttactaaacttcaacgttagaagaattaagctgaatctggtattctttctatgggaattataatttcttctattgttactaatgtaatattatgatatagtaagaaatatattttgtcttcattcttggctcctaaaacacctgtttttactgggtggtgggggtgagaaaagctcttttgttatttatagtaaccccctttcaaacatacctgagtcatgctacttaagatatgatagccatggaagacttctctggcaagatgacattagagtaagacccacatgaaatgaagctgtgaaaccatagctcagggaagaggaaaccaggtttagtatttgcaacctgttctcaacaaggaaaacagcaattaaagggtgatatgtcagagaagtctcagacctcatttcagaaatattcctaggctcccccataataacaactcttgtagagttaaaaataaaacaatacttccttaacattgcaaagactgtctatcataaaataacaactgacttcatctgtattaatgcaaagactccctagtcccacccctgtactactattagttaacttctgaaagttctaaccaaagcactaatgcgtgaaacagaaataagatatacagttattggaaggtatcaacataaataacaaatagagagtggctctctgaaagaaagatatttattcggaaaagaacattgtaatgggaatacatatgccatcgtaaattatgtgcacattcagagagataaaggaagacaaaggattttaaggggaaaaaaaacaaagaggattacataattgttgtgttacaaagatcagtagcaaggatgatgccagtcagaggttggacaggcagttgttgggcagatgtccttgtataagtactttttgtgtgtgaggttgtgatggcctttgtggaaggttgaggtttctgtagagtcttttctgatagtttttgtaatgaaggaaggatacaagcatgacaaccctctttttcatggccttttctggctgtatgtgtcaggattttttcaacatttgtgactccattctgattttgacaactttcacaaaaggaatagattttttttttttttaatttaaagatgaggctaggtgcggtggctcatgcctgtaatcccatcactttgggaggcagaggcgggtgggacacgaggtcaggagttcgagaccagcctggccaacatagtgaaaccccgtctctaataaaaatacaaaaaattagccgggcatgatggcgggcacctgtaatcccagctacttgggaggctgaggtgggagaattgcttgaacccgggaggtggaggttgcaatgagctgagatcccgccattgcacttcagcccgggcaacaatgcgagtcttcatctcaaaataaataaataaataaataaataagtaaaaagatgatatgattgttttcctagaaaatgcaaaagcctcaaatactaaaaattataagaaatttgtatgatgactagaaacaaaataagtgtatagaaaataatttacatatataatgtatatatcatatatattagccaaattggtcagaaaatacaactcaaaaaatcctccttaatatttttaacaaaaatatttatttgaaaatactcaacgtgaaatgcaaagaatcagttaagaacactgaaagttttctaagacattaaataaatcttaacagaacttagtcaagttcttagataggaatcaatgatgtgctggaactggctggtactagctcagagctgattgttaagttattcaagaatttgccagccagtcagtgttaaacttttggaagctgaaatcattcagggtggaaatatttcacatcgtactcagcaagcatattataaatcagggctgttgctaacagagagccgatttaccgacaccctataccgacaaattcacattgaaaatgtataaattcttctgaaaaccacaaacttgcaatcaaaggcaaagactttgcttaattaacagagatcatcaggaaaaacatatacatacacacatatatatatgagcaataataactaaaacagttttgaaaaagagaatgaagaggccacttgtcagaaagttattataatcaaggcggtgtagtgacagctcatgaacaagcagatgatttatggaagaaaaacacatgggctaagaataccattaagtatatgacaaatatgactaaagaagggtaattttaaaaatggtgctcagataataggaccttttcattctctcttccacaaaaggttcttttcccatgctgttccctcttcccaaaactcttgcctcccttcatttgatctcagctcaacagccatttcctgaaggaagccatctttaatcttcataacaaaccccagattttaggggtcaaatccccagattgtaggcaatttttcttcgtacttatcacagttataatcttatgtttatttgtctgattattttatgagtgtcagtttccttcaccagactgtgcaccctataacaggtcccttataatcccagcactaacacagtccctgctctagagataagactcaataattttaaagaataaatatgcaggtcacctattaaaattgctcagaaaaaaacatataaatctgcatatacattatgatcccacttttataatatttattacatatactttccatatctacattaaagaagactaaaagaaaataccagaatgagaataaattagatggtgcaattagcaataattttatattcttcttttttatattgtgcaattttttcacattttttatagtaaacttgtattccttttatcatcaaaacagaataatatgctttttacaatttggcagatgagaacagggtaggatgggtgaatggtgcgctaaagggagagaaggcatagaaaagaattagtctgtctgcccataactcccctctgtcaacttggcctggtacccacagcccaaccagccttatctgaaatgattaaggactttagacccctccttggaaattcttrgtacagtgcctgagttaaaactaaaaatcaaactgggctttttcctaaaataagaaactattgttatcagttagagtcctgtttagagttctaccgtgaagaacagttatgtattagcttaattaaaatcctgcaacttggtagaaccatcatcatattaaaatagtgacttgaaaattccagatataggcggggcgcggtggcttgtgcctgtaatcccagcactttgggaggctgaggcgggcagattgcttgaggccaggagttcgagatcagcctggccaacgtagcgaaaccccgtctctagtaaaaatacaaaagttagctgggcatagtggcatgcgcctgtaatcccagctactcagcaggctgaggcaggagaatggctggaaccccggaggcacaggttgcaatgagctgagattgtgccactgcatgccagcctgggcaacagagcaagattctgtctcaaaaacaaaacaaaamaaaaaaaaacaaagaaaattccaggtcatacaattcacaaaaaaatccaagatctctcttattgacagaggacttagtaaactcaaaaaaaaaagagcaattaagctratttatataactgattatgtgagtaaaaacacaagcctaatgaaggaattttcttatagcaattgcctgttttaaaacatgggtccaatttagatgagacagaacatgcagggcagtcacttgttaagcagtctccccrcctgctgcttattcctctacacctgtctgatggaagaactgaaatttgggatgctatgggtacctcctgctcatatccaggtggcaaaaaccacccaatgcttcttatgcagaaaaggaaaaaacacaggttcatgaaatcccagacaatggaattccaatttgttcctgatcctaaggtttcataatttgaagatcattatttgtttcataatagtctctccacaatatcctttcttgcaacaacttttcttcttcwtcttttttcctattcaggaagttttaaatgacacaatttcctaccctgatggcacattcatggattgggartttaagatctctgtcttgtatgacattgctaaggtaagagaaacacacacacagaaaatatgaaaattaaatataagaaaacagatctaacaagttattcaaccttcygtgcattggtttcttcatctgtaaaatgayaataatagctatgtcatagggttgtaggattttaggttatgaggattttgtgaaataatgcacgtgcttataacaagaccaggtmcaagtacatgttcaatatatatctatcagttattattattttattatattctttgtagtctgggtgtgaggcatgcagtttcacagattttccagaaatcaaaatcatataaaactacaagaaagacaactgggctgggcgcagtggctcaagcctgtaatcccagcactttcggaggctgaggcaggagaattgcttgaacccacgagatggaggttgctgtgagccgagattgagccattgcactccagcctgggtgacagagtgagactccattaaaaaaaaaaaaaaaaaaaaagacaactgaatcctcaactttacaagagaaaatcttaagtacaggaaaccatcttgcaggaatcaataataaatgtggacatgcatattttgagacgtgataggaaaacagagtggacaccagtaaccagggcctcattcaagaatgaagacaagttggttgtgagagggagctgtttgatacagtcttaactcacctgaaagttatatgggttcagaatcagtttgaaaaatgtgttatgaaaatcgatttgccacacacgtcactcctgtgatccaggctgaaaatcagcttcagctgagacaccctctaaccacaagagagaagcacatcagccaaaaacaggcttcctctttttttatttttttattttttgagacggagtctcactgtgtcacccaggctggagtacagtggcgcgatctcagctcactgcaacctcggccttccaaattcaagcgattatcctgcctcagcttcctgagtagctcggcctcccaaagtgctgggattacaggcatgagccatcacggggaggcttccccttttgaaacagaatgaatgaaacattgcttcaaaatagsatgaaaccacttccactttaggaaataatctagcctggcaccctgcccctttggaaaagcaaggcactattattcatatttttattttaaattcatgtaaaacaggaccagagacctacccagggtcacagaccaaataagtggtaagcagaaacacttaaaaaaaatcaaccctttgcctcatattatacacaactacttaagcagatattttagacaattcccttttactctgtcatttaaacagactttgaaactagatataaagtgtaggcaaatattagggcttcagtaatattgttaaggtaaaaatagtgggactaaaattaaaatctgatggtgtgaccatctgctgaaatggtttccaaatgtcacttttttctttaaaataatcaagcagctgaagtgtgtcacatttctgtttttctatcatctaaaaaattamagggaatgtcatatctgcactccagtaagacagaagtccatggtcgtctgaaatctaccaactgcgtagtggacagtagaatggtggtgaagatcactgattttggctgcaattccattttacctccaaaaaagggtctgtaatgaatgaaatgttcactagtttcctaactgatttttttttcaaacccatgtagcgtggtcaggaaattgtaatactgatcagaagataagcacttaaagccacaagagacaasagctggctcattctccagaacttcacacttgtcagtcaacgagtatttcctgagttaaacaaatgtcctctgtggatttccttcatccatgcgtcccttgctacactgagaaatcatgaataacttaatggcttgtgggagcagaactagctgaaaaaaatatagaaggttagagcaggaagagaccttagacatcgtctaatttaagctttttcctttatagaggacagcactgagactcagatttgtccaagawggtagagtacaaaccagaagacccatttcccattcaagacatcattcatttatgtgtggtaataagaaatgttaaggaaaaaactctaaccagtaaaatatattcttacctctttcaggattgtggtgaragtcaaaaaagataacataaagaaaacggatttgtaaagtataaagggcttttcgtgttgaacatttaccctttcttgactatgactcacagttaaacagactcagatatctagaactcatgttgccttaaaatactacctagagccaaacaccaaattatatttctaattcaactttgcaatcctttcgtttttccttaataaaaggaaaattgcaattctgtccctacatccacagccatttcaagcataatatgatattgaactcaatctaataatttcttattgaagacctgtgccaagcctggttcatgacatagtagtacaaatcgtcatcagataacctagcatgacacaaatcagataaattacaggtcaaatcctatcatcttaaacagcactcgcttatacctacctacctatggcatcagttacctaaaattttagcataagtagatttacttaccttttctacaacccctaacctttatgatcaactatgcatgaatcacaattcacaaaaattcacaagacacaaattcaaaaaggtgatgtacatttggacagagaaccaaataaggaaagtgtgcatcatcataaacatattattgcacctaacaacatgaatctatacatgtttcaytgaaactggtgaaggtaagtcttaaaaagtttataaggagctaggtgatcctgaaaaacttacgaagcatgttgaagaaaaattaattgcatgcccgttattactaaataaggtgtgtaataaggattcaaaactcgagtatctataggagctaaatacagcattgcactcatgtgaagtgagtgaactagatgtaagcactagggagtggcagggacaggagtaaactgtgagtaaattacatgcgatacttttttaagaatactgtgggaaccagcaaaaacaccactgtggaccctagctgagttgcaggctgccagtatgttatgccttgaaaatatcagccatagtctctttgtcttaatgtactgtctttatcttcttttggtaaatttatatttaaatatgcatatacacattaactaataaattataataatttaaataaaataaatttagtacacataaaatttgtatttttttttttgagatggagtctcgctctgtcacccaggctggagtgcagtggtgtgatctcgtctcactgcaacctccacctcccaggttcaagcaattctcctgcctcagcctcctgagaagctgggactacaggcgcccaccaccacgcctggctaatttttgtatttttagtagagacagggtttcaccatattggccaggctggtctcaatctcctgaccttgtgatccacctgccttggcctcccaaagtactgggattaccagcgtaagccactacgcctggccaaaatttgtattttgaaggctttcataggttcattccatatgtcccataaactactaaattcctcagcctctcatattctactgtrttcattcaacatatatttactgagcatttaccacaatcagaccccattccaggtaaactttgagagttttcaagactatgatcctagcagttttaaataacatattgccatatgacctcacccaaatcctaacatttcatagttagtctaaaaggtgtgtgttctacctttgatcaccaggattagcaaaaatttttcaaaaatttggaatcatatcaattcaaggccacttataagctatcacccatatttagagtggatggtgtagggaattagagagcaaaagcaggttggaggcctatgaaccactcacccccctcaactttgtaatctcaatgtctacatttacagacctgtggacagctccagagcacctccgccaagccaacatctctcagaaaggagatgtgtacagctatgggatcatcgcacaggagatcatyctgcggaaagaaaccttctacactttgagctgtcgggaccggaatggtacatctaaacccattcatgtgtcccctctgggagtgagccaacctgctttctaggcttactgagaccctaatctgtctgtaaccacatcacaattccttcaaatgcaaaattaatgatttcccatctgcattatgcattttataagaatataaggaagattcaatattagggtgcactgaaaagcataagacaacatacactgccaggtgttattattgtcagtatcattgttaacaatcttcgtttacaattgtcctctttccttttgattccaataagagaatgtacctgcttaacatctaaactagatcactctaacaggatgacatacatattttagttcttactaagggtagatgtatagtttttggccacacgtcctctcaagggaaaatgcttcattccattcattcaatcctcacttactgagcatttattacgtgctaaccgttaactgtttggtggggagtagggtgactaagggacgtggagagggtgggtcaaagtatggacagaagaagcctactgaaggcagtggtgcctgagctgagttttacagcgacagtagcattttttctttttttcttttcttttctttctttttttttttttttgagacagtgtcttgctctgtcacccccaggctggagtaagtacagtggtgtgatcttggctcattgcaacctctgcctcccgggctgaagcaatcctcatggctcagccttccaagtagctgggacgacaggtgcacaccaccacacctggctaatttttgtactttatgtagagayggggtttcaccatgttgcccagactgagctcctgagctcgagtgatcccccaacctcagcctcccgaagtgctgggattacagctttgaggcactgtgccccaccyggtagcctatccttaaggtaaccttctggttataagtgggatgagaccctttcactgggtgcctcattgaatcaacacctgtctactgagtgctggtctaggctctgcagcactctcactgagctaagagccatccaggggagtgaatcaactggatttctgttgaaattccttccatttcttcatgctgtattcttctttgtaatttatatttttctcacccaaccagagaagattttcagagtggaaaattccaatggaatgaaacccttccgcccagatttattcttggaaacagcagaggaaaaagagctagaagtgagtatatcttcccgtattcatttccttggcctgctataaaattaccataaatgtaatggattaaaacaacaaaaatttattcacttacggttctggagactagaagtctgaaatcaagtgttcagcaaggccacacttcctscagaagagctaaggggctaatccattccttacttcttccagaagcttctgatggctgttgacatttcttatcttatggccacacaattcaatctctgcctcttgatcacagtttctcttctgtctattctccctctgtcacctttctattaggacatatgtgattgcatttgggtccacccagaaaatacagaataatcacctcatctcaagaattgtaacttaattatatctgcaaaggctctttttccaaataaggtagcattcataggttccaggtattaggacgcagcatgtctttgggagccagcctcagcctaccgcattctccgtgcctttccaccactccccaactcaggaatgagctggcttctaaagcacacatctcattctctatttttttttttttttttttttgagacggagtcttgctctgtcactctgtcactagagtgcagtggcaggatcttggctcactgcaactccggcctcccgtcttcaagcaattctcctgcctcggcctcctgagtagctgggactacaggcgcctgccaccacacccagctaatttttgtatttttagtagagatggggtttcaccatgttggccaggctggtctcgatctcctgacctcaagcgatcccacctgccttggcctcccaaagcgctgggattacataataggtgtaagccaccgcgcctggcctcattctctatttttaaattgatatttgtacatatttgtggggtgtatgtgatattttgtcatatgcgcagaatgtgtaatgatcaagtcatgtatttaggggatccatcaccttaagtagttatcatttctatgtgttgggaacatttcaagtcctctcttctagctgctttgaaatgtacaatacattgttgttaactgtagtcaccctactctgctatcaaacattataacttattccttctaactgtatgtttgtacccattaacctacctctcttcattcatcccctgccctacctacacccttcccagtctctggctatcattattctctccacctccatgagatcaactttttcagcccctgcatgagtgagaacatgtgatatttgtctttctgtgcctttcactttacatagtgacctccagttccatatgtgttgctgcaaatgacatgatttcattatttttatggctaaatggtattctattgtgtacacatcctgcattttatttttccattcatccactgatggacatttaagttgattctgtatctttgctattgtgaatagtgttgcaataaatgtaagtgtgcaggcatcctttgatacactgatttctcttcctttggataaatactcagcagggggattggtggatcatatggtagttctatttttagtgtcttgagaaatctctatcctattttccatagtggctatactaatttacattcccatcaacagtgtgtaagggttcccttttctctgcatccttgccagcatctgttattatttggctttttagtaatagccattctaactggggtaagatgatagctcattgtggttttgacttgcatttccctgatgattagttatgttgagcattttttcatattcctgttagccatttataaatcttcttttgagaaatgtttattcatgagttttgcccactttttaatggaatttttttaattgctgagttgtttgagctccttgtatattctggaatatcatccttgtcagattaatagtttgcaaatactttctcccattcaacaggttgtctcttcactctgttgtttcccttgctgtgcagaagccttttagtctaatatagtcccatttgtctatttttggtttggttgcctgtgcttttgaggtcttagccataaaatctttgcctaaaccaatgtcctraagtcttttctctatgttttcttctaatagtttcatagtttcaggtcctctgtttaagtcttaaatctatcttgagttgatttttgtatatgggaagagatggggtgtcctttccccattgtatgttcttggagccgttgttgaaaatcagttgtctgtaagtgtgtggatttatttctgggttctctattctgttccatttgtttatgtgtctgttcctgtgccagtaacaggttgttttggttactgcaactttatagaacattttgaaatcaggtaatgttatgcctccagctttgttctttttgcttgggattgctttggctatttgggctcttttttggtttcgtatggattttaggattgttttttccatttctgtgggaaaatgacagtggtattttgataggattacattgaatctatagattgctttgggcagtataatcattttagtgatattaactcttccaatccatgagcatgggatatcattccatttgtttttgtcctcttcattttcatcagtgtttgtagttttccttatagaggtcttttaccttctttgttaaatatattcctaggtggtttttttttttttttttggtagctattgtaaatgggattgtcttcttgatttctttcctgctgagtttattattggtggtatataaaaacactaccgatttttgtatgttaatttttttttgagacagagtctcactgtgttgcccaggctggagtgcagtggagtgatctcggctcactgcaacctccrcctcccaggttcaagcaattctcctgcctcagcctcccaagtagcagggattacaggcagctgccaccaagcccagctaattttttttttatattttagtagagacggggtttcaccatgttgcccaggcttgtctcgaactcctgagctcaggcaatccaccgtccttggcctcccaaagtgctaggattacaggtgtgagtcaccgcacccagcctgtatgttaattttatatccttcaactgtactgaatttatcatatctaagagctttttggtgaagctttaggttttctagacgtaagatcatatcatctgcaaagagggacaatttgactccctgttttccaatttggatgccttttatttttcttgcctaattgctctggctagtactttcagtactatgttgaataggagaggtgaaattgggcatccttgtctagttccagttcttagagggaaagctttcagcttttcctcattctgtgtgatattggcaggtttgtagtatatggcttttattattttgtgggtgtgtgatatatggctggcctttattatgttgagatatattccttctatggctagttttttgagagtttttatcaagaagagatgttgaatattatcaaatgctttttctgcatcgattgagatgatcatatggcttttgttcttcattctgttgacgtaatgtatcatgtttattgatttgcatatgttaaatcatccttgcttcctggggataaatcccacttgatcatggcgtattatctttttgatgtactgttagattcagtttgctagtattttttttcttggaggatttttgcatctatgttcctcagggatattgacccatagttttccttttttgttgtatccttgtctggttttggtatgagggtactgctggccttgtagaatgaaggagaattccctattcaatttttttgaatagtttgaagagaattagtgttagttcttctttggaagtttggcataattcagcagtaaagtcatccagttctggacttttctttgttgggagactagtgattcagtctcattactcattgttggtctgttcatgtattctatggtattctatttttttctgattcaatctatgtagattgcatttatccagkaatttctccacttcctctatatttttcagtttgctggtatatagttgttcataatagtctctgataatctttcacatttttgtgcaattggtttttatgtctttttctaatttctgattttgtttatttggatcttctctcatttttttcttggttagtctagctaatggtttattgactttgtttaccttttcataaaaacaactttttatttcaatgatcctttgtattattttttcaacctctattttgtctagttctactctgacctttattatttctttccctctacgaactttgggtttggtttattcttgcttttctaattccttgaggtgccttgttagatttgaattttttctgattttttgatgcaggcatttattcctataaactactctcttagcagtactttcgctgtatcccataagttgtggtatgctgtgtttaaattttcatttgttttaattttttataatttctcctaatttctttattgactcaatggttattcagaagcatgttgtttagtttttatgtatttgtgtagtttccaaagttcctcctggtattgagttctacttttattccattgtggcctgagaagatatttgatataattctggttctttataaatatgttgagactggttttgtgtcgtaacatatggtctatcctggagaatgttccatgtgctgatcacaggaatgtttattctttagctattgaatgaaatgttctgtaaatgttaggttcacttgttctaacgtgcagtttaaatccaatgtttcttggttaattttctgtctttatgatctgtttaatgctgagagtggagtgttgaagtccccaactattattagattggaatctacttcttcctttagatctaatagtatttgctttaaatgtctgtatgcttcaatgttgggtgtgtatatgtttagaattgttatatcctcttgctgaattgagtcctttatcattatataatgacctatgacctttgtctctttttacagttttttacttaaagtctgttttacctaatataagtatagctactcttgcttgcttttggttttcatttgcatggaatatctttccatccctttactttcagtctacatatttctttacagataagatgagtttcttgtaggcagcctayagttgggtcatttttaaaaatccattgaaccagtctatatcttttaagtgaaaaattttgatccatttacattcaaagttattattatgtaagggcttattcctttcatttgattaattgatttctggttgtttatacatcctttgttcctttctttcccttgtttttcattatggtttgtggttttctgcagtggtaacctttgagacccttctcttccctctttgtgtgattgctttactagtgggtttcatactttcatgtgttttcatggtggtagatgacatcctttcacttccaggcgtaggacgccctgaagcatttcttgtaggggaggtctaggggtgatgaatttccctagcattcacttgcctgggacagcctttatttcttcttcatttatgaaagataagtttgctggatatagtatccttaactggaatttggtttttctttcagcactttgactacctcatcccttttctcctggcctgtaatgtttctgctgagaaattcactgttaatctgatgggggtttccttataagtaaccagatgcttttttcttgctatttttagaattttctctttaacttttgacaatttgactataatgtgccacggagaagatcttttttaattatatgtatttggggatctctgagtttcctgtatctgaatgtctaaatctcttgctattattttgttaaatgggttttgtattccttttgttttctcttcgccttttgggacaccaaaaattttaagtatttagccactttatggtgtctatatcatgtaggctttgctcattcatttttgttcttttttctttatttttgtcttattggattatttcaaaagacctgtcttcaagttctgaaattcttctgcttgatctagcatattgttgaagctttccaatgtatcttgtgttttattgaatgacttcttcagttccagagtttgttttattcttttttatggtatctatttctttggtaaatttctcattcatatcctgaatttttttttatttctttgtattatttttctgtattctcccatatctcactgagctcctttaatattatttttaattatttttccagaattttattaatttccttttcattggaaattgttgctgcagaactactgtgtttctttggaggtatcatatttccttgctttttcatgcttcttgtgtctttatgttgatacctgtgcatctggtgtaacaattacttcttccaaattttaacatttgctttcataggggaggacttttttcctgaagatgtatctatagtattggttgggtgaggcactttggctttgattctgggtgcatgcagtagtgtagtctctacataatttactcatctgtgagtgggtctgttatttccctaatgggttaggatgtcattgttagtggaggcagtagtgacgttttgttgaagactggaatgccaggtgggctggtcctcagggccccttggaggcactggtgccagcataagctgtccttgggccccaggacagcttatctggtaccagygttagtgggtctaggcagatcaattctttggcctccaagtaacttcctcaggtgccagcagtagcagcagtggcctaggctggtgggtggattcccgggttcctgggcagcaggcatggcatgagtagtggaagtagccatgataggacaagcttctggttcccaagcagtctgcactggtgttggtagtggctgtgacaggctgggcaggccagtctgcaggtccacaagtggtatatgctggtgggtaccagctgtggtggtagcagcaggttatgtggcccccagaagatgtactcaggtgccaacagtggtggactgggctaggagatctctagggcccctacacggtaggctgaagcactgggagggtgcaagtgagccaggtggacctgtcctgagacctgtcttcagtccccaccctgtggtgtgtacaggcactggcttcagtaggcaggggtcattctcaatttttataagctcaatgaacaaggtgtccatgcggtatacttactagacttataaataccatctaatgatttaaaaggaaatatgccaacatctaaaaagaatagagaaatgtacttccactcattttatccttcctctgaaggaaatggagcaaaagctctttacatttgcttttgtaattgtccctcaaaaaggccttgaagccctgtgaaaaatttctaattatttttccttttagcattttacctgagccttaataatccaagaagatagtgagtaaagtattttaagatatttatgatctttacctaaaaccataaaaaccctagaagaaaacctaggcattaccattcaggacataggcatgggcaaggacttcatgtctaaaacaccaaaagcaacggcaacaaaagccaaaattgacaaatgggatctaattaaactaaagagcttctgcacagcaaaagaaactaccatcagagtgaacaggcaacctacaaaatgggagaaaattttcgcaacctactcatctgagaaagggctaatatccagaatctacaatgacctcaaacaaatttacaagaaaaaaacaaccctgtcaaaaagtgggtgaaggacataaacagacacttctcaaaagaagacatttatgcagccaaaaaacacatgaaaaaatgctcaccatcactggccatcagagaaatgcaaatcaaaaccacaatgagataccatctcacaccagttagaatggcaatcattaaaaagtcaggaaacaacaggtgctggagaggatgtgaagaaataggaacacttttacactgttggtgggactgtaaactagttcaaccattgtggaagtcagtgtggcaattcctcagggatctagaactagaaataccatttgacccagccatcccattactgggtatatacccaaaggactataaatcatgctgctataaagacacatgcacacgtatgtttattgcggcactattcacaatagcaaagacttggaaccaacccaaatgtccaacaatgatagactggattaagaaaatgtggcacatatacaccatggaatactatgcagccataaaaaatgatgagctcgtgtcctttgtagggacatggatgaaattggaaatcatcattctcagtaaactattgcaaggacaaaaaaccaaacaccgcatgttctcattcataggtggaattgaacaatgagaacacatggacacaggaaggggaacatcacactctggggactgttgtggggtagggggaggggggagggatagcattaggagatatacctaatgctaaatgacgagttaattggtgcagcacaccagcatggcacatgtatacatatgtaactaacctgcacattgtgcacatgtaccctaaaacttaaagtataataaaaataaaaaaaattttaaaaaagacatttataatctttaaacaaaaacatcttttgttccttgtgggataaaaatagaaacattttccttccatttacaaagacactgccagatgagttttatggccagactctgcagggcatgagtgggtcatttttacctctccccttccctttctttttcaatagtaatagtatgttgaaatacagctttccgaagtacagctgctcctagccctgccttctcctcattcctttctttcgtcctgcttttcygaattccargattcctccacacaatcagcatatcctttctcaagccctttttttctaatctgagtatatccaaataktaaaaccttattcactaaaacagcakcatctttaattcatttgtgtagttggacagttctggaattagaaatgaggaataaaatttcatgtcaagtaactgattccaacagaatacagagtcgaaactagatcactcagcaatgccccagaaacacccagtagagtcgtctctccatccatagggaattggtcccaggaacccctgtggataccaaaatccacagcggctcaaggatctgatataaaatggcatatcatgtgcatataacctgcatacattatcctatgtactttaaattatctctagattgcttataatccctaacatgatgtaaatactatgtaaatatttgtggtactgtattgtttagggaataatgacaagaaaaaaaaggtcggtacatgttcaacacagacaaaaccatsctgttttttccaaacattttccattcccatttggttgaatccacgaatgcagaacccatggagacagagggctgacagtatttcactctgtggcacaggatcggcccagtttgctgtttctgcctattctgctctaaggtagtcagcagatgacttaccaaggcaggagcatcatctagtggtgaatattggcaccacaggctataccgcggctctagttccttcccagggaattgttcagacaaagtacagggacagggattgcatctagtatcacttatgatcttgtttttagccggagtgaaaaacaaagtttatttaaaacaaatggttttcaccacacattttgatttaaaaaaaaaaaagctgcaaacaggtggtagcagatgagcagttgggcttcctcctgtctccctacctcttcctccatacctcccttttttccatgtcacttctctactgcagctgtgcattataatcaccaaagagcttaaaaatctaccactgccctttgcccatacaatatttgcgacatacttatactaaggaattacttattgtttatctgaaatccaagtttaacttgatgtcctttatttttcttgctaaatctgggaaccctactaagaccacttcaaaatatattaaatcagaatgacttagggtggtgcctgggcataagaaattgtgcagatgctccccaggtgatactattgtttgctataagttagaaccatggacagtacggcttttattccatttggagccatttgcctcatattcactgagcctttgttcccccaccaaactgagggttgggctgatatttctcgtggcccaataacaagatgcagatgaactgaggaggaagagagtttttatttctgtaaccagttacagggagaaggcctgaaaattacattttttttcagagcttatataccttcgaagctatatgtctacatgtaagtatgcattcatttaaagacatacgtgattaacttcttttaatctacaactaaggtctgagtcctgaagaccttctcctggagcctcagtaagtttacttaatcgaagtgagtccaggtgctggagtgattacccttatcttgtctcctgctaaattacagaggtttagggagttccttcagacccccaataaacttctttgtggaggcctggggagtttcttcagaccgccaataaaacttgtttaatcctaaatgggtccggttaagaagaattccttcgttattttgtcatgttttaaggcccaggaaaggcctaggcaaaactcttggtgggcttttgttacattccagcctttgtataagggcactggcttttaatatttaacttaaccactcagtcagtactaaaacggttgttatggaggcctgccacaccttcactatttttttctctctccaacgtaaaacttgcaagctcttgtaaattcacttagtctcccgtatcaacccggcctcatctaaattggtatcacatatttcattaatttcacccaaggraataactggataagataatgcaggtggtcatgcctgagacagaaaccagagagctggggatctcttgtccgcactgagttgaagatatttttaaactattccttgccttaatcactcccatcaatgagaataagaattctctcttgatttagtttactatccccttagctaatttgcccgttttttttttcttccaggtrtacctacttgtaaaaaactgttgggaggaagatccagaaaagagaccagatttcaaaaaaattgagactacacttgccaagatatttgggtattgctgaaatgtttacttttattcactaattgcagggttttaaaaaaattatagttgacattcagtggcacctaagaatgagaatgtctattccagtgaaaaatcccaggtggcaaccaacaactgcctcataacattaaaatgatatggagactattagaccgttttcccagggaaataatcacttgaaaagttacatactcaaggtcaaaacttttctgattaaaaaacaaactttagctgattataaatttgtctgttaaaaatagagcttctgggtccttctgtgggtaattaggatttagaagtgtagcgtgagtcctgagaatctgtaaagctcctagacaattattaacatcagcatgttcttaggatcttaaagtcttaaaatctccagctttggccctaggtacttaagacatgtcatgaatcagagcataattcaagttgggggagaaaagtacacaattatttggttgagattaatttctagataccccatgttttcagttaatacactgcagaatgagaaaaataacactgaattaagagttaggaaatccaatttctagactaagatctgataagagtttgctgtggggcattgggcaaaacacttaccctcactgggtatcaattttcttgttagaaaaattggattgaacaagatgattcttatgattttttccaggtctttctgtagttctcattaggtcaaaagactcagatacttaatgagactaaaagtctagagctggaggagatgaggtggagtgaagttaatgaacgtgtggtcattaattagtagaactaagctgtcagttgtgggaatggagcaggaaataataattaattctagccctttttttttctcctcgctgtcctgtccggatgagactttatatgtgactgataaaatgtatgctcatgaagaaactgggtccttgatactcagcctttaatgtgtgtgatggttctcaaacttggctgcagcttggaatcacctgaggaactttaaaaatactgatactggggttttaccctagagaggctgaggtaattggtctggggtacatacaggtgtcaggatttttaatagctcccaggtgattaaaatatgcagtcaaaggtgagcaactgttttaattgaatcaattcatcctagagtaagattatccaacttcatctcttacacctgctcccacatccattctacccaactagactctgtactggcagtttcaagtaaaaattccctggggaacttgttaaacrattctgtttcttcattccaagcctagcaattttcagtcacataggtctcgggtagggcacaaaaatgtactggatttttaacaaacatctctccccatcccaggggatgatgatgcaggccatcttctcctgagaccagaagtgattgttattcttgtaatagtaaaatgactgtgatttattcagcaccttcaattgtgccttagatgttatgaacattatctctgatcctcacaatgctaggagaactcaatgtgtctcctccctgacctctgcaccaaggcttgtcatacctcccagtgtcacacaaagctgtcatctcactaagtctccttgatctgacaaaataatccagagttaggaccctggctctctgtaatgaggagataatttaaggctcagcttggcttttctcagtccttctcctttcatttatcactttcttgaccagcttttaaaagattttccttcattgcaaattgtttcttttgtattttagaaaatacaaataagaaagcaagaaagtaaaacgtcacctgtttcccaataggtgaccaccagtcttcaaaaaataaaattgagattataatttttgctattttataaactgactttttcgcttaataatacagagggagtgtctttctgagtattcaactatactaatttgtattttatgatacaaattagaatgttaatgttccattgtcccatcatattttaaccacacttttgttatacatttagattattttcaaatgtttgctgttgtaaagaatactgtgactttttctgttgttaactctaaacacattcatgattgtttccttaggataattctcagaagtagagttataagctgattggtatatgcattcttaaagcttgtgacatatttttaccaaattgctcttcaggaaggttttgtactatatgtatttcctccttctcctacgttgattaccatcattttaacatttgttttcccttttttaatcttattcttgtcctgaggttaagttgggctttttgtttgtttgtttgtttaagacagagtctcactctgtcacccaggctggagtgcagtggcatgatctcgactcactgcaacctccacctcccagtcaagcaattstcctgcctcggcctctggagtagtkccaccatrcccggctaatttctgtatttctagtagagaaagggtttcaccatgttggtcaggctggtctcaaactcctgacctcaagtgatcctcyygcctcggactcccaaagttctgggattacaggcatgagccactgtgcccggatgaggttgagtttttttgttatgtttgttggcttttatttttctttgtttaattatctgttcatcatatttgtccattgttttattggatgttcatgttttcttaataatatataagagctctttatctattactacctacagactttttcatgaccaaaaaaatgaaagctatatggataccttgatccgacgtctacagctatattctcgaaacctggaacatctggtagaggaaaggacacagctgtacaaggcagagagggacagggctgacagacttaactttatgttgcttccaaggtaaggcaagccttgctgatgtggaggctgaaatccctctagcattgcttttcattgtatctatataggatttgtttccttttatatattcttcagtagattattggttttaaaatgcacgtactgccaggcacggaggctcacgcctgtaatcctagcactttgagaggctgaggcaggtggatcatgaggtcaggagatcaagaccatcctggctaacatggtgaaaccccacctctactaaaaataataataaaaaaaattagccaggtgtggtggcgcgcacctttagtcccagctactcgggaggctgaggcaggagaatggagtgaacccaagatgcggaggttgcagtgagccaagatcgmgccactgcactccagcctgggygacagagcaagactccgtctcaaaaaaaaaaaaaaaatgcatgtactttgctaagccttgttccagtttgtactctactaagtaatgttctgaaggtcacccagtgaatggcagagctgggattctacccaagaagcccgagctggagcccctgatctcctttagtaactctgacctcaaaatctcaaacctctgaaagtcaaatcacctgcaagaaaactaggaggcggatcacagcttgggggaaaggagttggaacacatttggcaagtggtgtcttgcaaccttgtgatagaagggcagaacccatgagccctcagagtgcctgggaacagtagggaacccttcatattcacttcaaggatgataatttctatcacagctccataaatattaggtacataatgcataactccttgcctgatctttaatgctgagttgtgacaaaaacaatatcctggttatctggctgccttcccagggtttcattggcggtggttttaaccattaatgtcactcaagtggtttgaatcagctggctcaccatttcagcttttttcctagccttagttcaatatgccacttggactactagttggtagatgtttttattggatttccaaaggttatatcacacaagtctcttgaagagctacaatacaccatggcttcagcacaactcactttggttatttatgtaaaaattttatgcgcaagataaaactaaaacatgcatgagcaataactagaagaatcaaaaagaaatatgtgtagcaaagggcaaataaacttaagattgcatgtaggaaccagatatcacttagacatttatttgaatagtaccccttggggtaaatacattaaaatagaagtttcttcttttttatttttattttatttaattaattaatttatttatttttgagatggagtttcactcttgttgcccaggctggagtgcaacgacatgagctcagctcactgcaacctctgcctcctgggttcaagcaattctcctgcctcagcctcccaagtagctgggattacaggcgcctgccaccacacccagctaatttttgcatttttagtagagagggggtttcaccatgttggccagactggtctcgaactcctgacctcaggtgattcacccacctcggcctcccaaagtgctgggattacaggtgtgagccactgtgcctggccagaagttttttcttctgggaagactttctaagagatctactctgtatactaattttatctatgtcagcaacaacctgttatcaaagctcatcatgttaactcccagcccttccttcgtttatttacaacatgagtttctctctctggataacacactattttccaagtgtaatagtccattctcaccctattataaagaactacccgagactaggtaatttatgaggaaaggaggtttaaataactcacagttccacagggtgttcaagaagcatggctggggaggcctcaggaaatgtacaaccatggtggaagagtgaaggggaagcaagcaccttcttcgcatggcaggaagagagagagagagcaaagggggaggtgccacacacgttcaaacaactagatctcatgagaactcactaacacaggaacagcaatggggaaatctgcacccatgatcccatcacctcccaccaggtccctcccttaacattggggattacaattcagcatgagatttgggtggggacatggagccaaaccatatcaccaaactcatgtgacttttcagatataagcagtacaatgaattgcaaatatggcagaatatccaattttgtcattgcatctatgcagcctccaaaatactatgcactttatacagggcatgtcaagaacaaccactccagtcgtgtacctaggaatccaagccacaccaaaggaatgtttttcaaaggttccaagttttgtcattgcaccaattaaaaaggtttctccggatgctctggaggttctccaaatgagtgttagaaatctttgtggttgattggttgttttctttccgggagagcccacctcctttgttgcagtcagcatacctccaaatcttccccatcttcctgaatatccaaggcctgggttgtgcagggagtgtaatgcaaaaaaagactgatgggtgggactgaaggcttcctgaattctagccctggctctgtccctaatcggctgtgggaacttagggaagtcatacttttttagacctcaactttctcatctgtaaaaataaagatttcttttcaatgacttccgtggaacctcccagcttccagtttctgattctagtggttccatactgagggccactacaaagtgatgccaaggacagacagggaccatcccacttcatgtcagccctcacttccttttctcaatgaagaggtaacttggcacaccaagtatggagtcccttcttctggttctcttccttcaatcttgaatctgatatgctgctcctcattcagcaaagatattctaaaagttgctttaatttgacttctacagttttagcatgatttaatttattkacaagattgattctgctttacaaaggacccaaatctggttcaaaatatcaaatgaactctggttcagaatatatcaaaatttatatttaaatgcatcattatttcatagtaatattaagcaatgccatattacatatgccaggaaagtaaaactatcaactttgttgagaaattcagatctgatacctgtggtgatttaagtaataccacactctcctcagcttctgcatgtagagccacatctgtaagaggttgattatcaatagagaagcaaaaagtggacaagtatgtatatgtatgagagttttgaggatattaaagttatctatttatgtgtattaggattaataatcaaacactaagttaatgttgaacctgcttgtattcatctgtgttcacaacatgcattatatgtgtatttgtgtaatatgttcatrtatatgatatacacaacctctgtttccgattcactcaattcactggaagtctcaaattctagaattcttggtagacartcactactacctgaaagatttatgtgaaacaagaagaaatttgctgaagttgaaggcattttttttcccttcgttcatctaggctagtggtaaagtctctgaaggagaaaggctttgtggagccggaactatatgaggaagttacaatctacttcagtgacattgtaggtttcactactatctgcaaatacagcacccccatggaagtggtggacatgcttaatgacatctataagagttttgaccacattgttgatcatcatgatgtctacaaggtaaccacatcacctaacaggctgaaaccattaattgtacaactcaaggtcatcagagcctgaattggttgtttctgttactactcttgtccgctctagtttcacatttagtgaattggtggttgaatctgagctaaaagtgaagagaagtagaaggattagaggagtgagaagtcaaaattaccattcaactttaagaagcagcaaaaaagatacaacaggaagttcagcaggaattaatttgaagtattaaatttagacaaaatggcatactcttaaatcacctccaaaaaatgggcagtgtttaggctgactgcaaatgaagcagagaagacactggggttataataaatagaaaatcatactacaagaatgtatacaattacatattacaaagtacaatattctgttaaatagtatgttgacatttgctaaaggattaattttcaggaaactaagggtgttcctcaaattacataaaaccattcagattatttatttgaacatttctagaactgtcaccacatctggacaatttatataattatgaagtacttttaaatggctaaattcctttatagctattttatcacccattaactggactataaaaaccctgaagaaatcagcatagaactgatccaactggccccagaaaaagtgtaaagggctatgctcatactgtgttcgcaaatcactttttgtgtttgacatgtgattaactgcttctgtttactttctatacttttcaaaggggcagaggcactcatgagaaactgtttccacaggtggaaaccatcggtgatgcgtacatggtggctagtggtttgcctaagagaaatggcaatcggcatgcaatagacattgccaagatggccttggaaatcctcagcttcatggggacctttgagctggagcatcttcctggcctcccaatatggattcgcattggagttcactctggtatggagttgagcatcttagcaaattgggaaccatatgtacygctgtgcaccaactaaatcagaaaggataaaaggtcttcaagtgtgatcgacctcacataatttttactcttaattctttttgccaaatgtgaggtcccactatgcatcctgagatatttagacccagttcctagagaactctaagaacaagacctttgagggcaccactgactgctgacatgataaacaccaaacatgtacgaaaacaagaagctttggactcctatttaaatcaccatacctatgatttcatttatttcctccccattccctttctccccacccccaacttcaatatattttcccactaaaatattatagtatcttaagtggattagattatctacaaggggaaataaagaacagatggtgaaatttctataatatttataccccctcccttccctgccactgcagttatacagaaagtacatgagtcactttcaaagaccatgaaagttacatagccttgttaaaagaaaagcttatgcatattaaatttaacacagtttgattgagcaaagaataattttcaaatcagatggcccttaaaaccagaagaggttcagagagcttcaatgggcaaggtgggcgggcaatgtttatagacagaaaacagaagtgagggacagaaacaacttgattggtcaaacctctgtgttcccctgatttggtcaaagtcccatcagttgacagcctgtgactggctgaagctcagctactgcgattggctgagactcagctatctataacgtaagtataccctagttaggcttttagtttgtttatgtaccaagctaggttgcagtttgttttgtagggacccctaagaggcagcctcaggccaaacttagtttaattcaacagccttgaacatcaaggtttgagatgagttacaggtgttatagaaaaaacacctgtaagagaggaactcagaagtcatctagatgaatctttagccaggcattgcttaaaactcagctttgcagtttttgagttaatctttaacttctgaaactgttaacaccttgcactcagtcattctatgcaaatacatgactgaataacccttatttcctacctaatatgccacagcgcatagtctagcctgggcttttgttctgcttgttggaacctccttgtgccacaggcttccccatccagctgcattcgcctggtccatgaaatgcttacggaaagttatgcctttgtcttgtcttctgtcttccattgtcatggcaccaatcccagaaatgccaccttaaaataaaaataaaacaaacttgagccattgaagcttcaaatctacagtgccctccagcagtgtgaaattcagggttgtgtggtttggcacagtaagcaagcagtggggctcatcttcatccttcctgagagccttctatttaaaatcacctttgtgatctggatctctgaatgccttcctatttgctacaaatgtcgttttctttgcgagagcaaaatactttatgatcgcatgcattgaataatgatgcttcattggattcatccatttaaaccaaaagtcccagctcacatttcacatcctcagctacttctccatgacaggaagtattcaggattgtgaccatacagagaggcttacctgtcttcactctactctgcaatttctattgcctccacttcctgctttctgtccttcatttcaggtccctgtgctgctggagttgtgggaatcaagatgcctcgttattgtctatttggagatacggtcaacacagcctctaggatggaatccactggcctccgtaagaagggagactgtttttctcagaggacaaagatgctgttttccagcagagggcaactgtgagataaaatgcacaataaggagatacaaagtgccagtgagatgtagaataattcttcacattagctgaacacaaacccgtgtcaatccaccttttgctacatttgctttcattgttgtttactgataattattttattcttccacttttgctcagttttagactatttctatatttttggctcatatactatgaatctggggatattctacttagaatagtcctggcatttaccatagattcatgaaagttaaaaaaaaatcagtaggcaaggtaagaactacacactctggttcacattcctgtttccctcttatttggttttgcttttttgttgttgttttttagagacaggctctcgttctgtcacccaggctggagtgcagtgacacgatcatagctccctgtaaacttgaactcctgggctcaagtgatcctcccacctcatcctcccaagtacctgggactacagggaacataccagcacatccagataatttttaaatttttaatagagactgggtctcactatgttgcccaggctggtctcaaactcctgacctcaaggagtccttccaccttggcctcccaaagcatattcgttttttctggaaattgatttttgtttatttgtttgagatggggtctcactctgtcgcctaggctttggcacagtggcacaatcacagctcactgcatccttgaactcctcagctctagtgatcctcccacctcagcctcctaagtagctgggactacaggcatgccaccatgcacagctaattttttaattttttctgtagaggtgtggtctctctatgttgtctaggctggtcacagattcctgggctcaagcaagtctcctgccttggtcccccaaagccccaaagtgttggaattacaggcaagagccatcatacccaaccaagaattgattttagtaaagaaaaatctaagcatttgttatatacgaaggaatatattgcatttgcttggcaaggtagaggcacaatgtgctgcatgaagtagatgctcaataaatattgatgacagtggtagcagtagaaatatatagaagagagaaaataagcactgggagacatggctggggcttacgaaaccacaggaggcaggatggtattttggtagtgtactgacaatgtgatactagtttgtcctggcaaatcatgctggcaaggaaaaggataaggttggggtcagacagacttgggttacaattgaaattatgttaatcattctcagtataagttgagtagaaagctacctgatccttctagccctcagaaagataaagatacaaattgaaaatggaataccaaccgtgccaagagggtttctgaaataatttgggatgatgtcatgttaagcgtttagcaatcatggtacatggtaggtatacaatttgggattgtcattattcttactgtgtaattgtttgtggtattgctattaggcccctatattgggaaaggtgatacacatcaatggacttgtgaatgggcgtgccctcaccacttcttttgtcaaaggataacaatgttccagaagaaggaaatttgagaaaatcaagacccctcaactctcccgaatcttcaccttgcccacaaggctttagctatttattggaacttttccacagggacccaaaaccaaactccaacacccaagcttggcactacaagccaaatctaaaactaggtcccgcaggctactactctgagctggaatgagaatctatggagaaaaacctagggatccccatcacatcacgcagggccctgaaaactgatgccaggccttctttcttcccacgtgagattatatttcttgtgtgagggcattcttgcattgctataaagaaaaacctgagactgggttatttataagaaaagaggtttaattggctcatggttctgcaggctgtaagggaagaatagcacctgcatctgcttctggggaggcctcaggaagctttcactcatggcagaagacaaagcaggagcaggcacttcatacagcaaaagcaggagtaagaaagagagtggcaggggcaggtgccacacctttttaaatgaccagatcttgtgacaactcagtatcgcaaagacagcaccaagccatgagggatccacccctgtgacccagacacctggtsgggggccaggactccagcactggggattaaaattcaacatgagatttgggtggggacaaatatccaaactataccatttcttatctctctgatgttatttttaagtgttctttcattaaaatagccacaattgtttcttcttgatttaggattcttgtctcaggtgttgttgatatcctgaatcaacgggaaacaaataggcygtgtactagctgggatttttatttgtcaatttgcatttccagctttgagaattcacgtgagtggctccaccatagccatcctgaagagaactgagtgccagttcctttatgaagtgagaggagaaacatacttaaaggtaaggagtccacagagacaatgcataggaaaagctctcagacacgcttgggccacctcctttgagacttggccaggaaagttgagcatgctaatcctyttctgtactcatcacgatgagcaccctccatcctctgcaagagaaatgaccaccaaaaaatgtgaactcaaaacttgcctttactccaaagagcccttttgagattttgaactctgccagcatttcctctgccatatccaggttttgtatccagttcctcctccaaacacaagagctacatacagtctggtccaggacttatttaatttgaatcaaaacccttgtccccccacttacttccctactcttactacacactgctgctatgatctgaggtcacctctcttgccagttgctttactattcggaagctctagaatcacaaggagtgaatgacaaggtgtggccccattctcctcctcttcctcatctggaagcttgttaaaatgcagatgtgtggacactctaccaggcctactatgcaagattctctgtgggcgtagatcagaaatctatatttttaacaagataatgtgtttgtgaccacactaatatttgagaatcgctattccagattcttcatgcagttcctcacatttaaaacagctgccctccatagccatcagttgtctccaaatgcttctcaggctgcttttccaaagttattggaatcttttcacaactggcaaagccagctattaactgtaagttacctgtctccggtagccataatgcttctggcctttacatttggattgcaccttggaaaagtctccttttacgtaaaagtgtcctaacatcacacttgctttttgagtcctccataagtacattttttacaaagaacacttaccccaaaatagaaccagtttatggattgctatggtccaaacacagccagtgaaccactacttttttaaatgagtttaacaatatatatcaattatatatatatatatatcaatcactcatttttaaattattgatatatattatagatatatattattaaactcattttttaaaaatagtggttcactggctgtgtttgggccatatgtattttgtatctctttttcaaataccagctttagcaaaaacagggtttccagtattccagtaaatttccatacattccgtagcctccagatgggccccagaaatgccacttaatgagttcttaattgtgatgtacatgtgtttgtaataagatagggaaactgtagcaaaagttttgtagcaaaactttattgcaaaaagggctagaaggaaatatggacaatgacaaccagttggatttgttgacgtagcagaattgtagatgaattttcttcctttttaagttagagttcttgtgatgttgctagagtgatattttaaaatgtcttttggggaaaaaaaagaaaactctactttgagaaaaggatgtctgctgaatgagaaacttatttttaaaaaggcacttggaaataaaaatctgtctagagataatgcaaatcataacaggaatgtgtgatgtgcttaaatattggcactgatgagaaatgcggaagtgaaacatgtcacagaaacagatcattatggraacagtggtctacaactgaactgactccttggactccgtggtacrtaactcttttgtcttaccagggaagaggaaatgagactacctactggctgactgggatgaaggaccagaaattcaacctgccaacccctcctactgtgtaagcttctgggtgtggcagggacagggaggaaattagagatcttggctttgttagttacagccaatttaaattggcaaatgccttacaagtggcwtatattgcataagaagtaagggactatacatgagaaggtttagaaacctcccttcctagactgcaagaaggggattatcctgaaaccctgcattttcctgagacctcaatgaaacagaaaagtatttagccttggcttccctgtctggaacacagacttgcttccctgaatcagatgtgggggctcagtataaaactacctttttttttttccactgtggatcctttatcccaagagggagcttccacctggaaaagaggaagaatgaacagactatttagaacttgaggagattttgttatttcatttatttcattttatttactggctctgtattcatgatatttttaactgtcaaaattatgttttaaatgccttatctgcattaaagtatacttaacttatagtttatgcagaaaatatactatatattagacaagaatgagttaaaagtttcctgagtctgggtatgagcttctacctattctgtccactttcttagactgtaccagtcatcatcttgttcttgctgaaaaactgactatattgccctgcaataaagcatggcaaagctagcgttgtgttccaggcttgctcgggagaacagaagacactttagagttcacttcatgcatgtcttgttctgacaagagtggagcatactgggggcaaagaggctctctgcattccactcctgtcttcatctttctgttgagttgcctgatgaaaacaggacctgccccaaccccaagactgcgkttctgggtcttaacatgaagtctgtgttctccctgagatgaggaagacaaagtttcagggttaactgacaggtttcacttctcctaaaggtgactcaagctgtcacccagttgcctgtcaatacatgttactgcagccatatggccatttccttggcttttgctatggttgagaaactctgtcttgcagaggcctagatgtcagacccagagagatggcaaccttctagaaaagccaaaacaacccaaatcttccctggggcatgagaaacctggctccttacttggagtgttccaggtccattctaaactcgtggtcccctccaccattctaagccttccccaaacaagactcacactgttaagtatgtgtgggaccaatgagttttcagggttgtgtggcaggggcctagcatcctcccagcttcttttccccttcctgcagtggcatatgtaaacctagatcctcccaaccatgcctccaaattccagcagcatattgtttcactttgaaattgaagcctaatttcctagcagagataacagttttttaagctcatcaaaggcagggatcattttgtattctttggatttcctgtgtctagcacagaataggcattcaaagagtaactgactaactgaactgattattctggagctaaggaatattctgtatgaattgctgagaagttctattttctcttcccactctgtttccagggagaatcaacagcgtttgcaagcagaattttcagacatgattgccaactctttacagaaaagacaggcagcagggataagaagccaaaaacccagacgggtagccagctataaaaaaggcactctggaatacttgcagctgaataccacagacaaggagagcacctatttttaaacctaaatgaggtataaggactcacacaaattaaaatacagctgcactgaggcagcgacctcaagtgtcctgaaagcttacattttcctgagacctcaatgaagcagaaatgtacttaggcttggctgccctgtctggaacatggactttcttgcatgaatcagatgtgtgttctcagtgaaataactaccttccactctggaaccttattccagcagttgttccagggagcttctacctggaaaagaaaagaaatgaatagactatctagaacttgagaagattttattcttatttcatttattttttgtttgtttatttttatcgtttttgtttactggctttccttctgtattcataagattttttaaattgtcataattatattttaaatacccatcttcattaaagtatatttaactcataatttttgcagaaaatatgctatatattaggcaagaataaaagctaaaggtttcccaaaactgtgtatgcgtttctacctattttgcccattttcctggaatacatcagtcacatcatcttgtgcttactgaaaaactgactacattcactcacactgaagtacggcaaagctagcattgttgctcaagggtgagaaccttgaaggttagtatcacttgctacacatgagggaatttttgacctttatacagaggtgttgcttcagcttgtccaattaacaatgtggatggcagtgatccaagtatgggacccaggcaaaagtcaagttcctgtactgcacttttctaactacaaagtaatccatgtctccaggctcctgatctttcatcagtaaattatgaattataatactcacttcattttagactgcgccaccccttcccccaagctggcataacaccactcacagataatttccttagacccacagtttacaaggtaaaaggagggaattggagatggaagtttgatctccccaccagtctgagaatcttcacaagaagctcactctggtcctgtctcatgaaccattgcaagtaccaggtgggctgaaacaccaggggtgaactggggacaaaaagcggaggtgctgattgctgaaactgacatgcagatcttgcagctgctctgtactccaatcagcagagatgccatactgagaaaactggatgatgcaacagtcctactctaggcaaaacccacaggaaagcctgaatccctggttagatttcccacaaagcccaggtgctaatgtggaaccttcctcttacttggaaacaactaaaaggttttttccttttaaacaacctttgaactctagcactctcctaaggcttccccagaccaggaagcaatagcagaccagtgactaagttacaacattaagcactaaaagtctaacaccaccaagaatacctgtaaaagctggaagaagtgaccatctcctcgaatgtgcgggcatcaatgtaaagacacaaggattgtgaaaactcagggaaatatgataccatcaaaagaaaccaacaaagctccagtaatagacccaaaataattgaaggcccgtaacatgtctgacagaattcagaaaaatcttaaagagttcagggaagcacaaaagagtatagattaaaaaaattaaatgaaatttgaaaaacaatccaggaacaaaatgagaaaattgacaaagaaaaaaatataaaaacacacataaaagtagaaatcttagacataaaggataaaatagctaaactggaaaagctcattataaagcttcaacaacatatttaatcagaggaaagaatgggcttgaagacaggacatatgaaattacccatctgaaaagaaaaaaagaattaaaaagaattataggataccatcaagcaaactaaccttcatataataagaattcctaaagaagatgagagagaaaagagccatattttaaaaattatagctgaaagattttcaaatctgaagaaagatgatagcactcaggtacaggaaactcagaggtcaccaatcaaattcaaagaggaattccccaaatcatatcataatcaaattatcaaaaatcaaagataaagaaggaatattcaaaccaggaagagaaaaaaaaagcacattcaatagagccccaatatagcttgcagtaaatctcttagcagaaactttgcagactaggagacagtgagatatatattcaaagtattgagaaaaagatactgtcagctaagaatactgtatgcaacaaagctatctttcaaacatgaaggacagataaagactttcctagaccaaaaaaagaaaaaaaaaacaaaccctgagggaattaatcaacatcaggcttgtcatacaagaaatcctaaagggggtccagcagtctaaaagagaaggatgttaacatgtaacaagaaaacatctgaaggtataaaactcactggtaaaagtaagaatagaaattcagaatactctagtactgtaattatgatatataaaccaattatatcttaattatggagactaaaacttattaaagatgataataactacaacaattggttgagaggcaatataaagagatgtaaactaaaacatcaaaaagtcaaaacgtggagggggaatgatgttaaagtatagtgtgttttgttgctttgcttttctttgcaatcaaagctaagttcttttccatttaaaataacctattataactataaaatgttttatgtaagcctcatagtaaccacaaagaaagaaatctataatagagacactgacaataaacagcacagaattaaaacatactactagagaaaattacttaaccacagaggaagacagtatgagaggaagaaaataaaaaatttaccagaaaaatgcaaaaaacacttacaagaatggcaacagaaaacatgttcctatcaataataacctttaatgtaaatggactatattctccaattaaaagacatagagtagggcaggtatggtggctcatgcctgtaatcccagtactttgggaggctgaggtgattggatcacttgaggccaggagttcgagaccagcctggccaacatggtgaaactccatctctactaaaaatacaaaaattagccagcatggtggcacacacctgtaatcccagctattcgggtggctgaagcaaaagaatcacttgaacccaggaggtggaggttgcagtgagctgagattgtaccactgcactccagcctgggcaacagagtgcgactctgtctcaaaaaaaaaaaaaaaaaaaaagatatagagtagccgaatgaatttttgtttaaagaaaaacaggacctaactacatgctctctataagaaactgcacctctgaagatacatgcagactgaaatcaaaggaatgggaaaagatattccatgcaaatggaaaccaaaaagatcaggagtagctgtacttatatcatataaaatagactgaggtcaagaatagtatacaaaaaataaataaagctattatataaatataatattatttatataataaattatataaatttcaattatataatttaataaatgtataatttaataaattatataattatataatacaatataataaattatataaaggagtcaatgcaacagggaatacagtaattgtaatacatatgaacccaatactaaggtaaaatgtaaagcaaatattaatagacctgaggggagagattgtttagaatataaaagtagtaggggactttagcaccccacttttagcaatagacatatcatccagacagaaaattaataaacatggaggttaaactgtactctagactgaatgtacctaacagacttttacagaacattccacctaacaactacaaaatgcacatttttctcaacagtgcatggagcatttgtcaggacagataatatatgcaggcacaaaacaagtcttaataaatttaaagtcaaaattatattaagtatcttttctgactgcaatggaataaaactagaaatcagtaacaggagaatttgacatagtgggcatgggcatgtgaaaaaaaagaagaaaaaaaaaacaggagaaactttggaaactctacaaatacacagaaattaaacaacatgctcctgaattactattaggtcaaggaagaaattaagagggaaattaacatttttcttaagacaagtgaaaatggaaatacaccatacacaaatctatgaaacacagcaaaagcagttctaagagggaagtttatagcaataaatgcccacattgaaaaagtagaaagatctcaagcaagatgactttcacctcaagaactagaaaaataagaacaaacttaacccaaaattagtagaaaaaagaaataatagaatggaattaaatgaaatagagatttttaaaacaatacaaaagatcaacaaagcaaaaaaaattttttaaaaatataaacaaaacaacatgcctttagctagacttactaagaaaaagagaagactcaaataaataaaatcaaagatgataaaggaaacatgacaactgataccacagaaatacaaagaatcataagagactaggaacaactaaataacaatagattagaagatctagaagaaatgtatacatttctgaacacatacaacctatcaaaattgaatcataagaaatagaaaacccaaacagaacaataacaagtaacaagattgatgtagtaataaaaactctcccatcaaagaaaagtccaggacccaatggctttaccacttaattctaccaacatatgaagaaaaactaataccagttcttctcaaactatttcagaaagttaaggagaagggaatacttccaaactcattgtccaaggccaatattattctgattccaaaaccagagaaggacttcaaaccaacaccactgatgaacatacatgcaaaaaccctcaacaaaatattagcaaataaaattcaacagtatattgaaaagatcattcaccataatcaagtggaattcatctcagggatgcaaggatggttcaacatacacaaattaataaagatgataaaccacagtaacaaaatcaaggataaatacaataaaatcattttcattgatgctaaaaaagcttttaataaaattcagcttgccttcatgataaaaattctcaacaaattggacatagaagaaacatacttcaacacaataaaggccacaatgataaaaacccacagttaacatcatactgaacaaagaaaagttgaaaactttttctccaagatttgaagcaagataaggatacccacatttacctcataatttcaacatagtattgaaagttctagccacagcagttatgcaaaaagttctagccagagcagttatgcaagagaaagaaataaatggcatccaaactggaaagaaggaagtcaaattgtccctgttggtagacaacataaacatatctatagaaaaacctaaaagactccaccaaaaactgttagaactaataaataaattcagaaaagttgcaggatacaaaaccaacatacaaaaatcaataacatatctgtatttcagtagcaaactaactggaaaaaaatcaagagagcaattctgcttacaatagcttcaagaaaaaaaaatacctaggaataaacttaacaaaggagttaaatgatctctacaataaaacctataaaacattgattaaagaaattgaagaggacataaataaatggaaaatattccatgttcatggattcaaataattaatattataaaaatgtttatattacccaaaacaatgtacagatttaatgcaattcccatcaaaatactaatggccttcttcacagaaatagaaaaaaaattaaattcatatggaaatccaaaagaccccagaaagccaaagcaatttggaacagaaagaacaaagctggaggcatttcactacctgatttcaaaatgtactataaagttgcagtaaccaaaactacagggtactggtataaaaacagacacatagacggatagaatagratagagaacacagaaataaatatatgtctttacattcaactgattttcaacaaaaacatcatgaacatgtactggagaaaagacagtctcttcaataagtgagggtaggaaaactatatatccacatgcaaaagaatgaaactagaccccatgtctcaccataaacaaaaatcaactctaagttggttaaagacttaaacataaaacccaaaactatgaaagtactagaagaaaacatagggaaaacacttcaagacattggcttaggcaaaagttttatggctaagacctcaaaagcatagccaaaaaaaaccaaaatagacaaatggaactatatttaactaaaaacttctgcaaagtaaaggaaacaatcaacagagtgaagagacaacctgttgagtgcaataaaatattttcaaactattcatccaacaaatgactaatatccagaatgtata

SEQ ID NO: 95195 - DNA, 37059 bp, Homo sapiens
ccaaaacggtaaaaatcaaaatgttcgataattaaaccagtttggcaatgttgcattttatgatttcccctctctaatctttgcctcacagccatgctaaataattatagaaacaccaattctgaactaaatctttagttttttcattgtcagagacgattcagctaggcaggatcagcatgaaagatgagaaaaaatgaaagaccctcttaatctgaacatcttggttccttcccacctgcaggtgaacagggatattgtgtcaggcctgaaatacgttcagcacacytacaggactggggtgaaaggtaagggaacccacatttccacactgtcccaaactgcttctcattgatactttaacttctggttattagcaacttttagctatagactcagatgagaatacaataaaagctgtggatgccggctctaggaaaaggcacaaatacacctctgatatagacattgacaaggccaatgctcaggggacctcgtttagactgcatcagctgctaaccttcagcagtcagctttttggattcaatattatcactcgtaaaggagaagagtaaccaagataagtttaaaggaaataaagtatataaaaatactctacaaagtaaacaaccaaaaaaggcagttcacaggtacaaaacccaagtgtcagagaaaaccaagaaagaaaaaacttgcccagtgccatgtgtatctggggtgggagtaggtgggggtggcattggagggaagggggaggcaatgctcaatttcctaacaaagaaatagaaaaaaaaatattttctaggattgaaaaagcctgtctaattaaaataacacaacaacattacttaatctgcaattcttcttgacatgccttgggaccctgccttcaattttctttcattaatataggcagggagaaatgagaggcgggaaggtgatggaggcactttacagttcctttctacctaagggtctgtcccctccagaggcaagaaacaacaaagcatgtctcagtttccaccaaattaataagcaagataggggagaaattgtctgataaatctggatgacatagaggaccagtcaatttctcaaatcccagagaagaccattgacctgaaagatattgattggcctttccgatacctagtctcatgaaaaaaaagtttaatttcctattttcctttgggcataaagcccgtatcacctcacttagacaaaaggacagtgacatgtctgcaactgttttttcaaacttattagcaacacttagccaactatatgccacctatctgcctatgtatacttttcaatgcccaactattcttaatatatattccagttaaccacctataaataaacttgattggctattttcaccatttgtcctagttcttcacttttttttttaccaacttactgctgttgttgttccatccagttattctatccatgaattctcatcaccatctgttactttatctcccccaactgatatgttcatagaatgacagtttgtagatagaagatccttaaagtccatcatatacacaaagaaatggaggctcaaaaatgttatatgacttaggccattgcaggactgagatcagaactgaggtctcaatttgtctgagttttttaaaatggtgtaatctgctatatctccataaaaaaaacaacaacaacaaaaaaaaaaaaaaaacaggcttaatccccattgatttaggccactggttccccaactttacctcagaatcaactttgtagttttttaaaaacactgatccctgggacccacagaaggttactgaaccatagcctttggaagtaggacaaaggaaactatattattaaaaggcactccaacttaaaaaatgttttaaagaataatttttttaaaaagatgcctcagggccaggtgcggtggctcacacctgtaatcccagtactttgggaggccgaggcgggtggatcacctgaggttggtagttcgagaccagcctgaccaacatggagaaaccccgtctctactaaaaatacaaaattagccaagcatggtggcgcatgcctgtaatcccagctgctcgggaggttgaggcaggagaatcactggaacctgggaggtggaggttgtggtgagccgagattgtgcttccgcactccagcctggacaacaagagcaaaactccatcttaaaaaaaaaaaaagacgcctcaggtaaatctaatgtttatttaggcttggaaaccattgctcttgactttaatcactgtaggctgtagtccagattctccagtttgcagtgtgtgtttttcctctatcaggctcttaccctaatgaactcttctttcttcttagtggataaagcaacatttatggttggcagctatkgacctcggcctgaggagtatgagttcctcactccagttgaggaggctcccaagggcatgctggcscgaggcacgtaccacaacaagtccttcttcaccgacgatgacaagcaagaccacctcagctgggagtggaacctgtcgattaagaaggagtggacagaatgaatgcatccacccctttccccacccttgccacctggaagaattctctcaggcgtgttcagcaccctgtccctcctccctgtccacagctgggtccctcttcaacactgccacatttccttattgatgcatcttttcccaccctgtcactcaacgtggtccctagaacaagaggcttaaaaccgggctttcacccaacctgctccctctgatcctccatcagggccagatcttccacgtctccatctcagtacacaatcatttaatatttccctgtcttacccctattcaagcaactagaggccagaaaatgggcaaattatcactaacaggtctttgactcaggttccagtagttcattctaatgcctagattcttttgtggttgttgctggcccaatgagtccctagtcacatcccctgccagagggagttcttcttttgtgagagacmctgtaaacgacacaagagaacaagaataaaacaataactgtgtgtgttctggctgagaccttcatttccctgctttcttgctttgaacaaatatgataactggatggttcacattcatgagttccctcagaggggatggggatgaggaaaacacactggaggagatatttacatctttgggaacaaattggtcccctattacactataataggcaatgcacattcagaatacagccagtgggaaatctacattttacttatttagttagctatttttaatttcgacttttatattagatatagagggtacatgtgcaggttcgttacatgggtatattgcatccaggtagtgagcctagtactaaatagatagtttttcaaaaaaygccccactccctcccttacccctcaggtagtccacagtgtctactgtttctatgttcatgtctatgtgtgttcagtgtttagctcccacttataactgagaacatatggaagttggttttctgtttctgcattgctttgcttaggattatggcctccagcttcatccatattgctgcaaaggacatgattttacttttttattatgaccatatagtatatcatggtatatatgcaccacatattttatccaatccaccattaatgggcaactacattaattccgtgtctttgctattgtgaatggcacaacaatgaacatacatgtgcatgtctgtttggtacaacaatctactttcctttggatatatacatagtaatggggttgctgaatcaaatggtagctctgtttcaagttttttgagaaatcttcaaactggtcactctccatacgttcgtaaaaatattatgccttggaatgctaacgttactcctaaaaattggagtactctccttggccttactgtagagataaaaggtatagatgtcctcattacttagagttgctttccacagtggctgaactacgtaactgcttaagctacatccccatgaataatgtataagcattcccttttctctgcagtctcaccagtgtctgttgttttttgattttttaataatgtccattctgactagtgtgagattgtatctcattttggctttgatttgcatttctctgataattagtaacgttgagcattttttgtaggcttattggcctcttgtgtgtcttcttttcagaagtatctgtttatgctctttgcccattttctattggggttatttgttttttgcttcttgatttgtttaagtttcttatggattctgaatattagacctttgttggatgcatagtttgcatatgctttctcccattttgtagattgtctgttatcaatagttccttttgctctgaagaacctctttaattaggtcccacttgtcaatttttgtttttgttgcaattgcttttgaggacttagccaaaaattacttgtcaagattaatgtcaaaaagagtatttcctaggttttcttctaggacttttatggtttgaggtcttaaatctttaattcatcttgagttaactttttatatggtgaaagatgagggtgcagtttcattcttctgcatatggctagccagctatcacagcaccatttattgagtagggaatcctttccccattgattggttttgttaactttgtcgaagatcagatggttgtaggtatatgactttatttctgggttctctattctgttccattggtctatgtgtttgcttttgtaccagtaccatgctattttggttactgtagccttgtagtatagtttgaagttgggtaatgtgacgcctctgtttttgttctttttgattaggattgctttagctagtcagactcttttttggttccatataaattttagaatagtttcttttctaattctgtgaagaatgacgttggtagttagataggaatagcactgaatctgttaatttctttgggcagtatggccattttgaagatactgattcttcctacccatgagcatggagtgttttttcatttgtgtcacctctgatttctttcaaaagtgttttgtatttctccttgtagagatattttacctccttggttatctgtattcctaggcatttcattttatttgtagctattgtaaatgaaattgtgttcttgattttactctcagcctggacattattgctgtatagaaatgccactaatttttgtacacttatttttttcctgataccttactgaaatcattcatcagttccagtagccttttggcagagtcttcagagctttctaggcatacaatcatattgtcaacaaggagaaatagtttgactttttcttttcctgtttagatgccttttatgtcttcctcttgcctaattgccctggctagggcttcctaatttcttttgtaatattttcacatgaaaattctcctaagcttaaaactacatatcccaatgcctgtggaaatctcatcttggacttcctcagacacttgtgagcaaaatcaaacttcatctcattcttctgcttaagacttttcagtggttcccatcacctacagaataaaattgatgctcccgcgcttagtgtatcatataaagcctgctgtgagctggtcccaacatgcctttctgtccacatgtatcacttccttccttttcatcattctcaattactagtaattctgtcacacattatatttgcatatctgtgctttggttcttttttttttttttttttttttttgagacggagtctcgctctgtcgcccaggctggagtgcagtggtgctatttcggctcactgcaagctctgcctcccgggttcaggccatcctcctgcctcagcctcccgagtagctgggactacaggcgcccgccaccacacctggctaattttttgtatttttagtagagatggggtttcaccatgttagccaggatggtctcaatctcctgacctcgtgatccacctgcctcagcctcccaaagttctgggattacaggtatgagccaccacgcccggcctgtgctttrgttctttacatgaaactccctttctaccttgtgttgcctggcaaaatcttacttacccagractctgctccggcatcctccgcaggaagaacactttcattgaaccctagcattgtccctaatacccttaatatgtattgtcatagcaccctrtgaatttttctatatcactttccatcttatatttaaataatctttttacttgcccatctctcccmctgataatctaagctggcagaggctggatcagatcataattatctttctattcttagcrctaggatcaatgcctggcatagcatatttacattttttatttaaataaactgacctgactttcttctggttggwtawgttctgagtccctattactaaccttggtcttttatctcagaagttgaaggctcccctggagccagctgcaaagttcccaaagccctaacaaccccacagccaatcagctacagagtaggctgccctgagtcggcctccccaacacaaagtccagggttggagcaggagcaggagagggacaatggaagctgccccgtccaggttcatgttcctcttatttctcctcacgtgtgagctggctgcagaagttgctgcagaagttgagaaatcctcaggtaaaagaaaaatgtagttgggtggctatagtgtgaaagtgttattaggagaaggaaagggagcatggtggttctctgggtacttttcctccacacctagaaagctttccaggaaatcctggataagatgcattttgcctggtagagagtagggaagtctggcagtatccttcagagacagaccatcagtagggtcacsttccatatgttagtaaaaatattatgccttggaatgccaacagtactcctataaattgtgctcttcttgcccttagtatagagataaaaggtatagrtgccctcattatttagagctgcttcttcttgcctcagtaccctgacatcttctgcttctctctctagatggtcctggtrctgcccaggaacccacgtggctcacagatgtcccagctgccatggaaytcattgctgccactgaggtggctgtcataggcttcttccaggttagttccctacttgcaattcccccaagagccagaaatgttctacctyaagggaaccacagcagccacctgctgctggcagatggcactgcattagaagtgggggtaaagggagacagccacscagtttgatttcatcttgtccattgggacctcttattttcaagacattcccagtctctaaattatawctttctcatacttacttcaagagttctgagcctgtgggctgcatctcctcatctatggatgctttgaagctcaagtcagtatctgcagaaagaatgccttcayggaaccccaccattgtcctaaacacatttggtctatactctcatagcaccctatgaataggcaggggccagagtgaacccaatttatatcatccagcaacactgtttacaggatgccaaacatcctggacattagtcagtgcacagccttttaaagcctttcccccaaatatggtagactctccttctttctctttgccttgtctgaaatgttggaaaakgatggcattttgtatattcaaggtgytaacctccatcttccagattagcttcttgactaagaaaggcagccataaatgagactgcctcattccagcattttcatctttctctggtggtagcatctggaaatcctcacagctgatcaagcccctactctctcatagcagaccttcttgtctgtttccatttctcagttacaactcctgattaccctgtcagttctgcgtacacagttggaaatcactgcaatgagatgcaagtcagggagaaagacagggacwacatttttcaggaatgagaaatctgagctgtagacaaaaacaccgtcagaaagatggggaaggggcaagagcatggaattggaggagtgtgcaataacttaaacagccgccagatgccatcattttatcctccagcaattccatctgaaggagcagaataagagaggaggcctcaattaaytattgttcatggcctctagaagagtagataccagctccctctgcttgaccccagatgcaagacgggtatgttagtttcttctcaygctgccaataaagacataccmaaaactggataatttataaaggaaagagttttaattgaatcacagttcagcatagcttggaaggcctgaggaaatttacaatcatggcagaaggaacctcttcacaggatggcaggagagagaatgagcacaagcaggggaaygccagacgcttaaaaaaccatcagatcttgtgactcatgcactatcacgagaacagcatgggggaaactgcccccatgatcccattactgccacctggtcccacccttgacatgtggggattatggggattacatttaaagatgagattttaggtaaggacacagccaaaccatatcaactggccatcttcttttctccttgcacatctcctccttcagcctggggacttgcagggtagaacakgtttgttcctgttaatttcctggagctgctatggataaaggtcccgtgagagcagggaaaatgatgccagcgtctatggaaggcctggaatcactgttcgcaagtggcttctctgctgcctcctgcaggcctgggctgcagagttgaatgcgtgaacagcatcttcatgtgcaaagctcaggtttatctacagtggcaagagagggactgtccttccataacctgcataaacttttgttaaaacttctaagctttcattttaattgttttatttttcttctttttttcttttttggcccttttgatggcgtctatttcatatttttgcattttttcctttcatccacaaatgtaaccaaagccaaaactcaagaggaagagccggtgggaggaaaagccagtttatttgaagatccagtaaaccaagaagacagcggactagcatcctaaagtacatcttggccgggcacagtgrctcacacctgtaattctagcactttgggarcctgagggaggtggattgcctgagctcaggagttcaaggctggcctgggcaacatggcaaaaccacatctctactaaaaatacagaaaaaattagccaagtatggtggtgaacacctgtagtcccagctactcaggaggctgtggcacaagtatccgtgaggcagaggttgcagtgacccaaaattttgccactgcactctagcctgggtgacagagcaagactctgtgtcaaaataaataaacaaagtacatcttaagtcactaccaattttaggttctttgtatgttaagggcagggtgaagaggagggagttgggatcaagtgataaccggcaaccacaggcatctgggccccagcaagtgtctcaggaagttgggaacttctttgtccttggtcaggtcacaaggcacctataaatctgtagcactacatagttagttgtttacatacttttcctttaatcccagagttagttttaaaaactatataactcctatttttgcctattatctcagtgctctaaaattattctaacctacatgcaggaatgagtaaataaatgccctttaaacaaaaatagagttggttatgttagtttgtttgctatttcaccgttaaacaaattgttcccagaagagttgcttctcatgtgtatctacaacagtgcagccaaactaggcaggcctttatgattttgaggcctctctcagcccctagtaaacttcaagctctatgacaaggcctgacaggagtctcaggctcagctacaatttcgtggttacctattaacttasagagcctggaaaattcaagaatgtcactgccagttaaacctgaattgttaggggtaaatcatgtgttactgggcagtaaatcaaatctatgatttctggtaaacatcatatcatatttcttttgcctatcgtttgtctctgcccttcgaaataaccactgtgrtattattttttctcttgtttttaggatttagaaataccagcagtgcccatactccatagcatggtgcaaaaattcccaggcgtgtcatttgggatcagcactgattctgaggttctgacacactacaacatcactgggaacaccatctgcctctttcgcctggtaagttgggtgggtagsttgagctttctcccagattttcactgggttgtggactcataaacttgtgagactggaaaggactctatgtcttttacactaatgatggtaccaaattcagggacattgttgacaaggatgatgactcaattcaagcttcccaaacaggtactgtaatgaaatggaaagaggacaggactgaaagccagggaatggaatttgtggtactgctttgtcgctcaacagccacatgactttgggcagtcacttaacattttttatctccaattctttcctttataaaataaaagagttagactgtattatctctaaggtcactttgagctccaaaatttttatattaaatattttgaggagttcatttatgttcttcaaacatttattaaatacttcctgtatgccctatgcaagataccgataataaaaacatattaaatatattctccagtctcatagatctttaagtatggtaggtattgtatatataatatgcaagtayctataataaaaagagaatcactatgggtaaagttttatcacagttcaaaggatagaarcagtgtgggaattctgaaaaaaaagaaaagaaaaagacaacagaattgaaacttgaaggatagataagtttagacaagctaaagaattcatggccaacgggaaaaaactcaggaaacaataaacaggccaatctcactggatcccagggtacacattggggaaaatgaatataagagaaagaaacttgattaaaatcgtattgtggggaaaaagtagaataccactttaatgagtttgtcctgaatttggctgttactggaaagcccctaaagcctttacatcaggggagtaacatgaacagaaatgtgttttattagattattttgacagcaaggtggaggatggatttttaggttaaaaggcaagagaagagggagcttttgttaggctgacaaaatagaccatgtgagaagtattaagagtctgtagtagagaggtagcaacagaaattaaagaagaggaagatcctgtgatcattagatatcacagttatggaaagcaggcaaagcttaaagccagggtgtctaagaatagtgaggtcatgtgcagaaataggggtttctgatgctttcattggtcattgagttctacttgttggtggaatatcaagagtccactgaaaaagagtaaattgatggaaaagaaaaagttttcagtatttcgggactgaatgtcgtgccccttctagtttccatcctttctttccctttcttttctcattgaaacttctttaagtgtattttgtactgtctttctctaaactagacactactatctagtttatgcccccatcacaccattaaaactacatttatccaggtctgcatggcttccatattgccaaactcaatgaaccctttttaggtcttattttactcaacatttctgtcatgtatgatgttagtgatgacttytttctttttaatgttctctctttccttgaattctaggaaactacttctcctgatcctcctgctgcttttataatctctttgagaccttctcttcctgtatctacaatgctgcctgacccaacactttttacagtctgggtcatggaacccatgctatgtgaaggcaaagactgttctgttcagtgtatccacagagcctagaacagtgcctgctgtgcagtaggtgctcactaagtatttgtttagaatgaatatatgaagaatcaatgaatgaatgaatgaatgaatgaatatgttcttcttaagaagtacaattcttttgcatattccactattatgtgcttgcggarcatttagaatattttatccctagtctggacttctctcatgattcaaatgtttgctgggtatataccctcataagcactatactcttaaaatgttcaaaactgaatttattgtctgcacctgctaatcatattcctccatctaagatactattttattaagtggctatgctcatttggtcttacatttttgccagttgtatcttctatcttgaatctatattctcctccactccttctacctcattctgtatttaggctcttagcctaagcataagcaatttcattagcttctgaacagatctccttttactactttatatacagtttctaaaatggtatcacaatgatgtatttaagatagaaatttggccatagcactcttctctttaaaactcttcaacatttctcatttcttaaaaatcaaaaatgagatatttaatgttacaaataggctttgctggcctgccccactgcctgcttctctagtcctttttccatccagcttccaccctgggctttatcctctcagtagccaactatacacataatgatcatccaattccatgattttgcctagactattccttctgtctagaatgccaccacccgccaagggtcccctttcacctagcctcacccagatgactccttctcatactccagtgaatcagttcaggaatgttacccttcaggaaatatctctggaatctccaaatgggcctaagcattcctctatatgtaactccttawctctattttcatataccattttataattcatatcatatatttacgtatctgtctcctctattaccctcttaggccatgacctattcaaggctggaaacgatgacttattcatctttgtattcaaagggctataatacacctctggcaccttaaaggcactcggagggtgcttggggaactaaactcacctccaaaagcatgtctgaagttgtgtgagctcccttcagcaacccctttcccacctgcacagtggttgctggtttgcattctcaccagtgtgaaataagattaaatcaaattcttctgtgaaaagctttgatgaggaatatatggaaggttaggcaaatgcctttcgtgttgccattgaaccactggtagaaatccttcaatacaaaaattctaataagctacactccacacctacttctttctyagtttttcgtttgtcggtcttataaggcctgatttaaaaggcttagtaccaccaagatacgcacatggggaagaaaaacaagtgccgttgcttccaacatctctacaggtttaacatcctctaacaggagcactggcgttgcttacaatttattcctcataaagcttcactgatgacttctcagtttttcagtcttctttaacatctgttttttgtttaccgctagtgacggacctagtctaaatgaactcttgggacctctgtgggcaagattatttatgtgccataccagaaaacaaacaaaatggttcctgccctacttcactggcagagctggaagaagctcaacttttgtcatgccagctttcagataaatatttttttcacagtttacactttcaaaactttagtacatattttaataggaccattattcaagagtttggagcacttttttttttttttttttgaaaagggaacatcaaccaagactatcctattttacactgggaaacgtgaacctattgaaaattttctggatccagtttgttcggtttgcttgtttgttttcagagcctaatctatgataggcactattacaatatttgaccatttaattcacacaagaatctgatgaagtaatttttattattccygcatttttaataaagaaatttccatgagagaatggtttagttgcccaaaatctcacaactgtgaagtaacagatgtctgattcgtacccagcattgctgtctacaaatcataccctttttactatattatagtggctttcttaagcacttgaccctgaagataaactttgtttttacactgaattctatctaatgtccctcattctaaagcctactttttttctttcaactattttctcttaawttattcctctagcctcctagcattccttaatcaaactgcagaattatttatcaagatttaatctagacattatatattgtctaaatttacaaaattttccattttaagaacatatttagaaataagctgaaataatgattaactgaaaaaataacaataaatggatattactcatgcttgaaatgttggagcaataaaaggccagccagtgctgtatttatgcaacataatattctccaaaaatagtgcaggccaactatataaatgtaatcaggaagaatttaggtaaaattcatgaaaccataagttgcatataacagtcttgctgtgtgagggcacagcctgtcttttgtgagwgtaacagcatataaactctcaaatttttcaacaggactcttattgttgccctagcagagatgtaactcccaggttaaataaactatgagcctgtcytaaaatggaatttgaaatattatttgaatgtttaccctgctttggattttttcagtcactactatttaaagaaacataattaacctaactttgacctaatgggatagtaatgaaaacacagtgcagtcatcctttattccttttacagttatttattgggtaactattataagaaatttacctcaccagacaaagagaatcagaagaaactcgtgcatgagaataaactgataagaaatgcaagaagatatgtcagattataaaacattttttattttattctattttattttatttcattttactttaagttccaggatacatgtgcakaacatgaaggtttgttatatcgtgtacgtgtgccatggtggtttgctgcacctatctacccgtcacctaggttttaagccccgcatgcattagctatttgtcctgatgctctccctcccccagccccctatccccctacaggccctggtgtgtgatgttcccctacctgtgtccatgatgaaacttttttttaaagtatatatttattaaatatatgataagctgaacagctttaaaaaaacaaaccgaggacgtgaggacctttgtttaacaaatgatttctcagtgccaccaaagacatttaatactataactgtggcataaactaagacaattttaatacattttataaaaatctgggttgttagaaaattccatgggaattcaaatgaatatagctgaaatactaatgaacagaaaatgagtgattggtatgatgtagtgtctacaacaacaaaaaaaatctacttcagatactcttgaggaaactcaaaattatgttttaaggtagcaatatttccagtttactatttctgtttttcttctgctgcctcttttctctgaaataaaaatatgatattttaagtaaaattctttccataaaactgaaaaaagacattttaaaaggtttttccaactcttggttcctgggttggattttctttccagtgcattatgcaaataattccctttacagagggagatttcctgttcaaatgttgcttccagaaaccctaaacatgaatgttccagagtttattagtttaagaaataatgaaagatcgggcatgttttcttaaaagaagtacaacaaactggagagactgcaggagagtggcttttattaaagctcttttgcttcttagagaatgttatcaccacttaacatcctctgcctccaatttagtgcattctttaagtccagaaacacccagagtaactggcttttcttgttctccctgttctgggaagtatgaaggactgcccggaaaagagtacagggagggggggattcttgatccatgcacagcgatgtgagctgaggtgcaggcaccagacctaggaattcctagaaaaatwgtcaggaagcatttagacacatcaaatgttaaacgagtcctgattatgatgataatgatgatgattttggtggttgcaatagcaaagccttaagtatgaaggagayktgccagctggaaatacaggtcggtagcagcattaagtatctagaggagctgcaaatattatttttttgtgtgctcattttatttctttactcattcgtcttgatatgggcaagggaagrggaaggaggtggtaggagggtgggcaaggatctacctaagaccttttctcttgctttcatgttttgttttgttttttcccaagctttctactcaaaactttgtgaatttttaaacaattaaatatacacaaggagttcatttttaccctgtggttttgatttgtttcaaaattcttttttagaaatacaaacttttctgtacctcaacatttatttatttcataaatttaaattgtataaagcagtcccaaaataaagagtgcttaaattgtcatctgaatgaatggctgcaattttatgcctcagtgcatatagcaggcactcggcaaataattatgaaacaaatggattggaagagaatgactagatctatccagaattaaaattaaccataaggggtgcattgtgcatctccagagttcttattgcttttagttaccccaatgggagaccctcttgaagaaaagaggtgaaataggaatcatcaccgggatgacaataaagagcaatcttagattcttgctgtttagtgactttaatttccctttgcctgaattccytcctaccttaactaacatgagatttgcttctgatcttactgggtagactaggagaaagtaccttggggaaaaaagggtggttctgatccaaggcaagatctgattgggcaggacctatacagatagcacatggaggggaaagggttaaggagatgtccaagagcagatggcctaaggatctcaaaagtgatgcaaactattgtaggaaatggacaaaattgttcaggagctgatactaataattttatctataggcgtggatctatctatggatggtggaggcactatctttgtgtctttatgggtatgagtagattggggtgaggaaatagaaaactgagaacaatgattggaagaatgaagtcctatctttcaatatatctgagtgtggtggaaagcttgttctgaaatacaaatctgggataatggatcatgtagctagacaatcctttccaccaaagactatttttaaaagttaaaatgtgtgtgcatgaatgtgtgtgtaagtgtgtgtgtgtgtgtgtgtgtgtgtgtgtgcctgaaggcattagagagccagtaaaagagrgaaaatatctaggtcaagatctggaagaagatgaaaaccaaaaaagatgaaccctgcattgaggactgctttttgtctagacggctttggtcagttctagaagcagccaagaagctaagaaataaatttgcattttgagatcctcaggagttgaaaattaaatgttggagtccaggcctcacaaggggaaataggaggtgaatctagtacaacacctttcacatcccctttgaatcctacagagctgtacctaaaaacaggaatgaatcatagtagataagccctctcragggctgcagcacagatgcaaatcatttcagcccctgaaattgaattagagtgattttagatatatatatatatayacacacacacacacatgcacacacgcacacacacacaaatatacacacatacgcctacacatatgcaaatatatatacatgtggaatatgcataatccactcttagccatgccatagtacatctaaaacttaacaaaagataaaatgttaaaagaagtcagagaaaagagagactatcatcaaaatactctcaaagggacaaccataaggttcacagctgacttctcaatagcaacagtggaatgcaraatacaaagcattatatctttcaaatactgaaagaaaatcactgccaacgttagaattctacccccagcaaaaacarccttcaaaaataaaaggtgaataaatatatattaaacagccaaacggggagaatttgtcactgaacacctccatctcatactaaggaaaatagtaaaaggtcttctctaagcagaggaaagaaaacccacacagaagctaaaaaatacaggaataaataaagagaagctaaaatgcaaatatgtgcataaatgtcagtgtatattgaagatataacaaaaataataatatcctgtgagatctggaactaatcatgtgtaagtcttgaattagagccagaaaattgaatttaaaagaggtaaactgtatttgaatattctaatgtttgcattgtccaagaagaagctgaaattgccaattaatattaggttctgagaagtgaaaaaaaatgcatgttgtataatgtattctggcaatccctgagagaataattaaagcctatgtaacttctaagccaataaagggaaagaagaaaataatataaaatactcagtcaattcaaaagtaggacagaaataaagaaaaatagcatttggaayacatagaaccaatggaaaatgcataattaaatacaccagtaatttcatttcgtggaaataatccaattaaaagacaaagattatcaggctggattgaaaattgcaactatgtgccttctacaagtgacaaaagtaaaacacaggatggagctataccatgcaaacacttccaaaagaaagctgatatgaatatattaataccaaacaaagtagacttttaggcaacaaggattcctagagagaaagaataacagttcataatgacagtttcaatttgccagacagatttaataattctaaatttgcatttatcaaatacatgtactgatactatataagcagaaactgacaaaattgaataaaaagatggctaaagccacaacataatagaaaaatttaacacctttttttttttttggagacagagtcttgctctgttgcccaggctggagtgcagtggtgcaatctttgctcactgcagcctctgcctcccaggttcaagcgattctcctgcctcagcctcctgagtacctgggacaacaggtgcatgccaccatgcccggctaattttttgtattttcagtagagatgggctttcatcatgttggccaggatggtctcgatctcctgaccttgtgrtctacccacctcagcctcccaaagtgctgggattacagacgtgagccactgcgccaggccccaacactcttttaaataaaataagctggtttwaaaaaaagaaagatatagaaaatttcaactataaaattcaccaagtgacctgataaacatttatagaatactgtattcaaaagctgtaaaatatacttaattttaaagacacaaataatacaaataaaatataaaaataaagctagaaatcaataagaatataaccagaaaatcttacattttaaaattaagaaatacacttctaaataactaatagtttagagaagaattaagaacaaaaaattaggaaacattttgaactgaatgataaaaattctacatatcaaatttatgagtgcatttagagccttctaaggaggaaatgtatagatttctatgtattttttgctacttacaaatttaaaattggccagataataggattttatatcttggaaacataaaaacatggaatgacccttaatttatgatataactgaaccccatcacttacccaaagttagcctttgggtcagggggtttcctcactatagttccttccatggtttccagaaagatgttagtgaaaaggggtcctgatccagacctcaagagagggttattggatcttgcgaaagaaagaattcagggtgagtccacagagtaaagtgaaagcaagtttattaagaaagtaaaggaatgaaagaatggctacaccacaggcagaacagccccaagggctgctggttgtccatttttttggttatttcttgattatatgcactaagcggtggattatccatgcctcaccttttcagaccatatagggtaacttcctgacattgccatggcagttgtaaactgtcatggggctggtgggaaggtaacagggacgacgaccagaggtcatgctcctcaccatcttgattttggtgggttttggccagcttcttcactgcaacctgttttatcagcaaggtctttatgacctgtatcttgtgccaacctgctatttcatcctgtgacttagactgccttaaccatcttggaatgcagcccrgtaggtctcagctcatttttcctakcccctattcaagatggagttgctctggctcaaacatctctgasagcgataggctcattctggggagaaaaggagcacataggtcaagtcaggggttgctttctacatttttttaattaaaaactggaaaaccacaawaagatatcacctcaccccaattagaatggctatcatcaaaaagacaaaaaataacaaacgctggtgtggatgtggagaaagtatttttatacactgttaatgggtatgtaaattagtatagccrttatggaaaacagtatgaacattcctcaaaaatttaaaaatagaactaccatatgaaccagcactttcactattggatatacatccaaaggaaatgaaatcaatagtatgtcgaggagatatctgcactcccatgttcattgcagcactattcacaataaccaagaaatggaatcaacttacgtgtccatgagcagatgaatggagaaagaaattgcagtacatatayacaatggacactattcagccataaaaaagagwgaagttctgtcatgtgtaggagcacagatagacccagaggacattatgttaagtgaaataagccttgtacagaaagacaaataccacatgatctcattcatacaagcaatctaaaaaatggatctatrgaagtagagagcacaatactggttatggaaagctggggagcggagggggaagtggtgayggaagagggaagagggaagtggggacagggagaaattggttaataagttcaaagttacagttagatgaaaggaataagtttaggtattctattgcacagtagggtgagtatagtcaacaatattgtattgtaatttaataatagctacaagaaaggattttttaatgttctcatcacaaagaatatttgargcaacrgatatgctaaatactatgatttgattatttacacaatgtatacatgtattgaaacatcacactataccccataaatatgtacaaaactgaatagtaggttaaaagtaaaatataataaaataggaaaaagacttcaaacactaagaaaagttttcaccaatcaatttgtcaataacaataatagcagtaaaactaatggcatggcagtattatttgcaatatagttggttctgtttttctgtttctctgttcaccagaaaaagagaaccaacaggagataggtaatatagatagatagatagatagatagatagatagatagatagatagatagatwgatagattgattatagatagatagatattatatagtaaaaattacatttttacattgtattatttttataacacaaattatatatatagtggtaaatattatatatatgaatatacatattaagagatttttttaataagataatggctcatacaaatatgaaggctgaaaagtctcaccatctactgcctgtgagctggagacctagatgagccagcgttttagtttgaaggcctgagggccgaagcaccaatggtgtagattccagtctgagtctgaaggcctgagaaccagaaacacccaggacagtagaagaccaatgccccaattaatgcaagcaatcagaaagaaggagactttaatattcactttagagaagagtaatacaaaaatcaaggatcttagcatttttttttttttttttttgagacaragttccactctgccacccaggccggagtgcaatggcacgttctcggctcactgcaacctcccctccaccttctgggttcaagtgattctcctgccttagcctccagagtagctggcattacaggcgtgcaccaccagctaatttttktacttttagtagagacagggtttcaccatgttggccggctagtcttgaactcctgacytcaggtgatccgctggcctyggcctctcaaagtgctgggattacaggcgtgagccaccgcacctggcctaccttagcgtccattttaagaagtaagaaaaatgagttccaagtggattttagatctattgtgaaagacaatgtttctaggagaaaatataggagaatatcttcatgaccttggtgtagtcaaagatttcttaaaacaaaacaaaaaagtacacattagcgataaagatgataactttaactatgtttaaattaccttctttcatgtgcagtcaccattaaaggagaagccctagtaagaaaatatatatattatagaaccaacaaaggactcatatccagaatgtataaaaacacgttcaaatcagagagaaaaagatagacaaaagaaaaataggcaagcaacatgaataaacacttcataaagaggataattatctttaattgtcctcatatccttaaattattattaagtggttaatgagagaaatgcaattaaaaccactgagacataaccatatccaccaaaatcagtaaaattagaaaaactgacaatrgcaagtgttgacaaggatgtggagcaatggracctgtcatacacagtactggtatgtgtaaattatccactttggaagatagcttggcattttctactagttaactatatacatatcctataatcaaaaatcccaatctgaggtatatgctcagtggatacagaggcatatatgtactaaaagtcaagaagtgttcattatggcattgtcttaatgactagaaacaaccaatgttcatcagtagtaaaatgaataaataaattgtgtttattcagacaattgaatattatacagcaaggaagatgaacaaactacagctacatgcaataacataaatgacttataatcaaaatgttaagccaaagaagtttgtttacatgtatttaatgtgaaaaatgaggtaaaactaaactatagcattaaaagaagcatctttaagttataaaggtataaaggaaaggatgaaaatggtcaacataaaagtcagcatacctttggcaaaaaaaaaaggatgaattataaactagaaggaagcaccaggacttcaggggttctagcaatattctatttcttgacttgggtggtggttctacaatagttttctctgtgataatttgctgagctttacagcaaatgtttatactgtgttatatttttctctacatgtgttttatttcacagtaaaagggtacataaatataatacaaatctgaccttgccaatgaccccccttgccctcagatagaatttaatctacatgccttggcttcagaacacttccaaatttgctcttccttatccctctaagctgatctctctgcaaccctcacatcacatctggtagggtcacagtgaastaacagcagcttccagaacgcaacctctcacatctcacagtatttkcatatgctgttctctacttaaagctccttcctcatcctcatttatctgatcaagtcttagccacttttcaggagtaacttcttccttgaagcttttctgctcttccataggtgacatgcgggcctgtgatyctcctgtgatgacacctgccacatcatgtgggaaatttctcttcacttttttggagtctacaggacagtttktccccctagggcagagaaactctcttacttatcttttggtcttcagagctttaatyagtgcctgtcacatgggggtctaaagacgtttatcaatacatgaaaaaaagatggaatagtgacttcattcttttttgtgttatccaggtagacaatgaacaactgaatttagaggacraagacattgaaagcattgatgccaccaaattgagccgtttcattgagatcaacagcctccacatggtgacagagtacaaccctgtggtaaacaatrcttcctgttcttagtcccttcagascctgagtcggggaaggtactggtcttcataacagaggtctcttcctcccagagttccaattcttcgaccaatacaatactgtattgtttatgttactatccttcctacacctttttaagatttaacttgttcctgttaracaaaaaaacagagaaaagttaaatgarctatcacactgctagtaakaaagagaaccagaatrcacagttaaggtgactaactcaaggccaggtgcagtggctcacaaatgtaatcccagcactgtgggaggccaaagcatgaggatcactcgtgtccaggagtttgagaccagcctgggcaacatagcgagaccttgtctctaccaaaaacttttaaaattagccaggtatgatggtgtgtgcctaaaataaaataagaataaatgaaagacaaacaaaaaaattttaaatgaagctcactgatcacatatttggatgtcacaggaatgtaaagtttctgtaattgtttctaaacaaccatttcattttctgtatgtacctccttgcagaccagtaacaaacagttcctggtctggcagcagctgcaaaycatgctttgactagcamgtgcctacaccctcaccatgcctcagccttctctcctggtgtgtcttcctctggtgttgcatgctgcatgcaatctgagtaaaggtggtgctccacctgtcctgatcaccaaatggacttctaacactttctatagactataacagtctacagaattatcttatgtgtcccatcctttattttccctgacatagattacagaaccttacagggtattaatttctagtgatctacatcagctcaaaatgctgtaccttctattctccaataccagttctttacatgcatggtatgatttttgagaacttacagagccctttcatcctcattttttcattcaatcctcatattgattttttttgaggtagaagagaggaaattattgtgtccattttatagaggagaacattcaagatccaactgataacattattcaaagtcacatcatgagtaaatagaaaaggcataatttaagggacaaaatgtaactgatgcattagcacattttgccaacttccattttacagtagagtaaatgggagttcagaaaatttaagtaacttcttcaaagccctatggctagtaattcaagcttcagagacagcctatgtagttgcccttgcttttttatgactggtgcctgtgactgaatcctgtggttgtctattgccctacactgccttcaacaggaaacaccccttttcttgtggactaaaatctggcctacctctcacaccatctttatctctgtggagttggtgactctatttccacttctgctaaggctccaaacacatatgcccctggggtattggcagtaataatcaaaaaggygttcttctgcatgtggggccagaaaagatgatcttatggtccctgggctatggcctccgtgttgtggcattttgcaagctagctaaggcaggggcatgcactaaccttcctggtttcttatgcctgatctgtctctcatttcgcagagcaatgacgtatcttttttaagttccatattattagtgaaggcagattatatcaagagaaaattcagtaagaatttctttaaagaagcaagttcaatctgtattgttactttttttatttcctgaaagtaatatttttctcatttggagaactgcccattctactatagctgtttctcatctgcttctggtgcaaaggtttgcaccagtagcaactgggcagaaaatcccagccatgcacctgacctgccacgcacttttaatgcacacactcagtacttggcgtcaaggtgtctgttaggattaaatgaatccattcggctatggtcaatcccttctgccaagataactgtaccttttgacatcttagcttttatttctttactcttcccaggaattatcctccatctcagtgttagaatagtgaatgaatgctctaaatttaagtagcaggatttagtaaaacaagagtaaatcatgtgtcatccaatctcccaaatgaaaaatctaaaacttgattttaaactccayggagaaatctttaggaaaggacctactgggccctccttgcctacatattgtaggcagccaaaagagctggagaatctttacaaacttgtgtaaaaaatcaggaagaattctacctagctgygcccttccccatcctcctaagactctgaccaaagatttgttaacccaccatgttctctctcttcctgtgtacacactagttttgtagcaatgctttctgaatttaggagaggtgaaaagagatgagattggtttgaagtagactcgcagcattatttcaggacagtgaaatgaagggaaccagtgccatggattcccctctttttcttctcctctgtctgactggtggctgttccactcctctaagtcattgacaacttcatggaaaaatcaccatctctaatcagcaaaacaaggtcaatgcttctggtctcctgaagagctcaccttctgctgacctttrgtacattggttcaaccacatttgagatygagtttgtttatatggggttttgctatccactgtgcatgaggcagtccatcctgatgatcaagagcatggactctggagctagaccacctggtgtgaatccctgtctgccatttatttgactcttggagaattagtctatctatgcctcaatttcctcatttgaaaaactgggaccttgaagattaaattacttattctttgttaagagttggagacagtgccttccacgtaatgaacactcaataagtacgaactactaatatgtactcaaacaaagactacattttaagtgtctctgactagtcttgcaacaagagagggggctgaaataaagtgactaatatgttacatagtgtattagttgtctattgctgcaaaacagattactccaaatcttaggagtttcaaataaaaaacattgataatctcatgcagtttctgcaggtcatccaatttggggtggctagggctaggtgcttctggtttgaggtctcttgggaggttgcagtcattggtcagggctgcagtcatctgaaggctcaactggagctggggatctgctyccaagatggctccctcacatgratagcaagtcaatgctggctsttagtagaaggacttagttcctggccatgcgtttctcctcagaggactgcttgagtgccctacactggggctggtattcctcagagtgagagatagagagaagagcagaaaccataatgtcttttaagacttcaccttggaagtcacactccatcatttctgcaacattgtcttggttactcagttctgccccattcagggtgggaaggaaggatctacacagttgcatgaaaacgagatggtaagacttaactgagagccatcttggaagctagttccatttgtgttaccagtggccagctctcatttaagtttcaatcyacctattcactccttcccaggtactaatgcattctttctcgctttcactctactgtaacacatttcgacttgccagactgtgattgggttattcaacagcgtaattcagattcatctcctcctgataatgaacaaggcctccccwgagtatgaagagaacatgcacagataccagaaggcagccaagctcttccaggggaaggtaaggcaagaatgggaatatcctattgcatacacacctccaggacactaggaaaagggagatggggctaggaagcagagataaataaggaaaacaactatggttaggagatagcaaagcaagaagtaggacataataaatcacattatttgaaattagagatgttgtattttatcatattaaaggcatatgtaattatatcttcctgtagtgattaagtgtgggttttttcctgcattgattagtagagagaaaatagagatccaaagagactgaaagcaaaatcacctctaagtcaccatttgtttaatccttcccataatttcatagagatttagacctcagggctyatttctcatataaaacacctatcaagtacctggtgcctgctcaatatacaatgaatatttctttctttccctcccctcctttgtggagttctgcttgatattactgaaatagtaaaacttcaactacttcaaggctactgtgcctaactagtgactgttctaatgatgagaactgtctggtaataaaataagcgcctttctgatggttggttctctaacactgaaagtatttagtgttactgaaagtagacaatcatctgatcagaatattataaagaagatttctactttgggttgaaggtttgatttaataatataaaataatctacatttatcaagcacttactataggccaaaagctgaataaaaatattaatgcgttacctcatttaatttcccccaccaaaagcccattttgccaatgagaaaactgagtctcggagaggctgagtaatgtgcccaaactcacgtaactagagagtaccagaggcagaatttaaaacgtgctctctgctcctaaccattaggctatacttcctttcttaggtaatcactaaagtaatttccaattctatgttcttaaaattaaatcaatctcgtcaaagggataaaacatcaaagcaacacaaaataataggaaattcattttttttaacttttaagttcaggggtacatgtgaaggcttattacgtagttgaacttgtgttatgggacttcgttgtacagatgatttcatcacccacacattaagcccagcaccaaattgtgatcttttctgctcctccccctcctcccaccctccaccccccaagtagaccacagtgtctgttgttcccttctttgtgttcaggagttctcatcatttagctcccacttagaagtgggaacatgtgatatttggttttctcttcctgtgttagtttgctaaggataatagcctccagccccatccacgttcccacaaaagacatgattttgttctttgttacagctgcaataatttattttaactcaagatttcaatttcatggtgcagaccataaattcaatcagtgtgagctgcaacaattacraggtatctctttatccctggacgtcacctcagrtagaactttttctttcaaacttccccaactgcagattctctttattctggtggacagtggtatgaaagaaaatgggaaggtgatatcatttttcaaactaaaggagtctcaactgccagctttggcaatttaccagactctagatgacgagtgggatacactgcccacagcagaagtttccgtagagcatgtgcaaaacttttgtgatggattcctaagtggaaaattgttggtaagtgtgagactgcaggtaaagcaaattgttttctttctatgtcccttttatttccagttgaataagaattctttgggctcagagagggaggagagcaaaatgttggttaatggataccaagtgcagatagataggaggaatgtctagtgttctgtagcactacagggtggctgtcattaagaacaatgtattatatattttcaaatagctagaagagtagattttgaatgtttccaacacaaagaaatgataaatgtttgaagcaatggatatgctaattgtcctgatttgatcattacaagctgtatacatgtatagaatatcactctgtaccccataaaaacgtaactattatgtgtcaattaaaaacaaagataaaagcaaaaaaattaaagttaaaaaaattatttgggctctactagatttgattaaaagcaaaagtctatgaggatatggtggccggagtcaggatgcttgttaggatatatcgtgagactcaaactagaaaagcatgtttggaaaggccttgcatattcagaggctgaattttggatttcagcatttagtgtaaagcattaatgggcaacaaatcaaacttcatataacagggttcatgagataaaaattaaagaaggatttaggacttccaggagtaaacagctcagtttactaatctaaatatcattgttataatgttttccagaaagaaaatcgtgaatcagaaggaaagactccaaaggtggaactctgacttctccttggaactacatatggccaagtatctactttatgcaaagtaaaaaggcacaactcaaatctcagagacactaaacaacaggatcactaggcctgccaaccacacacacacgcacgtgcacacacgcacgcacgcgtgcacacacacacgsrcacacacacacacacacagagcttcatttcctgtcttaaaatctcgttttctcttcttccttcttttaaatttcatatcctcactccctatccaatttccttcttatcgtgcattcatactctgtaagcccatctgtaacacacctagatcaaggctttaagagactcactgtgatgcctctatgaaagagaggcattcctagagaaagattgttccaatttgtcatttaatatcaagtttgtatactgcacatgacttacacacaacatagttcctgctcttttaaggttacctaagggttgaaactctaccttctttcataagcacatgtccgtctctgactcaggatcaaaaaccaaaggatggttttaaacacctttgtgaaattgtctttttgccagaagttaaaggctgtctccaagtccctgaactcagcagaaatagaccatgtgaaaactccatgcttggttagcatctccaactccctatgtaaatcaacaacctgcataataaataaaaggcaatcatgttataggagaaggctggcatctctttgcaggccaaaccttttgtaaatacccagctgcccaactaagcagcatgttcctccctctgcagtgcccactgtttcgtgtcagaccataagccactaacatgtttttgttcactctgtgggtgggatgggtggaaaatagagaccatcctgcatgaggattggaacaaatgtggcaamtgagmtaggaagcaaattaggtgaaaggttggggagcagataggagaagcagggcactggcagtgggacgggctgaggctgactaagccttggattattgcaggtaaggtgtgtgatccagctcctgtgtggtgaaaggagagcttggctgagtgactctggcccataggctgttactatcaacacacagatgctgcattgttcccaggaggcccttggctcaggaggaaagtgcctaagtgctgaagagctgaaaaaccacagatgtacctaaggactggtccaagtgaggaacagggagtgaaaggctcagttgttctttctgtggggaaaactccacagcccctgggcgggagtcagctgctggcaaccacactgtgaaagccccagtgtaaggcgtgcccttcagcaacgagaccaaggtattctgtggaggtcacacagtccaacccagggctgcagaaaaccacccaaacagcttctcgcttgaggctgaaaaatattcctaagataggcacatcccagaaggctcctttggatcctgtaaacgagagctcttgacatttacggtcaggaaattcttcctgatatccagctgaggtcctctggccatgcaagctatttcttcttgcccaccctttgtggaaattcttaacagcttccagatgccctcctcaaaccatgcctttaaccacttgctggctgcactgaagcccctttatctagccatctttcccccatactcacaatctaactctcatcatttggtttttatcatttgatttacttcattgtttttctcgcctcattctttcccaacttttcctctttcttgcttaaaatagttggaacccaaactatagtaggacccatgagctacattttgtttgatattgtgctaatttttcaattatttttcttgaagtgttcccctcaaaaacaataatcaaaatggaccacatgggtcttaacatctttacaatgcatttttctacttgctgacattcaataacaattttattatattattttatatacttatttgtatgtgtataatattgaagtgaatccttccttctcatcttgtagttcttcataactgccagttacttttgccggtcttcataggcagtcctgttctttgtagctccgggggtctcataaccaaagaatgggacttcagaaagaagaaatttgtaaagattcacccatttattaaagatcagatctttagaagggcacagtgactcatgcctataatcccagcactttgggaggccaaggcgggcagatcacaaggtcaggagttcaagaccagcctgacccacatggcgaaaccctgtctctccttaaaaaaaaaaaaacaagaaatacaaaaaaaaaaaaaaaaattggccrggcatggtggtgcaggcttgtaatcccagctactcagcaggctgaggcaggagaatcgattaaacctgggaggtggaggttgcagtgagccgagatcctggatcctgccattgcactccagcctgggcaacagagagagactctgtctcaaaaaaaaaaaaaaaaatcagatcttataaacatctgcaattttttctctgtcttgagaatcttttgccaggtctacatccatttccccagggctatgttattgttgagatgtctggatacatctcagctatttttcattgtggaatcattcaatggccctcactgacaagactgccatactttttctttagagtacgaaggaagtgataatattatacaatataaatttgaaaaagatgttaacatatttggaagactatgatggaaggagcgggactgaagcaggattcaaaggaatgactggaaagtttgggtttgagtctcacctattctatgtatgtgcctctatgacactggaaaaattacttttatctttgaactttagtttattaaggttaatgtaataattattaggattgcttgagatcccagggtgataatccctattaagtaaagtttggctattacttttctcttaagttaatactacattgccttctctgggaaataatcatttctctaattgttagaacttacgggaaggcagagacttcattcaggctgtttctttgaggctgaaaaagtatttgagataacagattttaaatgtagcttttattgttttctaggtatggggtggccaacagatcaaaaaagatagccatttgaaagatagtttattactcacagttcccaagaggaggcagcatgccatgctgtgcagggccacatagggaagtatcagggtcagtcagaaggcagaaggagtaaaggtgaaatgacaagggcctttattatggtctccatgggaagaaatgggaaagggttaggagggtaaggaggcttaggattggctggtttcgataatttcagcaggctctggggcataggagctttcccttgttgcctggaacctggccctgggtggagtggctgggtggtagcccagcatgtgagagccccatgagagtccagtaaggagatagttggggtatggactctggactggttggtttgcatataaaagctatactagcaggtgagtttattactatctccaggaattggctatctctaggagggaggggcaatctctccaaggtaagcaaagtcccagatgtcaaagcattagaaatacatagtaaaacagccccaacgtccacttgtcaggggattcctgtccttcctcgcctattgggtcatgccagaagggaaggctgcattcatcaggcccatcttaatacacatataccttgagcagtcaggggtaggatgagggctatgtagcgtattgagagagagtagtttatttatatactcattcactcatttaaatattcattaaacaactatgagtgtggcaggcaaagctgccctctgagagagagagagcaattggtgatgattggatgatgagctatagaacagagacttttcagttgtagtgacaacaggcaacatggaagccaccagaatggttctgagtcacggacagaaagcagccaaacagggaaagcaatacacaaagaaagaggtatgttgtggaggggactgggcaggaggctggccgtgggctgagggggccccagagctgggggaggaggagccacaaaggaaacagtccacaaccatcataagctaactttatttcacaattgaatttggaaccagtcctatttatttcacctttctgaaaatatctggttttctaaacagagaaaagtaagactggaagtgggatggatctgactcatggctcctaattgcagaaaccttacatggcgagacctagagaattggaaaaggagaaagttaaacacgaacaccttttgagtgttgaacttttggaaaaaaggtactctggaaatcaaagaagcaagtgaattttaaaatcatacctctgtaaatttgaaggtgattcaccctccttcgaatcacttctaagataggtctctcttttctttctgttctggaacaagaagtcattgtttttgtggccttgacaatgaaatatctgagtcatactaggggtggaaggatatgtgtgagtaaaggatgagggtgttaagccacttctatagtttatgaaaagttgtgtggaatccaggctttaatgtttaattatccaaacaatttcactaaatcttaatagcaggatttaatttctacattagcccactggtcttaaaatggtaatatggtgttagcatacacttaaggaagaaaaaatagagcacgtttgacataattcaagctgtggtgaagtaacaattttaaaattgttaattttaaaattaacattgtattacgggtcatgttttccaagaagactctgcaactaaattccattgcaaggagtttattggggagcgtctggggatctgtgaagaaataaagaaagtagggttccacagaaatataagttaggctgcgatgcagtcacaacaaaggcttagattatcccatgtggatatttggtgctgaggtttccttgtagagtaccccaaattggagaatgagacccaggcctctataccccaacattgaacatctgatgttgcaagctgcacataggaaaggtgcatgctcgtgggcaagatggctcatttgagcagagggagatttctgggctggttggtgggtgggattcatctaagagctcttagctgtcaacatactcagagctgggagaagctaatgactttggggtgatctgtgcggctcaccacagcatccactacacatgtctagaactgtatctccttttataccatcatagttattgcaccaatgctatgcaaaagaataaggaaaggatggattcattttatcaaataaaagatgtagcaccctcattaagtttgtgctgggggagaacacgtctatgttgtcttcactaaaaggtaatcctgccggggcagtagaagtattcactttacaatcactcactcattcattccctcaccaagcatttcttgagtgcctactaagagataaagatgtatcaggaaatagatctggccaggtgcagtggttcacaacagtaatcctaacattttgggaggcttaggtggaaggatcacttgaggccaagagttcaagactagcctgaacaatatagtgagaccctgtctctacaaaaaataaaaaataaccagggtgtcgtggcatgcacctgtagtcccagctactcagaaggctaaggtgggagggttccttgagcccaggaggtcgaggaaatagatcagactcacgaagcctaatgttgacttcacatcttctcctctccagccatctagttccctagtgtaagataaacatgaagttcactgggaacttgaggaatggcctgaatttctaatgtacttagtagatagtcaaatattttaatgataataataatgatgatgatgtatacgcaataagaataaggcaaagacttgtatagtaacttgggagtgagcaaaaaacgatgttagatttaactccaaattctgaccttaatgcttatttatgccagctaaatttcatggaggtgatcttatctgttgttaaatatctcttgtctttatgtccagagttggtagtaccttaccttcctgtcttcatttcctgctcctcactcctgccacatcctcctttttgctaataattgcccaccctgtggtccatcctttactactttcctaccagttcatggcctctatctctacttctccctccatctccatctcttcaaataatgttgctctaggtcactacatgggacaaaagttcaggcaggttgagtgataatatgagggctgagcacaaaggggaatgatcagggaaggaagtctctgaaaggaggtggatacatattgaacagtacgttgaaagttctggccctgtcctgcaatctctacctggtacaccatgaccatcagaatcttattggttccaaagggcactcttttgagacctacataccctttactccaccacactttggcaaacacgtcacagaatgaaaatggggaagaatgactacttgtgacctaactcctcagacctgcagcctctcttggattgactcattctcttgactccatgctgttttttcccataacaccactaataatataccaaggctgaggaagggaagaggctaagtcagccaacaagtggtaatgttaggtgttcatgggagggcagggtggtttgtggtaggatatttacatgattgtgaaatacaagaatggtggtgggtgata
